United States Patent Application Publication US 2007/0214517 A1 - sequence listing, part 42

SEQ ID NO: 48603 - DNA, 1959 bp, Arabidopsis thaliana
  misc_feature (1)..(1959): Ceres Seq. ID no. 15174959
  misc_feature: MA Experiment ID: 20000185 Result: Down-regulated in Transcription
  misc_feature: MA Experiment 20000185 PARAMETER Experiment Name: At_Roots__P Parameter: Age (day) Value: 7 vs. 21
  misc_feature: MA Experiment 20000185 PARAMETER Experiment Name: At_Roots__P Parameter: Organism Value: A. thaliana
  misc_feature: MA Experiment 20000185 PARAMETER Experiment Name: At_Roots__P Parameter: Tissue Value: Roots vs. Whole Plant
  misc_feature: MA Experiment ID: 20000451 Result: Down-regulated in Transcription
  misc_feature: MA Experiment 20000451 PARAMETER Experiment Name: At_CS6879_Shoots-Roots_P Parameter: Age (day) Value: 14
  misc_feature: MA Experiment 20000451 PARAMETER Experiment Name: At_CS6879_Shoots-Roots_P Parameter: Organism Value: A. thaliana
  misc_feature: MA Experiment 20000451 PARAMETER Experiment Name: At_CS6879_Shoots-Roots_P Parameter: Plant Line Value: CS6879 vs. WS
  misc_feature: MA Experiment 20000451 PARAMETER Experiment Name: At_CS6879_Shoots-Roots_P Parameter: Tissue Value: Roots
  misc_feature: MA Experiment ID: 20000455 Result: Up-regulated in Transcription
  misc_feature: MA Experiment 20000455 PARAMETER Experiment Name: At_100uM_ABA_P Parameter: Age (day) Value: 16
  misc_feature: MA Experiment 20000455 PARAMETER Experiment Name: At_100uM_ABA_P Parameter: Organism Value: A. thaliana
  misc_feature: MA Experiment 20000455 PARAMETER Experiment Name: At_100uM_ABA_P Parameter: Plant Line Value: WS
  misc_feature: MA Experiment 20000455 PARAMETER Experiment Name: At_100uM_ABA_P Parameter: Timepoint (hr) Value: 48
  misc_feature: MA Experiment 20000455 PARAMETER Experiment Name: At_100uM_ABA_P Parameter: Tissue Value: Aerial
  misc_feature: MA Experiment 20000455 PARAMETER Experiment Name: At_100uM_ABA_P Parameter: Treatment Value: 100uM ABA vs. No Treatment
  misc_feature: MA Experiment ID: 20000495 Result: Down-regulated in Transcription
  misc_feature: MA Experiment 20000495 PARAMETER Experiment Name: At_Guard_Cells_P Parameter: Harvest Date Value: 8/2/2002
  misc_feature: MA Experiment 20000495 PARAMETER Experiment Name: At_Guard_Cells_P Parameter: Organism Value: A. thaliana
  misc_feature: MA Experiment 20000495 PARAMETER Experiment Name: At_Guard_Cells_P Parameter: Tissue Value: Guard Cells vs. Leaves
  misc_feature: MA Experiment ID: 20000496 Result: Down-regulated in Transcription
  misc_feature: MA Experiment 20000496 PARAMETER Experiment Name: At_Guard_Cells_P Parameter: Harvest Date Value: 7/19/2002
  misc_feature: MA Experiment 20000496 PARAMETER Experiment Name: At_Guard_Cells_P Parameter: Organism Value: Canola
  misc_feature: MA Experiment 20000496 PARAMETER Experiment Name: At_Guard_Cells_P Parameter: Tissue Value: Guard Cells vs. Leaves
  misc_feature: MA Experiment ID: 20000527 Result: Down-regulated in Transcription
  misc_feature: MA Experiment 20000527 PARAMETER Experiment Name: At_10percent_PEG_P Parameter: Age (day) Value: 20
  misc_feature: MA Experiment 20000527 PARAMETER Experiment Name: At_10percent_PEG_P Parameter: Organism Value: A. thaliana
  misc_feature: MA Experiment 20000527 PARAMETER Experiment Name: At_10percent_PEG_P Parameter: Plant Line Value: WS
  misc_feature: MA Experiment 20000527 PARAMETER Experiment Name: At_10percent_PEG_P Parameter: Timepoint (day) Value: 20
  misc_feature: MA Experiment 20000527 PARAMETER Experiment Name: At_10percent_PEG_P Parameter: Tissue Value: Whole Plant
  misc_feature: MA Experiment 20000527 PARAMETER Experiment Name: At_10percent_PEG_P Parameter: Treatment Value: 10percent PEG vs. No Treatment
  misc_feature: MA Experiment ID: 20001248 Result: Down-regulated in Transcription
  misc_feature: MA Experiment 20001248 PARAMETER Experiment Name: At_Far-red-induction_P Parameter: Age (day) Value: 7
  misc_feature: MA Experiment 20001248 PARAMETER Experiment Name: At_Far-red-induction_P Parameter: Light Value: Far-red vs. White
  misc_feature: MA Experiment 20001248 PARAMETER Experiment Name: At_Far-red-induction_P Parameter: Organism Value: A. thaliana
  misc_feature: MA Experiment 20001248 PARAMETER Experiment Name: At_Far-red-induction_P Parameter: Plant Line Value: Columbia
  misc_feature: MA Experiment 20001248 PARAMETER Experiment Name: At_Far-red-induction_P Parameter: Timepoint (hr) Value: 4
  misc_feature: MA Experiment 20001248 PARAMETER Experiment Name: At_Far-red-induction_P Parameter: Tissue Value: Whole Plant
  misc_feature: MA Experiment ID: 20001450 Result: Down-regulated in Transcription
  misc_feature: MA Experiment 20001450 PARAMETER Experiment Name: At_Far-red-induction_P Parameter: Age (day) Value: 7
  misc_feature: MA Experiment 20001450 PARAMETER Experiment Name: At_Far-red-induction_P Parameter: Light Value: Far-red vs. White
  misc_feature: MA Experiment 20001450 PARAMETER Experiment Name: At_Far-red-induction_P Parameter: Organism Value: A. thaliana
  misc_feature: MA Experiment 20001450 PARAMETER Experiment Name: At_Far-red-induction_P Parameter: Plant Line Value: Columbia
  misc_feature: MA Experiment 20001450 PARAMETER Experiment Name: At_Far-red-induction_P Parameter: Timepoint (hr) Value: 8
  misc_feature: MA Experiment 20001450 PARAMETER Experiment Name: At_Far-red-induction_P Parameter: Tissue Value: Whole Plant
  misc_feature: MA Experiment ID: 20001458 Result: Down-regulated in Transcription
  misc_feature: MA Experiment 20001458 PARAMETER Experiment Name: At_50mM_NH4NO3_L-to-H_P Parameter: Age (day) Value: Undefined
  misc_feature: MA Experiment 20001458 PARAMETER Experiment Name: At_50mM_NH4NO3_L-to-H_P Parameter: Organism Value: Undefined
  misc_feature: MA Experiment 20001458 PARAMETER Experiment Name: At_50mM_NH4NO3_L-to-H_P Parameter: Plant Line Value: Undefined
  misc_feature: MA Experiment 20001458 PARAMETER Experiment Name: At_50mM_NH4NO3_L-to-H_P Parameter: Timepoint (hr) Value: 2
  misc_feature: MA Experiment 20001458 PARAMETER Experiment Name: At_50mM_NH4NO3_L-to-H_P Parameter: Tissue Value: Siliques
  misc_feature: MA Experiment 20001458 PARAMETER Experiment Name: At_50mM_NH4NO3_L-to-H_P Parameter: Treatment Value: 50mM NH4NO3 vs. 100mM Manitol
  misc_feature: MA Experiment ID: 20001757 Result: Down-regulated in Transcription
  misc_feature: MA Experiment 20001757 PARAMETER Experiment Name: At_50mM_NH4NO3_L-to-H_P Parameter: Timepoint (hr) Value: 6
  misc_feature: MA Experiment 20001757 PARAMETER Experiment Name: At_50mM_NH4NO3_L-to-H_P Parameter: Tissue Value: Leaf
  misc_feature: MA Experiment 20001757 PARAMETER Experiment Name: At_50mM_NH4NO3_L-to-H_P Parameter: Treatment Value: 50mM NH4NO3 vs 100mM Mannitol
aaatcaatcatacagaagcagctaatggcgttgagaatcaggaaggcgacgacgacacttctcttctccggtgggattactcatggaacggatcggatcgcgagaaccggagcattgctcagccgttggatctcctctgtttcgtcatcttccgctgttgtagcggatgatgaatctggtgggatttacggattgggaagtgcgttgaaagagtatgaagattatagaagatctctctatggtgagatcactcataaggcgttgcttgttgatgctgttggtactctccttgttccagctcaacctactgctcagatatataagaatattggagagaagtacggagtggagtactcggaggctgagatacttactagatacagaagagcttatcagaaaccatggggtggatctcatcttagatatgtaaacgatgcaagacctttctggcagtatatagtgactgcatcaacaggctgctcggattcacagtagagagagctcactagtcccccccccccccgaaaaaaagtcattttgaaaagtttctaacctctaggccacccactcatggctactctgttcatgaagctggtgagcttctttctaattctatctactttttgtctcactactgtgaactcggagccacagtgccataatttcaaatcgatcattagtttcggtgattctattgccgacactggaaacttgctcgccctctccgatcctaccaatctccctaaggtcgcgtttctaccgtacggagaaaccttcttccaccatccgaccggccgtttctcaaacggccgcctcatcatcgatttcattgctgaatttttgggttttccgcttgtgcctcctttttatggatctcaaaatgcaaattttgagaaaggagttaattttgcggttggaggagcaacggcactggaacgttcctttcttgaagagagaggcattcattttccttacaccaacgttagtttagccgtacagcttagtagcttcaaggagagtttgcctaacttatgtgtctctccttcagactgcagagatatgatagaaaattctttgattctcatgggagaaattggagggaatgactataactacgcattctttgtgggcaaaaacattgaagagatcaaagagctggttccgcttgttattgaaactatctcttctgcaatcacggagttgattggtatgggggggaaaacatttctggtgcccggagagttcccgctcggatgctcagtagcctatttgagtttatatcaaacatcaaacatagaagaatatgatcctctaacaggatgtttgaaatggctgaacaagttttcagaataccacgacgagcagcttcaagcagaactcaacagacttcagaagttgtaccctcatgtcaacatcatatacgctgactactacaacacactgttgcgtcttgcccaagaaccagccaaattcgggttcataagcagacccttgccggcttgctgcgctttaggaggaccgtttaacttcacattaggtaggaaacgtgggactcaagtacctgaatgttgtgacgatccttcaaagtatgtgagttgggatggtgttcatatgactgaagctgcatatagattgatggctgagggtatacttaagggaccttatgcgattcctcctttcgattggtcttgcctcagctctgaaattaagaacacacagaattctttgatgaacaactgatgtatgttggtcaaaaatttgagacaagaatactgataatatcatgtatgttcccagtcctgaacatttggtcatttggatcatgtgttgtgtgttactgtgtttgacaatctgtattgttgttatggtaaataacggttgtgttgtatcacacactataacaggtttacgtttacctaaacatattaagttataattaatgggccacaggcccatatt

SEQ ID NO: 48604 - protein, 389 aa, Arabidopsis thaliana
  peptide (1)..(389): Ceres Seq. ID no. 15174960
  misc_feature (35)..(360): Pfam Name: GDSL-like Lipase/Acylhydrolase Pfam Description: GDSL-like Lipase/Acylhydrolase
  misc_feature (4)..(383): Homolog of NCBI NO: 12597843 NR Description: lipase, putative [Arabidopsis thaliana]
  misc_feature (4)..(383): Homolog of NCBI NO: 30692564 NR Description: lipase, putative [Arabidopsis thaliana]
  misc_feature (1)..(388): Homolog of NCBI NO: 21593234 NR Description: lipase, putative [Arabidopsis thaliana]
  misc_feature (1)..(384): Homolog of NCBI NO: 25336243 NR Description: pnrotein F1K23.16 [imported] - Arabidopsis
  misc_feature (4)..(383): Homolog of NCBI NO: 12322540 NR Description: unknown protein [Arabidopsis thaliana]
  misc_feature (8)..(389): Homolog of NCBI NO: 15225872 NR Description: lipase, putative [Arabidopsis thaliana]
  misc_feature (6)..(381): Homolog of NCBI NO: 15218728 NR Description: lipase, putative [Arabidopsis thaliana]
  misc_feature (6)..(381): Homolog of NCBI NO: 10764858 NR Description: F1K23.17 [Arabidopsis thaliana]
  misc_feature (4)..(385): Homolog of NCBI NO: 15218725 NR Description: lipase, putative [Arabidopsis thaliana]
  misc_feature (1)..(389): Homolog of NCBI NO: 15218723 NR Description: lipase, putative [Arabidopsis thaliana]
MATLFMKLVSFFLILSTFCLTTVNSEPQCHNFKSIISFGDSIADTGNLLALSDPTNLPKVAFLPYGETFFHHPTGRFSNGRLIIDFIAEFLGFPLVPPFYGSQNANFEKGVNFAVGGATALERSFLEERGIHFPYTNVSLAVQLSSFKESLPNLCVSPSDCRDMIENSLILMGEIGGNDYNYAFFVGKNIEEIKELVPLVIETISSAITELIGMGGKTFLVPGEFPLGCSVAYLSLYQTSNIEEYDPLTGCLKWLNKFSEYHDEQLQAELNRLQKLYPHVNIIYADYYNTLLRLAQEPAKFGFISRPLPACCALGGPFNFTLGRKRGTQVPECCDDPSKYVSWDGVHMTEAAYRLMAEGILKGPYAIPPFDWSCLSSEIKNTQNSLMNN

SEQ ID NO: 48605 - protein, 384 aa, Arabidopsis thaliana
  peptide (1)..(384): Ceres Seq. ID no. 15174961
  misc_feature (30)..(355): Pfam Name: GDSL-like Lipase/Acylhydrolase Pfam Description: GDSL-like Lipase/Acylhydrolase
  misc_feature (1)..(378): Homolog of NCBI NO: 12597843 NR Description: lipase, putative [Arabidopsis thaliana]
  misc_feature (1)..(378): Homolog of NCBI NO: 30692564 NR Description: lipase, putative [Arabidopsis thaliana]
  misc_feature (1)..(383): Homolog of NCBI NO: 21593234 NR Description: lipase, putative [Arabidopsis thaliana]
  misc_feature (1)..(379): Homolog of NCBI NO: 25336243 NR Description: pnrotein F1K23.16 [imported] - Arabidopsis
  misc_feature (1)..(378): Homolog of NCBI NO: 12322540 NR Description: unknown protein [Arabidopsis thaliana]
  misc_feature (3)..(384): Homolog of NCBI NO: 15225872 NR Description: lipase, putative [Arabidopsis thaliana]
  misc_feature (1)..(376): Homolog of NCBI NO: 15218728 NR Description: lipase, putative [Arabidopsis thaliana]
  misc_feature (1)..(376): Homolog of NCBI NO: 10764858 NR Description: F1K23.17 [Arabidopsis thaliana]
  misc_feature (1)..(380): Homolog of NCBI NO: 15218725 NR Description: lipase, putative [Arabidopsis thaliana]
  misc_feature (1)..(384): Homolog of NCBI NO: 15218723 NR Description: lipase, putative [Arabidopsis thaliana]
MKLVSFFLILSTFCLTTVNSEPQCHNFKSIISFGDSIADTGNLLALSDPTNLPKVAFLPYGETFFHHPTGRFSNGRLIIDFIAEFLGFPLVPPFYGSQNANFEKGVNFAVGGATALERSFLEERGIHFPYTNVSLAVQLSSFKESLPNLCVSPSDCRDMIENSLILMGEIGGNDYNYAFFVGKNIEEIKELVPLVIETISSAITELIGMGGKTFLVPGEFPLGCSVAYLSLYQTSNIEEYDPLTGCLKWLNKFSEYHDEQLQAELNRLQKLYPHVNIIYADYYNTLLRLAQEPAKFGFISRPLPACCALGGPFNFTLGRKRGTQVPECCDDPSKYVSWDGVHMTEAAYRLMAEGILKGPYAIPPFDWSCLSSEIKNTQNSLMNN

SEQ ID NO: 48606 - protein, 226 aa, Arabidopsis thaliana
  peptide (1)..(226): Ceres Seq. ID no. 15174962
  misc_feature (1)..(197): Pfam Name: GDSL-like Lipase/Acylhydrolase Pfam Description: GDSL-like Lipase/Acylhydrolase
  misc_feature (1)..(220): Homolog of NCBI NO: 12597843 NR Description: lipase, putative [Arabidopsis thaliana]
  misc_feature (1)..(220): Homolog of NCBI NO: 30692564 NR Description: lipase, putative [Arabidopsis thaliana]
  misc_feature (1)..(225): Homolog of NCBI NO: 21593234 NR Description: lipase, putative [Arabidopsis thaliana]
  misc_feature (1)..(221): Homolog of NCBI NO: 25336243 NR Description: pnrotein F1K23.16 [imported] - Arabidopsis
  misc_feature (1)..(220): Homolog of NCBI NO: 12322540 NR Description: unknown protein [Arabidopsis thaliana]
  misc_feature (1)..(226): Homolog of NCBI NO: 15225872 NR Description: lipase, putative [Arabidopsis thaliana]
  misc_feature (1)..(218): Homolog of NCBI NO: 15218728 NR Description: lipase, putative [Arabidopsis thaliana]
  misc_feature (1)..(218): Homolog of NCBI NO: 10764858 NR Description: F1K23.17 [Arabidopsis thaliana]
  misc_feature (1)..(222): Homolog of NCBI NO: 15218725 NR Description: lipase, putative [Arabidopsis thaliana]
  misc_feature (1)..(226): Homolog of NCBI NO: 15218723 NR Description: lipase, putative [Arabidopsis thaliana]
MIENSLILMGEIGGNDYNYAFFVGKNIEEIKELVPLVIETISSAITELIGMGGKTFLVPGEFPLGCSVAYLSLYQTSNIEEYDPLTGCLKWLNKFSEYHDEQLQAELNRLQKLYPHVNIIYADYYNTLLRLAQEPAKFGFISRPLPACCALGGPFNFTLGRKRGTQVPECCDDPSKYVSWDGVHMTEAAYRLMAEGILKGPYAIPPFDWSCLSSEIKNTQNSLMNN

SEQ ID NO: 48607 - DNA, 783 bp, Arabidopsis thaliana
  misc_feature (1)..(783): Ceres Seq. ID no. 12575408
  misc_feature: MA Experiment ID: 20000227 Result: Down-regulated in Transcription
  misc_feature: MA Experiment 20000227 PARAMETER Experiment Name: At_Root-Tips-vs-Tops_P Parameter: Tissue Value: Root Tips vs. Root Tops
  misc_feature: MA Experiment ID: 20000436 Result: Down-regulated in Transcription
  misc_feature: MA Experiment 20000436 PARAMETER Experiment Name: At_Drought_P Parameter: Age (day) Value: 7
  misc_feature: MA Experiment 20000436 PARAMETER Experiment Name: At_Drought_P Parameter: Organism Value: A. thaliana
  misc_feature: MA Experiment 20000436 PARAMETER Experiment Name: At_Drought_P Parameter: Plant Line Value: WS
  misc_feature: MA Experiment 20000436 PARAMETER Experiment Name: At_Drought_P Parameter: Timepoint (hr) Value: 12
  misc_feature: MA Experiment 20000436 PARAMETER Experiment Name: At_Drought_P Parameter: Tissue Value: Whole Plant
  misc_feature: MA Experiment 20000436 PARAMETER Experiment Name: At_Drought_P Parameter: Treatment Value: Drought vs. No Drought
  misc_feature: MA Experiment ID: 20000437 Result: Down-regulated in Transcription
  misc_feature: MA Experiment 20000437 PARAMETER Experiment Name: At_Drought_P Parameter: Age (day) Value: 8
  misc_feature: MA Experiment 20000437 PARAMETER Experiment Name: At_Drought_P Parameter: Organism Value: A. thaliana
  misc_feature: MA Experiment 20000437 PARAMETER Experiment Name: At_Drought_P Parameter: Plant Line Value: WS
  misc_feature: MA Experiment 20000437 PARAMETER Experiment Name: At_Drought_P Parameter: Timepoint (hr) Value: 24
  misc_feature: MA Experiment 20000437 PARAMETER Experiment Name: At_Drought_P Parameter: Tissue Value: Whole Plant
  misc_feature: MA Experiment 20000437 PARAMETER Experiment Name: At_Drought_P Parameter: Treatment Value: Drought vs. No Drought
  misc_feature: MA Experiment ID: 20000439 Result: Up-regulated in Transcription
  misc_feature: MA Experiment 20000439 PARAMETER Experiment Name: At_Roots__P Parameter: Age (day) Value: 14 vs. 21
  misc_feature: MA Experiment 20000439 PARAMETER Experiment Name: At_Roots__P Parameter: Organism Value: A. thaliana
  misc_feature: MA Experiment 20000439 PARAMETER Experiment Name: At_Roots__P Parameter: Tissue Value: Roots vs. Whole Plant
  misc_feature: MA Experiment ID: 20000496 Result: Down-regulated in Transcription
  misc_feature: MA Experiment 20000496 PARAMETER Experiment Name: At_Guard_Cells_P Parameter: Harvest Date Value: 7/19/2002
  misc_feature: MA Experiment 20000496 PARAMETER Experiment Name: At_Guard_Cells_P Parameter: Organism Value: Canola
  misc_feature: MA Experiment 20000496 PARAMETER Experiment Name: At_Guard_Cells_P Parameter: Tissue Value: Guard Cells vs. Leaves
atggataaaaggtggagtctccaaggtttgactgctcttgtgaccggtggagccagcggaatcggtcatgctatagtagaagaactcgccggttttggggccaaaatccatgtgtgtgacatatcgaaaactctgctcaatcaaagtttatccgaatgggagaagaaagggtttcaagtgagtggttcagtctgcgatgcatccaatcgtctcgaaagagaaacacttatgcaaactgtcaccacaatatttgatggcaagcttaacattcttgtgaacaatgttggcacaattcgcacaaagccaacaatagaatatgaggcagaagatttttcgttccttatttcaacaaacttggaatctgcttatcatctaagccaactttcacatccactcctaaaggcttcaggcaacggaattattacttttatttcctctgctgcagggatcgtatcatttgatgctgcatccatttatggtctaacgaaaggagctttgaatcagctagcacgaaatttggcgtgtgaatgggcaaaagacggcattcgagccaacgcggttgcgcctaattttatcaccactgctctggctaaaccttttctcgaagacgctggttttaacgagattttgtcgagtagaactccacttggtcgcgctggagaaccaagagaggttgcctcacttgtggcttttctgtgtctacctgctgcttcatatattactggtcagaccatttgtgttgatggaggtctcactgttaatggcttctcatatcagccatag

SEQ ID NO: 48608 - protein, 260 aa, Arabidopsis thaliana
  peptide (1)..(260): Ceres Seq. ID no. 12575409
  misc_feature (3)..(260): Homolog of NCBI NO: 25406975 NR Description: protein F22G5.20 [imported] - Arabidopsis
  misc_feature (3)..(260): Homolog of NCBI NO: 15222399 NR Description: tropinone reductase-I, putative
  misc_feature (1)..(260): Homolog of NCBI NO: 15227070 NR Description: putative tropinone reductase
  misc_feature (1)..(260): Homolog of NCBI NO: 15227071 NR Description: putative tropinone reductase; protein id:
  misc_feature (1)..(260): Homolog of NCBI NO: 21553753 NR Description: putative tropinone reductase [Arabidopsis
  misc_feature (1)..(260): Homolog of NCBI NO: 15529236 NR Description: At2g29320/F16P2.30 [Arabidopsis thaliana]
  misc_feature (1)..(260): Homolog of NCBI NO: 15227072 NR Description: putative tropinone reductase
  misc_feature (1)..(260): Homolog of NCBI NO: 30684202 NR Description: short-chain dehydrogenase/reductase family
  misc_feature (1)..(260): Homolog of NCBI NO: 15224550 NR Description: putative tropinone reductase; protein id:
  misc_feature (1)..(260): Homolog of NCBI NO: 15227073 NR Description: putative tropinone reductase; protein id:
MDKRWSLQGLTALVTGGASGIGHAIVEELAGFGAKIHVCDISKTLLNQSLSEWEKKGFQVSGSVCDASNRLERETLMQTVTTIFDGKLNILVNNVGTIRTKPTIEYEAEDFSFLISTNLESAYHLSQLSHPLLKASGNGIITFISSAAGIVSFDAASIYGLTKGALNQLARNLACEWAKDGIRANAVAPNFITTALAKPFLEDAGFNEILSSRTPLGRAGEPREVASLVAFLCLPAASYITGQTICVDGGLTVNGFSYQP

SEQ ID NO: 48609 - protein, 184 aa, Arabidopsis thaliana
  peptide (1)..(184): Ceres Seq. ID no. 12575410
  misc_feature (1)..(184): Homolog of NCBI NO: 25406975 NR Description: protein F22G5.20 [imported] - Arabidopsis
  misc_feature (1)..(184): Homolog of NCBI NO: 15222399 NR Description: tropinone reductase-I, putative
  misc_feature (1)..(184): Homolog of NCBI NO: 15227070 NR Description: putative tropinone reductase
  misc_feature (1)..(184): Homolog of NCBI NO: 15227071 NR Description: putative tropinone reductase; protein id:
  misc_feature (1)..(184): Homolog of NCBI NO: 21553753 NR Description: putative tropinone reductase [Arabidopsis
  misc_feature (1)..(184): Homolog of NCBI NO: 15529236 NR Description: At2g29320/F16P2.30 [Arabidopsis thaliana]
  misc_feature (1)..(184): Homolog of NCBI NO: 15227072 NR Description: putative tropinone reductase
  misc_feature (1)..(184): Homolog of NCBI NO: 30684202 NR Description: short-chain dehydrogenase/reductase family
  misc_feature (1)..(184): Homolog of NCBI NO: 15224550 NR Description: putative tropinone reductase; protein id:
  misc_feature (1)..(184): Homolog of NCBI NO: 15227073 NR Description: putative tropinone reductase; protein id:
MQTVTTIFDGKLNILVNNVGTIRTKPTIEYEAEDFSFLISTNLESAYHLSQLSHPLLKASGNGIITFISSAAGIVSFDAASIYGLTKGALNQLARNLACEWAKDGIRANAVAPNFITTALAKPFLEDAGFNEILSSRTPLGRAGEPREVASLVAFLCLPAASYITGQTICVDGGLTVNGFSYQP

SEQ ID NO: 48610 - DNA, 2775 bp, Arabidopsis thaliana; identical to SEQ ID NO: 40224
  misc_feature (1)..(2775): Ceres Seq. ID no. 12344987
  misc_feature: MA Experiment ID: 20000227 Result: Up-regulated in Transcription
  misc_feature: MA Experiment 20000227 PARAMETER Experiment Name: At_Root-Tips-vs-Tops_P Parameter: Tissue Value: Root Tips vs. Root Tops
  misc_feature: MA Experiment ID: 20000286 Result: Up-regulated in Transcription
  misc_feature: MA Experiment 20000286 PARAMETER Experiment Name: At_Open_Flower_P Parameter: Age (day) Value: 21
  misc_feature: MA Experiment 20000286 PARAMETER Experiment Name: At_Open_Flower_P Parameter: Plant Line Value: WS
  misc_feature: MA Experiment 20000286 PARAMETER Experiment Name: At_Open_Flower_P Parameter: Tissue Value: Half Open vs. Whole Plant
  misc_feature: MA Experiment ID: 20000794 Result: Up-regulated in Transcription
  misc_feature: MA Experiment 20000794 PARAMETER Experiment Name: At_Petals_P Parameter: Age (day) Value: 23-25 days
  misc_feature: MA Experiment 20000794 PARAMETER Experiment Name: At_Petals_P Parameter: Plant Line Value: WS
  misc_feature: MA Experiment 20000794 PARAMETER Experiment Name: At_Petals_P Parameter: Tissue Value: Petals vs. Whole plant

SEQ ID NO: 48611 - protein, 701 aa, Arabidopsis thaliana; identical to SEQ ID NO: 40225
  peptide (1)..(701): Ceres Seq. ID no. 12344988
  misc_feature (139)..(435): Homolog of NCBI NO: 25287608 NR Description: probable casein kinase I [imported] - Arabidopsis
  misc_feature (395)..(701): Homolog of NCBI NO: 28392919 NR Description: putative casein kinase [Arabidopsis thaliana]
  misc_feature (399)..(701): Homolog of NCBI NO: 22135892 NR Description: putative casein kinase [Arabidopsis thaliana]
  misc_feature (44)..(700): Homolog of NCBI NO: 18139937 NR Description: serine/threonine protein kinase [Chlamydomonas
  misc_feature (110)..(700): Homolog of NCBI NO: 30682888 NR Description: protein kinase family [Arabidopsis thaliana]
  misc_feature (241)..(701): Homolog of NCBI NO: 6006848 NR Description: unknown protein, 5' partial [Arabidopsis thaliana]
  misc_feature (1)..(700): Homolog of NCBI NO: 15231321 NR Description: casein kinase, putative
  misc_feature (1)..(701): Homolog of NCBI NO: 34394436 NR Description: putative casein kinase 1, delta isoform 1
  misc_feature (1)..(701): Homolog of NCBI NO: 28269422 NR Description: putative serine/threonine protein kinase
  misc_feature (1)..(700): Homolog of NCBI NO: 34909952 NR Description: putative casein kinase [Oryza sativa (japonica
  misc_feature (139)..(435): Homolog of NCBI NO: 25287608 NR Description: probable casein kinase I [imported] - Arabidopsis
  misc_feature (395)..(701): Homolog of NCBI NO: 28392919 NR Description: putative casein kinase [Arabidopsis thaliana]
  misc_feature (399)..(701): Homolog of NCBI NO: 22135892 NR Description: putative casein kinase [Arabidopsis thaliana]
  misc_feature (44)..(700): Homolog of NCBI NO: 18139937 NR Description: serine/threonine protein kinase [Chlamydomonas
  misc_feature (110)..(700): Homolog of NCBI NO: 30682888 NR Description: protein kinase family [Arabidopsis thaliana]
  misc_feature (241)..(701): Homolog of NCBI NO: 6006848 NR Description: unknown protein, 5' partial [Arabidopsis thaliana]
  misc_feature (1)..(700): Homolog of NCBI NO: 15231321 NR Description: casein kinase, putative
  misc_feature (1)..(701): Homolog of NCBI NO: 34394436 NR Description: putative casein kinase 1, delta isoform 1
  misc_feature (1)..(701): Homolog of NCBI NO: 28269422 NR Description: putative serine/threonine protein kinase
  misc_feature (1)..(700): Homolog of NCBI NO: 34909952 NR Description: putative casein kinase [Oryza sativa (japonica

SEQ ID NO: 48612 - protein, 583 aa, Arabidopsis thaliana; identical to SEQ ID NO: 40226
  peptide (1)..(583): Ceres Seq. ID no. 12344989
  misc_feature (21)..(317): Homolog of NCBI NO: 25287608 NR Description: probable casein kinase I [imported] - Arabidopsis
  misc_feature (277)..(583): Homolog of NCBI NO: 28392919 NR Description: putative casein kinase [Arabidopsis thaliana]
  misc_feature (281)..(583): Homolog of NCBI NO: 22135892 NR Description: putative casein kinase [Arabidopsis thaliana]
  misc_feature (1)..(582): Homolog of NCBI NO: 18139937 NR Description: serine/threonine protein kinase [Chlamydomonas
  misc_feature (1)..(582): Homolog of NCBI NO: 30682888 NR Description: protein kinase family [Arabidopsis thaliana]
  misc_feature (123)..(583): Homolog of NCBI NO: 6006848 NR Description: unknown protein, 5' partial [Arabidopsis thaliana]
  misc_feature (1)..(582): Homolog of NCBI NO: 15231321 NR Description: casein kinase, putative
  misc_feature (1)..(583): Homolog of NCBI NO: 34394436 NR Description: putative casein kinase 1, delta isoform 1
  misc_feature (1)..(583): Homolog of NCBI NO: 28269422 NR Description: putative serine/threonine protein kinase
  misc_feature (1)..(582): Homolog of NCBI NO: 34909952 NR Description: putative casein kinase [Oryza sativa (japonica
  misc_feature (21)..(317): Homolog of NCBI NO: 25287608 NR Description: probable casein kinase I [imported] - Arabidopsis
  misc_feature (277)..(583): Homolog of NCBI NO: 28392919 NR Description: putative casein kinase [Arabidopsis thaliana]
  misc_feature (281)..(583): Homolog of NCBI NO: 22135892 NR Description: putative casein kinase [Arabidopsis thaliana]
  misc_feature (1)..(582): Homolog of NCBI NO: 18139937 NR Description: serine/threonine protein kinase [Chlamydomonas
  misc_feature (1)..(582): Homolog of NCBI NO: 30682888 NR Description: protein kinase family [Arabidopsis thaliana]
  misc_feature (123)..(583): Homolog of NCBI NO: 6006848 NR Description: unknown protein, 5' partial [Arabidopsis thaliana]
  misc_feature (1)..(582): Homolog of NCBI NO: 15231321 NR Description: casein kinase, putative
  misc_feature (1)..(583): Homolog of NCBI NO: 34394436 NR Description: putative casein kinase 1, delta isoform 1
  misc_feature (1)..(583): Homolog of NCBI NO: 28269422 NR Description: putative serine/threonine protein kinase
  misc_feature (1)..(582): Homolog of NCBI NO: 34909952 NR Description: putative casein kinase [Oryza sativa (japonica

SEQ ID NO: 48613 - protein, 577 aa, Arabidopsis thaliana; identical to SEQ ID NO: 40227
  peptide (1)..(577): Ceres Seq. ID no. 12344990
  misc_feature (15)..(311): Homolog of NCBI NO: 25287608 NR Description: probable casein kinase I [imported] - Arabidopsis
  misc_feature (271)..(577): Homolog of NCBI NO: 28392919 NR Description: putative casein kinase [Arabidopsis thaliana]
  misc_feature (275)..(577): Homolog of NCBI NO: 22135892 NR Description: putative casein kinase [Arabidopsis thaliana]
  misc_feature (1)..(576): Homolog of NCBI NO: 18139937 NR Description: serine/threonine protein kinase [Chlamydomonas
  misc_feature (1)..(576): Homolog of NCBI NO: 30682888 NR Description: protein kinase family [Arabidopsis thaliana]
  misc_feature (117)..(577): Homolog of NCBI NO: 6006848 NR Description: unknown protein, 5' partial [Arabidopsis thaliana]
  misc_feature (1)..(576): Homolog of NCBI NO: 15231321 NR Description: casein kinase, putative
  misc_feature (1)..(577): Homolog of NCBI NO: 34394436 NR Description: putative casein kinase 1, delta isoform 1
  misc_feature (1)..(577): Homolog of NCBI NO: 28269422 NR Description: putative serine/threonine protein kinase
  misc_feature (1)..(576): Homolog of NCBI NO: 34909952 NR Description: putative casein kinase [Oryza sativa (japonica
  misc_feature (15)..(311): Homolog of NCBI NO: 25287608 NR Description: probable casein kinase I [imported] - Arabidopsis
  misc_feature (271)..(577): Homolog of NCBI NO: 28392919 NR Description: putative casein kinase [Arabidopsis thaliana]
  misc_feature (275)..(577): Homolog of NCBI NO: 22135892 NR Description: putative casein kinase [Arabidopsis thaliana]
  misc_feature (1)..(576): Homolog of NCBI NO: 18139937 NR Description: serine/threonine protein kinase [Chlamydomonas
  misc_feature (1)..(576): Homolog of NCBI NO: 30682888 NR Description: protein kinase family [Arabidopsis thaliana]
  misc_feature (117)..(577): Homolog of NCBI NO: 6006848 NR Description: unknown protein, 5' partial [Arabidopsis thaliana]
  misc_feature (1)..(576): Homolog of NCBI NO: 15231321 NR Description: casein kinase, putative
  misc_feature (1)..(577): Homolog of NCBI NO: 34394436 NR Description: putative casein kinase 1, delta isoform 1
  misc_feature (1)..(577): Homolog of NCBI NO: 28269422 NR Description: putative serine/threonine protein kinase
  misc_feature (1)..(576): Homolog of NCBI NO: 34909952 NR Description: putative casein kinase [Oryza sativa (japonica

SEQ ID NO: 48614 - DNA, 1871 bp, Arabidopsis thaliana; identical to SEQ ID NO: 48272
  misc_feature (1)..(1871): Ceres Seq. ID no. 13578936
  misc_feature: MA Experiment ID: 20001451 Result: Down-regulated in Transcription
  misc_feature: MA Experiment 20001451 PARAMETER Experiment Name: At_Far-red-induction_P Parameter: Age (day) Value: 7
  misc_feature: MA Experiment 20001451 PARAMETER Experiment Name: At_Far-red-induction_P Parameter: Light Value: Far-red vs. White
  misc_feature: MA Experiment 20001451 PARAMETER Experiment Name: At_Far-red-induction_P Parameter: Organism Value: A. thaliana
  misc_feature: MA Experiment 20001451 PARAMETER Experiment Name: At_Far-red-induction_P Parameter: Plant Line Value: Columbia
  misc_feature: MA Experiment 20001451 PARAMETER Experiment Name: At_Far-red-induction_P Parameter: Timepoint (hr) Value: 24
  misc_feature: MA Experiment 20001451 PARAMETER Experiment Name: At_Far-red-induction_P Parameter: Tissue Value: Whole Plant

SEQ ID NO: 48615 - protein, 622 aa, Arabidopsis thaliana; identical to SEQ ID NO: 48273
  peptide (1)..(622): Ceres Seq. ID no. 13578937
  misc_feature (360)..(608): Pfam Name: Shikimate / quinate 5-dehydrogenase Pfam Description: Shikimate / quinate 5-dehydrogenase
  misc_feature (360)..(608): Pfam Name: Shikimate / quinate 5-dehydrogenase Pfam Description: Shikimate / quinate 5-dehydrogenase
  misc_feature (338)..(614): Homolog of NCBI NO: 20093557 NR Description: Shikimate 5-dehydrogenase [Methanopyrus kandleri
  misc_feature (343)..(607): Homolog of NCBI NO: 30022412 NR Description: Shikimate 5-dehydrogenase [Bacillus cereus ATCC
  misc_feature (343)..(607): Homolog of NCBI NO: 21402380 NR Description: Shikimate_DH, Shikimate / quinate 5-dehydrogenase
  misc_feature (109)..(429): Homolog of NCBI NO: 7488788 NR Description: 3-dehydroquinate dehydratase (EC 4.2.1.10) /
  misc_feature (113)..(606): Homolog of NCBI NO: 34914828 NR Description: putative 3-dehydroquinate dehydratase / shikimate
  misc_feature (338)..(614): Homolog of NCBI NO: 20093557 NR Description: Shikimate 5-dehydrogenase [Methanopyrus kandleri
  misc_feature (343)..(607): Homolog of NCBI NO: 21402380 NR Description: Shikimate_DH, Shikimate / quinate 5-dehydrogenase
  misc_feature (113)..(606): Homolog of NCBI NO: 34914828 NR Description: putative 3-dehydroquinate dehydratase / shikimate
  misc_feature (175)..(622): Homolog of NCBI NO: 7436862 NR Description: 3-dehydroquinate dehydratase (EC 4.2.1.10) /
  misc_feature (110)..(173): Homolog of NCBI NO: 7436862 NR Description: 3-dehydroquinate dehydratase (EC 4.2.1.10) /
  misc_feature (94)..(612): Homolog of NCBI NO: 629688 NR Description: 3-dehydroquinate dehydratase (EC 4.2.1.10) /
  misc_feature (173)..(622): Homolog of NCBI NO: 34914824 NR Description: putative 3-dehydroquinate dehydratase
  misc_feature (113)..(174): Homolog of NCBI NO: 34914824 NR Description: putative 3-dehydroquinate dehydratase
  misc_feature (109)..(429): Homolog of NCBI NO: 7488788 NR Description: 3-dehydroquinate dehydratase (EC 4.2.1.10) /
  misc_feature (343)..(607): Homolog of NCBI NO: 30022412 NR Description: Shikimate 5-dehydrogenase [Bacillus cereus ATCC
  misc_feature (113)..(174): Homolog of NCBI NO: 34914824 NR Description: putative 3-dehydroquinate dehydratase
  misc_feature (173)..(622): Homolog of NCBI NO: 34914824 NR Description: putative 3-dehydroquinate dehydratase
  misc_feature (94)..(612): Homolog of NCBI NO: 629688 NR Description: 3-dehydroquinate dehydratase (EC 4.2.1.10) /
  misc_feature (110)..(173): Homolog of NCBI NO: 7436862 NR Description: 3-dehydroquinate dehydratase (EC 4.2.1.10) /
  misc_feature (175)..(622): Homolog of NCBI NO: 7436862 NR Description: 3-dehydroquinate dehydratase (EC 4.2.1.10) /

SEQ ID NO: 48616 - protein, 603 aa, Arabidopsis thaliana; identical to SEQ ID NO: 48274
  peptide (1)..(603): Ceres Seq. ID no. 13578938
  misc_feature (341)..(589): Pfam Name: Shikimate / quinate 5-dehydrogenase Pfam Description: Shikimate / quinate 5-dehydrogenase
  misc_feature (341)..(589): Pfam Name: Shikimate / quinate 5-dehydrogenase Pfam Description: Shikimate / quinate 5-dehydrogenase
  misc_feature (319)..(595): Homolog of NCBI NO: 20093557 NR Description: Shikimate 5-dehydrogenase [Methanopyrus kandleri
  misc_feature (324)..(588): Homolog of NCBI NO: 30022412 NR Description: Shikimate 5-dehydrogenase [Bacillus cereus ATCC
  misc_feature (324)..(588): Homolog of NCBI NO: 21402380 NR Description: Shikimate_DH, Shikimate / quinate 5-dehydrogenase
  misc_feature (90)..(410): Homolog of NCBI NO: 7488788 NR Description: 3-dehydroquinate dehydratase (EC 4.2.1.10) /
  misc_feature (94)..(587): Homolog of NCBI NO: 34914828 NR Description: putative 3-dehydroquinate dehydratase / shikimate
  misc_feature (319)..(595): Homolog of NCBI NO: 20093557 NR Description: Shikimate 5-dehydrogenase [Methanopyrus kandleri
  misc_feature (324)..(588): Homolog of NCBI NO: 21402380 NR Description: Shikimate_DH, Shikimate / quinate 5-dehydrogenase
  misc_feature (94)..(587): Homolog of NCBI NO: 34914828 NR Description: putative 3-dehydroquinate dehydratase / shikimate
  misc_feature (156)..(603): Homolog of NCBI NO: 7436862 NR Description: 3-dehydroquinate dehydratase (EC 4.2.1.10) /
  misc_feature (91)..(154): Homolog of NCBI NO: 7436862 NR Description: 3-dehydroquinate dehydratase (EC 4.2.1.10) /
  misc_feature (75)..(593): Homolog of NCBI NO: 629688 NR Description: 3-dehydroquinate dehydratase (EC 4.2.1.10) /
  misc_feature (154)..(603): Homolog of NCBI NO: 34914824 NR Description: putative 3-dehydroquinate dehydratase
  misc_feature (94)..(155): Homolog of NCBI NO: 34914824 NR Description: putative 3-dehydroquinate dehydratase
  misc_feature (90)..(410): Homolog of NCBI NO: 7488788 NR Description: 3-dehydroquinate dehydratase (EC 4.2.1.10) /
  misc_feature (324)..(588): Homolog of NCBI NO: 30022412 NR Description: Shikimate 5-dehydrogenase [Bacillus cereus ATCC
  misc_feature (94)..(155): Homolog of NCBI NO: 34914824 NR Description: putative 3-dehydroquinate dehydratase
  misc_feature (154)..(603): Homolog of NCBI NO: 34914824 NR Description: putative 3-dehydroquinate dehydratase
  misc_feature (75)..(593): Homolog of NCBI NO: 629688 NR Description: 3-dehydroquinate dehydratase (EC 4.2.1.10) /
  misc_feature (91)..(154): Homolog of NCBI NO: 7436862 NR Description: 3-dehydroquinate dehydratase (EC 4.2.1.10) /
  misc_feature (156)..(603): Homolog of NCBI NO: 7436862 NR Description: 3-dehydroquinate dehydratase (EC 4.2.1.10) /

SEQ ID NO: 48617 - protein, 536 aa, Arabidopsis thaliana; identical to SEQ ID NO: 48275
  peptide (1)..(536): Ceres Seq. ID no. 13578939
  misc_feature (274)..(522): Pfam Name: Shikimate / quinate 5-dehydrogenase Pfam Description: Shikimate / quinate 5-dehydrogenase
  misc_feature (274)..(522): Pfam Name: Shikimate / quinate 5-dehydrogenase Pfam Description: Shikimate / quinate 5-dehydrogenase
  misc_feature (252)..(528): Homolog of NCBI NO: 20093557 NR Description: Shikimate 5-dehydrogenase [Methanopyrus kandleri
  misc_feature (257)..(521): Homolog of NCBI NO: 30022412 NR Description: Shikimate 5-dehydrogenase [Bacillus cereus ATCC
  misc_feature (257)..(521): Homolog of NCBI NO: 21402380 NR Description: Shikimate_DH, Shikimate / quinate 5-dehydrogenase
  misc_feature (23)..(343): Homolog of NCBI NO: 7488788 NR Description: 3-dehydroquinate dehydratase (EC 4.2.1.10) /
  misc_feature (27)..(520): Homolog of NCBI NO: 34914828 NR Description: putative 3-dehydroquinate dehydratase / shikimate
  misc_feature (252)..(528): Homolog of NCBI NO: 20093557 NR Description: Shikimate 5-dehydrogenase [Methanopyrus kandleri
  misc_feature (257)..(521): Homolog of NCBI NO: 21402380 NR Description: Shikimate_DH, Shikimate / quinate 5-dehydrogenase
  misc_feature (27)..(520): Homolog of NCBI NO: 34914828 NR Description: putative 3-dehydroquinate dehydratase / shikimate
  misc_feature (89)..(536): Homolog of NCBI NO: 7436862 NR Description: 3-dehydroquinate dehydratase (EC 4.2.1.10) /
  misc_feature (24)..(87): Homolog of NCBI NO: 7436862 NR Description: 3-dehydroquinate dehydratase (EC 4.2.1.10) /
  misc_feature (8)..(526): Homolog of NCBI NO: 629688 NR Description: 3-dehydroquinate dehydratase (EC 4.2.1.10) /
  misc_feature (87)..(536): Homolog of NCBI NO: 34914824 NR Description: putative 3-dehydroquinate dehydratase
  misc_feature (27)..(88): Homolog of NCBI NO: 34914824 NR Description: putative 3-dehydroquinate dehydratase
  misc_feature (23)..(343): Homolog of NCBI NO: 7488788 NR Description: 3-dehydroquinate dehydratase (EC 4.2.1.10) /
  misc_feature (257)..(521): Homolog of NCBI NO: 30022412 NR Description: Shikimate 5-dehydrogenase [Bacillus cereus ATCC
  misc_feature (27)..(88): Homolog of NCBI NO: 34914824 NR Description: putative 3-dehydroquinate dehydratase
  misc_feature (87)..(536): Homolog of NCBI NO: 34914824 NR Description: putative 3-dehydroquinate dehydratase
  misc_feature (8)..(526): Homolog of NCBI NO: 629688 NR Description: 3-dehydroquinate dehydratase (EC 4.2.1.10) /
  misc_feature (24)..(87): Homolog of NCBI NO: 7436862 NR Description: 3-dehydroquinate dehydratase (EC 4.2.1.10) /
  misc_feature (89)..(536): Homolog of NCBI NO: 7436862 NR Description: 3-dehydroquinate dehydratase (EC 4.2.1.10) /

SEQ ID NO: 48618 - DNA, 1129 bp, Arabidopsis thaliana
  misc_feature (1)..(1129): Ceres Seq. ID no. 15168772
  misc_feature: MA Experiment ID: 20000166 Result: Up-regulated in Transcription
  misc_feature: MA Experiment 20000166 PARAMETER Experiment Name: At_100uM_ABA_P Parameter: Age (day) Value: 14
  misc_feature: MA Experiment 20000166 PARAMETER Experiment Name: At_100uM_ABA_P Parameter: Organism Value: A. thaliana
  misc_feature: MA Experiment 20000166 PARAMETER Experiment Name: At_100uM_ABA_P Parameter: Plant Line Value: WS
  misc_feature: MA Experiment 20000166 PARAMETER Experiment Name: At_100uM_ABA_P Parameter: Timepoint (hr) Value: 1
  misc_feature: MA Experiment 20000166 PARAMETER Experiment Name: At_100uM_ABA_P Parameter: Tissue Value: Aerial
  misc_feature: MA Experiment 20000166 PARAMETER Experiment Name: At_100uM_ABA_P Parameter: Treatment Value: 100uM ABA vs. No Treatment
  misc_feature: MA Experiment ID: 20000180 Result: Up-regulated in Transcription
  misc_feature: MA Experiment 20000180 PARAMETER Experiment Name: At_Germinating_Seeds_P Parameter: Age (hr) Value: 24 vs. 0
  misc_feature: MA Experiment 20000180 PARAMETER Experiment Name: At_Germinating_Seeds_P Parameter: Tissue Value: Germinating Seeds
  misc_feature: MA Experiment ID: 20000184 Result: Up-regulated in Transcription
  misc_feature: MA Experiment 20000184 PARAMETER Experiment Name: At_Shoots__P Parameter: Age (day) Value: 7
  misc_feature: MA Experiment 20000184 PARAMETER Experiment Name: At_Shoots__P Parameter: Tissue Value: Shoots vs. Whole Plant
  misc_feature: MA Experiment ID: 20000456 Result: Down-regulated in Transcription
  misc_feature: MA Experiment 20000456 PARAMETER Experiment Name: At_100uM_BA_P Parameter: Age (day) Value: 14
  misc_feature: MA Experiment 20000456 PARAMETER Experiment Name: At_100uM_BA_P Parameter: Organism Value: A. thaliana
  misc_feature: MA Experiment 20000456 PARAMETER Experiment Name: At_100uM_BA_P Parameter: Plant Line Value: WS
  misc_feature: MA Experiment 20000456 PARAMETER Experiment Name: At_100uM_BA_P Parameter: Timepoint (hr) Value: 6
  misc_feature: MA Experiment 20000456 PARAMETER Experiment Name: At_100uM_BA_P Parameter: Tissue Value: Aerial
  misc_feature: MA Experiment 20000456 PARAMETER Experiment Name: At_100uM_BA_P Parameter: Treatment Value: 100uM BA vs. No Treatment
  misc_feature: MA Experiment ID: 20000527 Result: Up-regulated in Transcription
  misc_feature: MA Experiment 20000527 PARAMETER Experiment Name: At_10percent_PEG_P Parameter: Age (day) Value: 20
  misc_feature: MA Experiment 20000527 PARAMETER Experiment Name: At_10percent_PEG_P Parameter: Organism Value: A. thaliana
  misc_feature: MA Experiment 20000527 PARAMETER Experiment Name: At_10percent_PEG_P Parameter: Plant Line Value: WS
  misc_feature: MA Experiment 20000527 PARAMETER Experiment Name: At_10percent_PEG_P Parameter: Timepoint (day) Value: 20
  misc_feature: MA Experiment 20000527 PARAMETER Experiment Name: At_10percent_PEG_P Parameter: Tissue Value: Whole Plant
  misc_feature: MA Experiment 20000527 PARAMETER Experiment Name: At_10percent_PEG_P Parameter: Treatment Value: 10percent PEG vs. No Treatment
  misc_feature: MA Experiment ID: 20000573 Result: Down-regulated in Transcription
  misc_feature: MA Experiment 20000573 PARAMETER Experiment Name: At_100uM_ABA_Mutants__P Parameter: Organism Value: A. thaliana
  misc_feature: MA Experiment 20000573 PARAMETER Experiment Name: At_100uM_ABA_Mutants__P Parameter: Plant Line Value: CS22 vs. Ler wt
  misc_feature: MA Experiment 20000573 PARAMETER Experiment Name: At_100uM_ABA_Mutants__P Parameter: Timepoint (hr) Value: N/A
  misc_feature: MA Experiment 20000573 PARAMETER Experiment Name: At_100uM_ABA_Mutants__P Parameter: Tissue Value: Whole Plant
  misc_feature: MA Experiment 20000573 PARAMETER Experiment Name: At_100uM_ABA_Mutants__P Parameter: Treatment Value: None
  misc_feature: MA Experiment ID: 20001247 Result: Down-regulated in Transcription
  misc_feature: MA Experiment 20001247 PARAMETER Experiment Name: At_Far-red-induction_P Parameter: Age (day) Value: 7
  misc_feature: MA Experiment 20001247 PARAMETER Experiment Name: At_Far-red-induction_P Parameter: Light Value: Far-red vs. White
  misc_feature: MA Experiment 20001247 PARAMETER Experiment Name: At_Far-red-induction_P Parameter: Organism Value: A. thaliana
  misc_feature: MA Experiment 20001247 PARAMETER Experiment Name: At_Far-red-induction_P Parameter: Plant Line Value: Columbia
  misc_feature: MA Experiment 20001247 PARAMETER Experiment Name: At_Far-red-induction_P Parameter: Timepoint (hr) Value: 1
  misc_feature: MA Experiment 20001247 PARAMETER Experiment Name: At_Far-red-induction_P Parameter: Tissue Value: Whole Plant
  misc_feature: MA Experiment ID: 20001248 Result: Down-regulated in Transcription
  misc_feature: MA Experiment 20001248 PARAMETER Experiment Name: At_Far-red-induction_P Parameter: Age (day) Value: 7
  misc_feature: MA Experiment 20001248 PARAMETER Experiment Name: At_Far-red-induction_P Parameter: Light Value: Far-red vs. White
  misc_feature: MA Experiment 20001248 PARAMETER Experiment Name: At_Far-red-induction_P Parameter: Organism Value: A. thaliana
  misc_feature: MA Experiment 20001248 PARAMETER Experiment Name: At_Far-red-induction_P Parameter: Plant Line Value: Columbia
  misc_feature: MA Experiment 20001248 PARAMETER Experiment Name: At_Far-red-induction_P Parameter: Timepoint (hr) Value: 4
  misc_feature: MA Experiment 20001248 PARAMETER Experiment Name: At_Far-red-induction_P Parameter: Tissue Value: Whole Plant
  misc_feature: MA Experiment ID: 20001757 Result: Up-regulated in Transcription
  misc_feature: MA Experiment 20001757 PARAMETER Experiment Name: At_50mM_NH4NO3_L-to-H_P Parameter: Timepoint (hr) Value: 6
  misc_feature: MA Experiment 20001757 PARAMETER Experiment Name: At_50mM_NH4NO3_L-to-H_P Parameter: Tissue Value: Leaf
  misc_feature: MA Experiment 20001757 PARAMETER Experiment Name: At_50mM_NH4NO3_L-to-H_P Parameter: Treatment Value: 50mM NH4NO3 vs 100mM Mannitol
gagcaaagatctctatttcaatcctctcatggaaactgcttctctttcttttcctgtcccaaacacgagcttcggtgtaaacaaatctatgcctctcggtctaaaccagctcacaccataccaaattcatcagattcagaaccagcttaaccatagacgtagcacaatctcaaacctctctccaaaccgtatcagaatgaagaacttaacaccttctacctccaaaaccaagaatctctacagaggcgtaaggcaaaggcactgggggaaatgggtcgctgagatccgtttgcccaagaaccggacccgtctctggctcgggacattcgaaaccgccgaaaaagccgccttagcttacgaccaagctgcttttcagctccgtggagatatcgcgaagcttaacttcccaaacctcatacacgaagacatgaatcctctcccttcctctgttgataccaagcttcaagctatctgcaaaagtttgagaaaaacagaggaaatttgctctgtttctgatcaaacaaaggagtactctgtttactctgtttcagataaaacagagcttttcctgccaaaaacagagcttttcttgcctaaaagagagcatttggagacaaatgagctctccaatgagtcaccgagaagcgatgagacctcgttgttggatgagtcgcaggcggaatattcatcgtcggataaaacattcctggatttctcggatactgagtttgaagagattggaagtttcgggcttcggaagtttccttcggtggagattgattgggatgcaattagtaaactggccaattcttaaagtcttctattttatattaatcttctgtgcaactgaaattttcaacaagttgcagatgagtttattaggtttgaatctgtcctagttttctttgttggtcgtatagagttttactatgtagctaatctccatgtttggtttggcttggtaagtttttaaggtcctcgtcattcacaaaccggagaaagtttatgtattcaaaagctatgtattatatcctcacatctacttatgagagtgagatcaaagtttgtaaaatgaagtcttgatttcttcttttagttctctctttttaaaaccaaatgtatttctttt

SEQ ID NO: 48619 - protein, 270 aa, Arabidopsis thaliana
  peptide (1)..(270): Ceres Seq. ID no. 15168773
  misc_feature (77)..(141): Pfam Name: AP2 domain Pfam Description: AP2 domain
  misc_feature (25)..(264): Homolog of NCBI NO: 13877779 NR Description: putative AP2 domain-containing protein
  misc_feature (58)..(269): Homolog of NCBI NO: 15219839 NR Description: AP2 domain transcription factor, putative
  misc_feature (25)..(264): Homolog of NCBI NO: 15218204 NR Description: AP2 domain transcription factor RAP2.4
  misc_feature (25)..(264): Homolog of NCBI NO: 6573771 NR Description: F28K19.29 [Arabidopsis thaliana]
  misc_feature (6)..(264): Homolog of NCBI NO: 37572971 NR Description: AP2-domain DRE binding factor DBF1
  misc_feature (6)..(264): Homolog of NCBI NO: 32140997 NR Description: DRE binding factor 2 [Oryza sativa (japonica
  misc_feature (22)..(264): Homolog of NCBI NO: 27436378 NR Description: dehydration-responsive element binding protein 3
  misc_feature (12)..(270): Homolog of NCBI NO: 15236020 NR Description: AP2 domain transcription factor, putative
  misc_feature (10)..(270): Homolog of NCBI NO: 19699341 NR Description: At2g22200/T26C19.14 [Arabidopsis thaliana]
  misc_feature (10)..(270): Homolog of NCBI NO: 15227162 NR Description: AP2 domain transcription factor [Arabidopsis
SKDLYFNPLMETASLSFPVPNTSFGVNKSMPLGLNQLTPYQIHQIQNQLNHRRSTISNLSPNRIRMKNLTPSTSKTKNLYRGVRQRHWGKWVAEIRLPKNRTRLWLGTFETAEKAALAYDQAAFQLRGDIAKLNFPNLIHEDMNPLPSSVDTKLQAICKSLRKTEEICSVSDQTKEYSVYSVSDKTELFLPKTELFLPKREHLETNELSNESPRSDETSLLDESQAEYSSSDKTFLDFSDTEFEEIGSFGLRKFPSVEIDWDAISKLANS

SEQ ID NO: 48620 - protein, 261 aa, Arabidopsis thaliana
  peptide (1)..(261): Ceres Seq. ID no. 15168774
  misc_feature (68)..(132): Pfam Name: AP2 domain Pfam Description: AP2 domain
  misc_feature (16)..(255): Homolog of NCBI NO: 13877779 NR Description: putative AP2 domain-containing protein
  misc_feature (49)..(260): Homolog of NCBI NO: 15219839 NR Description: AP2 domain transcription factor, putative
  misc_feature (16)..(255): Homolog of NCBI NO: 15218204 NR Description: AP2 domain transcription factor RAP2.4
  misc_feature (16)..(255): Homolog of NCBI NO: 6573771 NR Description: F28K19.29 [Arabidopsis thaliana]
  misc_feature (1)..(255): Homolog of NCBI NO: 37572971 NR Description: AP2-domain DRE binding factor DBF1
  misc_feature (1)..(255): Homolog of NCBI NO: 32140997 NR Description: DRE binding factor 2 [Oryza sativa (japonica
  misc_feature (13)..(255): Homolog of NCBI NO: 27436378 NR Description: dehydration-responsive element binding protein 3
  misc_feature (3)..(261): Homolog of NCBI NO: 15236020 NR Description: AP2 domain transcription factor, putative
  misc_feature (1)..(261): Homolog of NCBI NO: 19699341 NR Description: At2g22200/T26C19.14 [Arabidopsis thaliana]
  misc_feature (1)..(261): Homolog of NCBI NO: 15227162 NR Description: AP2 domain transcription factor [Arabidopsis
METASLSFPVPNTSFGVNKSMPLGLNQLTPYQIHQIQNQLNHRRSTISNLSPNRIRMKNLTPSTSKTKNLYRGVRQRHWGKWVAEIRLPKNRTRLWLGTFETAEKAALAYDQAAFQLRGDIAKLNFPNLIHEDMNPLPSSVDTKLQAICKSLRKTEEICSVSDQTKEYSVYSVSDKTELFLPKTELFLPKREHLETNELSNESPRSDETSLLDESQAEYSSSDKTFLDFSDTEFEEIGSFGLRKFPSVEIDWDAISKLANS

SEQ ID NO: 48621 - protein, 241 aa, Arabidopsis thaliana
  peptide (1)..(241): Ceres Seq. ID no. 15168775
  misc_feature (48)..(112): Pfam Name: AP2 domain Pfam Description: AP2 domain
  misc_feature (1)..(235): Homolog of NCBI NO: 13877779 NR Description: putative AP2 domain-containing protein
  misc_feature (29)..(240): Homolog of NCBI NO: 15219839 NR Description: AP2 domain transcription factor, putative
  misc_feature (1)..(235): Homolog of NCBI NO: 15218204 NR Description: AP2 domain transcription factor RAP2.4
  misc_feature (1)..(235): Homolog of NCBI NO: 6573771 NR Description: F28K19.29 [Arabidopsis thaliana]
  misc_feature (1)..(235): Homolog of NCBI NO: 37572971 NR Description: AP2-domain DRE binding factor DBF1
  misc_feature (1)..(235): Homolog of NCBI NO: 32140997 NR Description: DRE binding factor 2 [Oryza sativa (japonica
  misc_feature (1)..(235): Homolog of NCBI NO: 27436378 NR Description: dehydration-responsive element binding protein 3
  misc_feature (1)..(241): Homolog of NCBI NO: 15236020 NR Description: AP2 domain transcription factor, putative
  misc_feature (1)..(241): Homolog of NCBI NO: 19699341 NR Description: At2g22200/T26C19.14 [Arabidopsis thaliana]
  misc_feature (1)..(241): Homolog of NCBI NO: 15227162 NR Description: AP2 domain transcription factor [Arabidopsis
MPLGLNQLTPYQIHQIQNQLNHRRSTISNLSPNRIRMKNLTPSTSKTKNLYRGVRQRHWGKWVAEIRLPKNRTRLWLGTFETAEKAALAYDQAAFQLRGDIAKLNFPNLIHEDMNPLPSSVDTKLQAICKSLRKTEEICSVSDQTKEYSVYSVSDKTELFLPKTELFLPKREHLETNELSNESPRSDETSLLDESQAEYSSSDKTFLDFSDTEFEEIGSFGLRKFPSVEIDWDAISKLANS

SEQ ID NO: 48622 - DNA, 3024 bp, Arabidopsis thaliana
  misc_feature (1)..(3024): Ceres Seq. ID no. 12575116
  misc_feature: MA Experiment ID: 20000327 Result: Down-regulated in Transcription
  misc_feature: MA Experiment 20000327 PARAMETER Experiment Name: At_42deg_Heat_Sub_P Parameter: Age (day) Value: 14
  misc_feature: MA Experiment 20000327 PARAMETER Experiment Name: At_42deg_Heat_Sub_P Parameter: Organism Value: A. thaliana
  misc_feature: MA Experiment 20000327 PARAMETER Experiment Name: At_42deg_Heat_Sub_P Parameter: Plant Line Value: WS
  misc_feature: MA Experiment 20000327 PARAMETER Experiment Name: At_42deg_Heat_Sub_P Parameter: Temperature (deg C) Value: 42 vs. 22
  misc_feature: MA Experiment 20000327 PARAMETER Experiment Name: At_42deg_Heat_Sub_P Parameter: Timepoint (hr) Value: 1
  misc_feature: MA Experiment 20000327 PARAMETER Experiment Name: At_42deg_Heat_Sub_P Parameter: Tissue Value: Aerial
  misc_feature: MA Experiment ID: 20000328 Result: Down-regulated in Transcription
  misc_feature: MA Experiment 20000328 PARAMETER Experiment Name: At_42deg_Heat_Sub_P Parameter: Age (day) Value: 14
  misc_feature: MA Experiment 20000328 PARAMETER Experiment Name: At_42deg_Heat_Sub_P Parameter: Organism Value: A. thaliana
  misc_feature: MA Experiment 20000328 PARAMETER Experiment Name: At_42deg_Heat_Sub_P Parameter: Plant Line Value: WS
  misc_feature: MA Experiment 20000328 PARAMETER Experiment Name: At_42deg_Heat_Sub_P Parameter: Temperature (deg C) Value: 42 vs. 22
  misc_feature: MA Experiment 20000328 PARAMETER Experiment Name: At_42deg_Heat_Sub_P Parameter: Timepoint (hr) Value: 6
  misc_feature: MA Experiment 20000328 PARAMETER Experiment Name: At_42deg_Heat_Sub_P Parameter: Tissue Value: Aerial
atggtggatcgcagatcttttggctctataactcctcctctccaattagatatggaacagttgctgtcagaagcccaacacaggtggcttaggcctactgagatttgtgaaattcttcagaactatcacaagtttcatatagcatcagagtctcccacccgacccgccagtggttcactttttctttttgataggaaggtactgagatattttaggaaagacggacataactggaggaagaagaaagatggtaaaaccataagagaagctcatgagaagctcaaggtaggaagcatagatgtgctacattgttactatgcacatggggaagccaacgagaatttccagagacgttgctactggatgcttgaacaacatttgatgcatatcgtttttgtgcactacttgcaggttaagggtaaccggaccagtataggaatgaaagaaaacaattcaaattctgtaaatggcacagcttcagtgaatattgattcaacagcaagcccaactagcacattgtcatcattatgtgaagatgctgataccggggatagtcaacaagcaagttccgtcttacgaccatctcctgaacctcaaactggaaatcgctatggttggacacctgctcctggcatgcgtaatgtttcacaggttcatgggaacagagtcagagaaagtgattcccagagattagttgatgtcagagctttggataccgttgggaattcgctgacaagatttcatgatcagccttattgtaataatttgttgactcagatgcagccttctaatactgactcaatgctggtggaagaaaattcagaaaaaggtgggcggttaaaggcagagcatatcagaaatcctcttcaaactcaatttaattggcaggatgacactgatctggcgttatttgagcaaagtgcacaagataattttgagacattttccagtctccttggcagtgaaaatctgcaaccttttggaattagttatcaagctcctccttcaaatatggactctgaatatatgcctgtaatgaaaatattgcgaagaagcgaagatagtttgaaaaaagtcgatagtttttctaagtgggctattaaagaacttggggagatggaggatttgcagatgcagtcttcacgtggagatattgcatggaccactgttgaatgtgaaactgcagcagctgggatctccttgagcccttctctctctgaggatcagcgtttcaccatagttgatttttggccaaaaagtgcaaagacagacgcagaagttgaggtcatggttattgggacatttctacttagtccgcaagaagtaactaaatataattggtcatgcatgtttggtgaagtggaagttcctgctgagattttagtagatggtgttctttgctgtcatgctccaccgcatacagctggtcacgtccccttttatgttacatgttccaacagatttgcttgcagtgaagtacgagaatttgatttcctttctggttctacccaaaaaatcaatgctacagatgtttatggtacctatacaaatgaagcatcacttcagttgcggtttgagaagatgcttgctcacagggattttgttcacgaacaccatatattcgaagatgttggggacaaacgaagacaaatcagtaaaattatgttgctaaaggaggagaaagagtatctccttccagggacatatcagagagactcaaccaaacaagaaccaaaaggacagctttttagggaactgtttgaagaagaactatatatatggctcatacataaagtgactgaagagggtaaaggtccaaacatattggatgaagatggacagggtattttacactttgttgcagcgcttgggtatgactgggccattaaaccggtgttagcagcaggagttaacattaacttccgtgatgccaatggctggtctgcccttcattgggctgcgtttagtggcagggaggaaactgtcgctgtgcttgtctctctaggtgctgatgctggggcattaacggatccatctccagagcttccattgggtaaaacagcagctgatttggcttacgcaaatggacacaggggaatttcgggatttcttgcagagtcttccttaactagttatcttgaaaagctaacagtggactcaaaggaaaatagccctgccaactcttgtggagaaaaagctgttcaaacagtctctgagcgaaccgctgctcctatgacctatggcgatgtaccagagaaactttccttgaaggattcacttactgctgtccgtaatgctacgcaagcggctgatcgtctccatcaagtattcaggatgcaatcattccaacggaaacagctgtgtgatattggcgatgatgaaaagattgatatctccgaccagttagctgtttcttttgcagcttctaaaactaagaatccaggacagggtgatgtctctcttagttgtgctgctacccatatccagaagaaatatcgtggttggaagaagagaaaagagtttcttttaatccgacaaagaatcgttaaaattcaggctcatgtgagaggacatcaggtccggaaacaataccgaacagtcatctggtctgtgggattactcgagaaaatcattttgcgttggagacgcaaaggtaatggtttgagagggtttaaacgcaatgcagtcgccaaaaccgtggaaccggaaccgcctgtatcagctatatgtcctaggatcccacaggaagatgagtatgattatcttaaagagggaagaaaacaaacagaggaaaggctacagaaggctctgactcgtgttaagtcgatggttcaatacccagaagcacgggatcaataccgtagactcctaacggttgttgagggcttccgtgaaaatgaggcttcatcaagtgcatctataaacaataaagaagaagaagcagtcaactgtgaagaagacgattttattgacattgagtctcttttgaacgatgacacattgatgatgtctatttctccttga

SEQ ID NO: 48623 - protein, 1007 aa, Arabidopsis thaliana
  peptide (1)..(1007): Ceres Seq. ID no. 12575117
  misc_feature (412)..(498): Pfam Name: IPT/TIG domain Pfam Description: IPT/TIG domain
  misc_feature (51)..(181): Homolog of NCBI NO: 25412096 NR Description: hypothetical protein At2g22300 [imported] -
  misc_feature (736)..(1006): Homolog of NCBI NO: 25412096 NR Description: hypothetical protein At2g22300 [imported] -
  misc_feature (336)..(721): Homolog of NCBI NO: 25412096 NR Description: hypothetical protein At2g22300 [imported] -
  misc_feature (1)..(181): Homolog of NCBI NO: 30681670 NR Description: ethylene-induced calmodulin-binding protein,
  misc_feature (736)..(1006): Homolog of NCBI NO: 30681670 NR Description: ethylene-induced calmodulin-binding protein,
  misc_feature (336)..(721): Homolog of NCBI NO: 30681670 NR Description: ethylene-induced calmodulin-binding protein,
  misc_feature (1)..(189): Homolog of NCBI NO: 37991923 NR Description: putative calmodulin-binding transcription factor
  misc_feature (170)..(1005): Homolog of NCBI NO: 37991923 NR Description: putative calmodulin-binding transcription factor
  misc_feature (3)..(189): Homolog of NCBI NO: 37533660 NR Description: putative calmodulin binding protein similar to
  misc_feature (353)..(1000): Homolog of NCBI NO: 37533660 NR Description: putative calmodulin binding protein similar to
MVDRRSFGSITPPLQLDMEQLLSEAQHRWLRPTEICEILQNYHKFHIASESPTRPASGSLFLFDRKVLRYFRKDGHNWRKKKDGKTIREAHEKLKVGSIDVLHCYYAHGEANENFQRRCYWMLEQHLMHIVFVHYLQVKGNRTSIGMKENNSNSVNGTASVNIDSTASPTSTLSSLCEDADTGDSQQASSVLRPSPEPQTGNRYGWTPAPGMRNVSQVHGNRVRESDSQRLVDVRALDTVGNSLTRFHDQPYCNNLLTQMQPSNTDSMLVEENSEKGGRLKAEHIRNPLQTQFNWQDDTDLALFEQSAQDNFETFSSLLGSENLQPFGISYQAPPSNMDSEYMPVMKILRRSEDSLKKVDSFSKWAIKELGEMEDLQMQSSRGDIAWTTVECETAAAGISLSPSLSEDQRFTIVDFWPKSAKTDAEVEVMVIGTFLLSPQEVTKYNWSCMFGEVEVPAEILVDGVLCCHAPPHTAGHVPFYVTCSNRFACSEVREFDFLSGSTQKINATDVYGTYTNEASLQLRFEKMLAHRDFVHEHHIFEDVGDKRRQISKIMLLKEEKEYLLPGTYQRDSTKQEPKGQLFRELFEEELYIWLIHKVTEEGKGPNILDEDGQGILHFVAALGYDWAIKPVLAAGVNINFRDANGWSALHWAAFSGREETVAVLVSLGADAGALTDPSPELPLGKTAADLAYANGHRGISGFLAESSLTSYLEKLTVDSKENSPANSCGEKAVQTVSERTAAPMTYGDVPEKLSLKDSLTAVRNATQAADRLHQVFRMQSFQRKQLCDIGDDEKIDISDQLAVSFAASKTKNPGQGDVSLSCAATHIQKKYRGWKKRKEFLLIRQRIVKIQAHVRGHQVRKQYRTVIWSVGLLEKIILRWRRKGNGLRGFKRNAVAKTVEPEPPVSAICPRIPQEDEYDYLKEGRKQTEERLQKALTRVKSMVQYPEARDQYRRLLTVVEGFRENEASSSASINNKEEEAVNCEEDDFIDIESLLNDDTLMMSISP

SEQ ID NO: 48624 - protein, 990 aa, Arabidopsis thaliana
  peptide (1)..(990): Ceres Seq. ID no. 12575118
  misc_feature (395)..(481): Pfam Name: IPT/TIG domain Pfam Description: IPT/TIG domain
  misc_feature (34)..(164): Homolog of NCBI NO: 25412096 NR Description: hypothetical protein At2g22300 [imported] -
  misc_feature (719)..(989): Homolog of NCBI NO: 25412096 NR Description: hypothetical protein At2g22300 [imported] -
  misc_feature (319)..(704): Homolog of NCBI NO: 25412096 NR Description: hypothetical protein At2g22300 [imported] -
  misc_feature (1)..(164): Homolog of NCBI NO: 30681670 NR Description: ethylene-induced calmodulin-binding protein,
  misc_feature (719)..(989): Homolog of NCBI NO: 30681670 NR Description: ethylene-induced calmodulin-binding protein,
  misc_feature (319)..(704): Homolog of NCBI NO: 30681670 NR Description: ethylene-induced calmodulin-binding protein,
  misc_feature (1)..(172): Homolog of NCBI NO: 37991923 NR Description: putative calmodulin-binding transcription factor
  misc_feature (153)..(988): Homolog of NCBI NO: 37991923 NR Description: putative calmodulin-binding transcription factor
  misc_feature (1)..(172): Homolog of NCBI NO: 37533660 NR Description: putative calmodulin binding protein similar to
  misc_feature (336)..(983): Homolog of NCBI NO: 37533660 NR Description: putative calmodulin binding protein similar to
MEQLLSEAQHRWLRPTEICEILQNYHKFHIASESPTRPASGSLFLFDRKVLRYFRKDGHNWRKKKDGKTIREAHEKLKVGSIDVLHCYYAHGEANENFQRRCYWMLEQHLMHIVFVHYLQVKGNRTSIGMKENNSNSVNGTASVNIDSTASPTSTLSSLCEDADTGDSQQASSVLRPSPEPQTGNRYGWTPAPGMRNVSQVHGNRVRESDSQRLVDVRALDTVGNSLTRFHDQPYCNNLLTQMQPSNTDSMLVEENSEKGGRLKAEHIRNPLQTQFNWQDDTDLALFEQSAQDNFETFSSLLGSENLQPFGISYQAPPSNMDSEYMPVMKILRRSEDSLKKVDSFSKWAIKELGEMEDLQMQSSRGDIAWTTVECETAAAGISLSPSLSEDQRFTIVDFWPKSAKTDAEVEVMVIGTFLLSPQEVTKYNWSCMFGEVEVPAEILVDGVLCCHAPPHTAGHVPFYVTCSNRFACSEVREFDFLSGSTQKINATDVYGTYTNEASLQLRFEKMLAHRDFVHEHHIFEDVGDKRRQISKIMLLKEEKEYLLPGTYQRDSTKQEPKGQLFRELFEEELYIWLIHKVTEEGKGPNILDEDGQGILHFVAALGYDWAIKPVLAAGVNINFRDANGWSALHWAAFSGREETVAVLVSLGADAGALTDPSPELPLGKTAADLAYANGHRGISGFLAESSLTSYLEKLTVDSKENSPANSCGEKAVQTVSERTAAPMTYGDVPEKLSLKDSLTAVRNATQAADRLHQVFRMQSFQRKQLCDIGDDEKIDISDQLAVSFAASKTKNPGQGDVSLSCAATHIQKKYRGWKKRKEFLLIRQRIVKIQAHVRGHQVRKQYRTVIWSVGLLEKIILRWRRKGNGLRGFKRNAVAKTVEPEPPVSAICPRIPQEDEYDYLKEGRKQTEERLQKALTRVKSMVQYPEARDQYRRLLTVVEGFRENEASSSASINNKEEEAVNCEEDDFIDIESLLNDDTLMMSISP

SEQ ID NO: 48625 - protein, 886 aa, Arabidopsis thaliana
  peptide (1)..(886): Ceres Seq. ID no. 12575119
  misc_feature (291)..(377): Pfam Name: IPT/TIG domain Pfam Description: IPT/TIG domain
  misc_feature (1)..(60): Homolog of NCBI NO: 25412096 NR Description: hypothetical protein At2g22300 [imported] -
  misc_feature (615)..(885): Homolog of NCBI NO: 25412096 NR Description: hypothetical protein At2g22300 [imported] -
  misc_feature (215)..(600): Homolog of NCBI NO: 25412096 NR Description: hypothetical protein At2g22300 [imported] -
  misc_feature (1)..(60): Homolog of NCBI NO: 30681670 NR Description: ethylene-induced calmodulin-binding protein,
  misc_feature (615)..(885): Homolog of NCBI NO: 30681670 NR Description: ethylene-induced calmodulin-binding protein,
  misc_feature (215)..(600): Homolog of NCBI NO: 30681670 NR Description: ethylene-induced calmodulin-binding protein,
  misc_feature (1)..(68): Homolog of NCBI NO: 37991923 NR Description: putative calmodulin-binding transcription factor
  misc_feature (49)..(884): Homolog of NCBI NO: 37991923 NR Description: putative calmodulin-binding transcription factor
  misc_feature (1)..(68): Homolog of NCBI NO: 37533660 NR Description: putative calmodulin binding protein similar to
  misc_feature (232)..(879): Homolog of NCBI NO: 37533660 NR Description: putative calmodulin binding protein similar to
MLEQHLMHIVFVHYLQVKGNRTSIGMKENNSNSVNGTASVNIDSTASPTSTLSSLCEDADTGDSQQASSVLRPSPEPQTGNRYGWTPAPGMRNVSQVHGNRVRESDSQRLVDVRALDTVGNSLTRFHDQPYCNNLLTQMQPSNTDSMLVEENSEKGGRLKAEHIRNPLQTQFNWQDDTDLALFEQSAQDNFETFSSLLGSENLQPFGISYQAPPSNMDSEYMPVMKILRRSEDSLKKVDSFSKWAIKELGEMEDLQMQSSRGDIAWTTVECETAAAGISLSPSLSEDQRFTIVDFWPKSAKTDAEVEVMVIGTFLLSPQEVTKYNWSCMFGEVEVPAEILVDGVLCCHAPPHTAGHVPFYVTCSNRFACSEVREFDFLSGSTQKINATDVYGTYTNEASLQLRFEKMLAHRDFVHEHHIFEDVGDKRRQISKIMLLKEEKEYLLPGTYQRDSTKQEPKGQLFRELFEEELYIWLIHKVTEEGKGPNILDEDGQGILHFVAALGYDWAIKPVLAAGVNINFRDANGWSALHWAAFSGREETVAVLVSLGADAGALTDPSPELPLGKTAADLAYANGHRGISGFLAESSLTSYLEKLTVDSKENSPANSCGEKAVQTVSERTAAPMTYGDVPEKLSLKDSLTAVRNATQAADRLHQVFRMQSFQRKQLCDIGDDEKIDISDQLAVSFAASKTKNPGQGDVSLSCAATHIQKKYRGWKKRKEFLLIRQRIVKIQAHVRGHQVRKQYRTVIWSVGLLEKIILRWRRKGNGLRGFKRNAVAKTVEPEPPVSAICPRIPQEDEYDYLKEGRKQTEERLQKALTRVKSMVQYPEARDQYRRLLTVVEGFRENEASSSASINNKEEEAVNCEEDDFIDIESLLNDDTLMMSISP

SEQ ID NO: 48626 - DNA, 2038 bp, Arabidopsis thaliana; identical to SEQ ID NO: 45643
  misc_feature (1)..(2038): Ceres Seq. ID no. 13591671
  misc_feature: MA Experiment ID: 108434 Result: Up-regulated in Transcription
  misc_feature: MA Experiment 108434 PARAMETER Experiment Name: At_Root_Tips_cDNA_P Parameter: Tissue Value: Root Tips
  misc_feature: MA Experiment ID: 108595 Result: Down-regulated in Transcription
  misc_feature: MA Experiment 108595 PARAMETER Experiment Name: At_Ler-pi_Ovule_cDNA_P Parameter: Plant Line Value: null
  misc_feature: MA Experiment ID: 20000185 Result: Up-regulated in Transcription
  misc_feature: MA Experiment 20000185 PARAMETER Experiment Name: At_Roots__P Parameter: Age (day) Value: 7 vs. 21
  misc_feature: MA Experiment 20000185 PARAMETER Experiment Name: At_Roots__P Parameter: Organism Value: A. thaliana
  misc_feature: MA Experiment 20000185 PARAMETER Experiment Name: At_Roots__P Parameter: Tissue Value: Roots vs. Whole Plant
  misc_feature: MA Experiment ID: 20000439 Result: Up-regulated in Transcription
  misc_feature: MA Experiment 20000439 PARAMETER Experiment Name: At_Roots__P Parameter: Age (day) Value: 14 vs. 21
  misc_feature: MA Experiment 20000439 PARAMETER Experiment Name: At_Roots__P Parameter: Organism Value: A. thaliana
  misc_feature: MA Experiment 20000439 PARAMETER Experiment Name: At_Roots__P Parameter: Tissue Value: Roots vs. Whole Plant
  misc_feature: MA Experiment ID: 20000794 Result: Up-regulated in Transcription
  misc_feature: MA Experiment 20000794 PARAMETER Experiment Name: At_Petals_P Parameter: Age (day) Value: 23-25 days
  misc_feature: MA Experiment 20000794 PARAMETER Experiment Name: At_Petals_P Parameter: Plant Line Value: WS
  misc_feature: MA Experiment 20000794 PARAMETER Experiment Name: At_Petals_P Parameter: Tissue Value: Petals vs. Whole plant

SEQ ID NO: 48627 - protein, 531 aa, Arabidopsis thaliana; identical to SEQ ID NO: 45644
  peptide (1)..(531): Ceres Seq. ID no. 13591672
  misc_feature (260)..(446): Pfam Name: Peptidase M16 inactive domain Pfam Description: Peptidase M16 inactive domain
  misc_feature (260)..(446): Pfam Name: Peptidase M16 inactive domain Pfam Description: Peptidase M16 inactive domain
  misc_feature (91)..(530): Homolog of NCBI NO: 21357875 NR Description: CG3731-PB [Drosophila melanogaster]
  misc_feature (74)..(527): Homolog of NCBI NO: 34910490 NR Description: putative mitochondrial processing peptidase beta
  misc_feature (1)..(531): Homolog of NCBI NO: 477819 NR Description: ubiquinol-cytochrome-c reductase (EC 1.10.2.2)
  misc_feature (1)..(531): Homolog of NCBI NO: 587564 NR Description: mitochondrial processing peptidase [Solanum
  misc_feature (1)..(531): Homolog of NCBI NO: 477280 NR Description: ubiquinol-cytochrome-c reductase (EC 1.10.2.2)
  misc_feature (91)..(530): Homolog of NCBI NO: 21357875 NR Description: CG3731-PB [Drosophila melanogaster]
  misc_feature (1)..(531): Homolog of NCBI NO: 477819 NR Description: ubiquinol-cytochrome-c reductase (EC 1.10.2.2)
  misc_feature (1)..(531): Homolog of NCBI NO: 477280 NR Description: ubiquinol-cytochrome-c reductase (EC 1.10.2.2)
  misc_feature (1)..(531): Homolog of NCBI NO: 15232845 NR Description: mitochondrial processing peptidase -related
  misc_feature (1)..(503): Homolog of NCBI NO: 30678485 NR Description: mitochondrial processing peptidase -related
  misc_feature (1)..(531): Homolog of NCBI NO: 12802327 NR Description: mitochondrial processing peptidase beta subunit
  misc_feature (1)..(531): Homolog of NCBI NO: 13959067 NR Description: mitochondrial processing peptidase [Avicennia
  misc_feature (1)..(531): Homolog of NCBI NO: 587566 NR Description: mitochondrial processing peptidase [Solanum
  misc_feature (1)..(531): Homolog of NCBI NO: 587564 NR Description: mitochondrial processing peptidase [Solanum
  misc_feature (74)..(527): Homolog of NCBI NO: 34910490 NR Description: putative mitochondrial processing peptidase beta
  misc_feature (1)..(531): Homolog of NCBI NO: 587566 NR Description: mitochondrial processing peptidase [Solanum
  misc_feature (1)..(531): Homolog of NCBI NO: 13959067 NR Description: mitochondrial processing peptidase [Avicennia
  misc_feature (1)..(531): Homolog of NCBI NO: 12802327 NR Description: mitochondrial processing peptidase beta subunit
  misc_feature (1)..(503): Homolog of NCBI NO: 30678485 NR Description: mitochondrial processing peptidase -related
  misc_feature (1)..(531): Homolog of NCBI NO: 15232845 NR Description: mitochondrial processing peptidase -related

SEQ ID NO: 48628 - protein, 529 aa, Arabidopsis thaliana; identical to SEQ ID NO: 45645
  peptide (1)..(529): Ceres Seq. ID no. 13591673
  misc_feature (258)..(444): Pfam Name: Peptidase M16 inactive domain Pfam Description: Peptidase M16 inactive domain
  misc_feature (258)..(444): Pfam Name: Peptidase M16 inactive domain Pfam Description: Peptidase M16 inactive domain
  misc_feature (89)..(528): Homolog of NCBI NO: 21357875 NR Description: CG3731-PB [Drosophila melanogaster]
  misc_feature (72)..(525): Homolog of NCBI NO: 34910490 NR Description: putative mitochondrial processing peptidase beta
  misc_feature (1)..(529): Homolog of NCBI NO: 477819 NR Description: ubiquinol-cytochrome-c reductase (EC 1.10.2.2)
  misc_feature (1)..(529): Homolog of NCBI NO: 587564 NR Description: mitochondrial processing peptidase [Solanum
  misc_feature (1)..(529): Homolog of NCBI NO: 477280 NR Description: ubiquinol-cytochrome-c reductase (EC 1.10.2.2)
  misc_feature (89)..(528): Homolog of NCBI NO: 21357875 NR Description: CG3731-PB [Drosophila melanogaster]
  misc_feature (1)..(529): Homolog of NCBI NO: 477819 NR Description: ubiquinol-cytochrome-c reductase (EC 1.10.2.2)
  misc_feature (1)..(529): Homolog of NCBI NO: 477280 NR Description: ubiquinol-cytochrome-c reductase (EC 1.10.2.2)
  misc_feature (1)..(529): Homolog of NCBI NO: 15232845 NR Description: mitochondrial processing peptidase -related
  misc_feature (1)..(501): Homolog of NCBI NO: 30678485 NR Description: mitochondrial processing peptidase -related
  misc_feature (1)..(529): Homolog of NCBI NO: 12802327 NR Description: mitochondrial processing peptidase beta subunit
  misc_feature (1)..(529): Homolog of NCBI NO: 13959067 NR Description: mitochondrial processing peptidase [Avicennia
  misc_feature (1)..(529): Homolog of NCBI NO: 587566 NR Description: mitochondrial processing peptidase [Solanum
  misc_feature (1)..(529): Homolog of NCBI NO: 587564 NR Description: mitochondrial processing peptidase [Solanum
  misc_feature (72)..(525): Homolog of NCBI NO: 34910490 NR Description: putative mitochondrial processing peptidase beta
  misc_feature (1)..(529): Homolog of NCBI NO: 587566 NR Description: mitochondrial processing peptidase [Solanum
  misc_feature (1)..(529): Homolog of NCBI NO: 13959067 NR Description: mitochondrial processing peptidase [Avicennia
  misc_feature (1)..(529): Homolog of NCBI NO: 12802327 NR Description: mitochondrial processing peptidase beta subunit
  misc_feature (1)..(501): Homolog of NCBI NO: 30678485 NR Description: mitochondrial processing peptidase -related
  misc_feature (1)..(529): Homolog of NCBI NO: 15232845 NR Description: mitochondrial processing peptidase -related

SEQ ID NO: 48629 - protein, 480 aa, Arabidopsis thaliana; identical to SEQ ID NO: 45646
  peptide (1)..(480): Ceres Seq. ID no. 13591674
  misc_feature (209)..(395): Pfam Name: Peptidase M16 inactive domain Pfam Description: Peptidase M16 inactive domain
  misc_feature (209)..(395): Pfam Name: Peptidase M16 inactive domain Pfam Description: Peptidase M16 inactive domain
  misc_feature (40)..(479): Homolog of NCBI NO: 21357875 NR Description: CG3731-PB [Drosophila melanogaster]
  misc_feature (23)..(476): Homolog of NCBI NO: 34910490 NR Description: putative mitochondrial processing peptidase beta
  misc_feature (1)..(480): Homolog of NCBI NO: 477819 NR Description: ubiquinol-cytochrome-c reductase (EC 1.10.2.2)
  misc_feature (1)..(480): Homolog of NCBI NO: 587564 NR Description: mitochondrial processing peptidase [Solanum
  misc_feature (1)..(480): Homolog of NCBI NO: 477280 NR Description: ubiquinol-cytochrome-c reductase (EC 1.10.2.2)
  misc_feature (40)..(479): Homolog of NCBI NO: 21357875 NR Description: CG3731-PB [Drosophila melanogaster]
  misc_feature (1)..(480): Homolog of NCBI NO: 477819 NR Description: ubiquinol-cytochrome-c reductase (EC 1.10.2.2)
  misc_feature (1)..(480): Homolog of NCBI NO: 477280 NR Description: ubiquinol-cytochrome-c reductase (EC 1.10.2.2)
  misc_feature (1)..(480): Homolog of NCBI NO: 15232845 NR Description: mitochondrial processing peptidase -related
  misc_feature (1)..(452): Homolog of NCBI NO: 30678485 NR Description: mitochondrial processing peptidase -related
  misc_feature (1)..(480): Homolog of NCBI NO: 12802327 NR Description: mitochondrial processing peptidase beta subunit
  misc_feature (1)..(480): Homolog of NCBI NO: 13959067 NR Description: mitochondrial processing peptidase [Avicennia
  misc_feature (1)..(480): Homolog of NCBI NO: 587566 NR Description: mitochondrial processing peptidase [Solanum
  misc_feature (1)..(480): Homolog of NCBI NO: 587564 NR Description: mitochondrial processing peptidase [Solanum
  misc_feature (23)..(476): Homolog of NCBI NO: 34910490 NR Description: putative mitochondrial processing peptidase beta
  misc_feature (1)..(480): Homolog of NCBI NO: 587566 NR Description: mitochondrial processing peptidase [Solanum
  misc_feature (1)..(480): Homolog of NCBI NO: 13959067 NR Description: mitochondrial processing peptidase [Avicennia
  misc_feature (1)..(480): Homolog of NCBI NO: 12802327 NR Description: mitochondrial processing peptidase beta subunit
  misc_feature (1)..(452): Homolog of NCBI NO: 30678485 NR Description: mitochondrial processing peptidase -related
  misc_feature (1)..(480): Homolog of NCBI NO: 15232845 NR Description: mitochondrial processing peptidase -related

SEQ ID NO: 48630 - DNA, 1561 bp, Arabidopsis thaliana
  misc_feature (1)..(1561): Ceres Seq. ID no. 13578940
gaaagagcaaaccagtgaaggaaaaatggagatatggttacttatcttgggctcgctcttcctctctctccttgtcaatcacctcctctttcgccgccgtgactccttctcctctcttccattaccacctgaccctaactttttccctttcattggaaccctcaaatggctccggaaaggtttaggtggtctcgacaactacctccgctccgtccaccaccatctcggtcccatcatcaccctccgtatcacttcccgccccgccatcttcgtcaccgatcgttctcttgctcaccaggctctcgttttgaacggtgccgttttcgccgatcgtccaccggcggaatcgatcagtaagattatttcgagtaaccaacataacatcagctcttgtttatatggagctacgtggcgtcttcttcgccggaatctcacttctgagattcttcacccctcgcgcctgagatcttactctcatgcgcggcgttgggttcttgagattctttttggtcgatttggtaaaaacagaggtgaagaaccgattgttgttgttgatcatcttcactatgcgatgtttgcgcttcttgttctcatgtgttttggagataagcttgacgagaagcaaataaaacaagtggaatatgttcagagacgacagcttcttggattttccagatttaacatccttaccctttggcctaagttcactaaattgatttatcgaaagagatgggaagagttcttccagatgcagagcgaacagcaggatgttttgcttccgctgattcgtgctcggaggaagatcgttgatgagaggaagaagagatcatcagaggaagaaaaagacaacaaagagtatgtacaatcatatgttgatactctgctcgatgtggagcttccagatgagaagaggaagctaaacgaggatgagattgtgagtttgtgttcggagtttcttaatgccgggactgatacaactgccaccgcgttgcaatggatcatggcgaaccttgtgaaaaacccggagattcagaggaggttatatgaggagatcaaaagcatagttggggaagaagcaaaggaagtagaggaacaagacgcgcaaaagatgccgtatctaaaggcagtggtgatggagggtctccgaagacatcctccgggacattttgtgctcccccacagtgtcactgaggacactgtgttaggaggatacaaagtgccgaagaaggggacaattaatttcatggtggcagagatagggagggatccaaaagtgtgggaggaaccaatggcgtttaagccagagaggtttatggaagaagcggtggacataaccggaagcagagggataaagatgatgccgtttggagcgggaagaaggatatgtcccgggattgggctagcgatgctgcatcttgagtactatgtggcgaatatggtgagggagtttgagtggcaggaggtccaaggtcatgaagtggacttgacggagaagctcgagtttaccgtagtcatgaagcatccgcttaaggcccttgctgttcctaggagaagtcactag

SEQ ID NO: 48631 - protein, 519 aa, Arabidopsis thaliana
  peptide (1)..(519): Ceres Seq. ID no. 13578941
  misc_feature (42)..(515): Pfam Name: Cytochrome P450 Pfam Description: Cytochrome P450
  misc_feature (11)..(517): Homolog of NCBI NO: 15228566 NR Description: cytochrome P450, putative [Arabidopsis thaliana]
  misc_feature (342)..(517): Homolog of NCBI NO: 9757853 NR Description: cytochrome P450-like protein [Arabidopsis
  misc_feature (9)..(311): Homolog of NCBI NO: 9757853 NR Description: cytochrome P450-like protein [Arabidopsis
  misc_feature (9)..(519): Homolog of NCBI NO: 1432145 NR Description: cytochrome P450 [Arabidopsis thaliana]
  misc_feature (9)..(519): Homolog of NCBI NO: 15217771 NR Description: cytochrome P450, putative [Arabidopsis thaliana]
  misc_feature (9)..(519): Homolog of NCBI NO: 15217798 NR Description: cytochrome P450, putative [Arabidopsis thaliana]
  misc_feature (9)..(519): Homolog of NCBI NO: 15224379 NR Description: cytochrome P450, putative [Arabidopsis thaliana]
  misc_feature (9)..(519): Homolog of NCBI NO: 15450601 NR Description: At1g64950/F13O11_25 [Arabidopsis thaliana]
  misc_feature (9)..(519): Homolog of NCBI NO: 15217801 NR Description: cytochrome P450, putative [Arabidopsis thaliana]
  misc_feature (9)..(519): Homolog of NCBI NO: 15217800 NR Description: cytochrome P450, putative [Arabidopsis thaliana]
KEQTSEGKMEIWLLILGSLFLSLLVNHLLFRRRDSFSSLPLPPDPNFFPFIGTLKWLRKGLGGLDNYLRSVHHHLGPIITLRITSRPAIFVTDRSLAHQALVLNGAVFADRPPAESISKIISSNQHNISSCLYGATWRLLRRNLTSEILHPSRLRSYSHARRWVLEILFGRFGKNRGEEPIVVVDHLHYAMFALLVLMCFGDKLDEKQIKQVEYVQRRQLLGFSRFNILTLWPKFTKLIYRKRWEEFFQMQSEQQDVLLPLIRARRKIVDERKKRSSEEEKDNKEYVQSYVDTLLDVELPDEKRKLNEDEIVSLCSEFLNAGTDTTATALQWIMANLVKNPEIQRRLYEEIKSIVGEEAKEVEEQDAQKMPYLKAVVMEGLRRHPPGHFVLPHSVTEDTVLGGYKVPKKGTINFMVAEIGRDPKVWEEPMAFKPERFMEEAVDITGSRGIKMMPFGAGRRICPGIGLAMLHLEYYVANMVREFEWQEVQGHEVDLTEKLEFTVVMKHPLKALAVPRRSH

SEQ ID NO: 48632 - protein, 511 aa, Arabidopsis thaliana
  peptide (1)..(511): Ceres Seq. ID no. 13578942
  misc_feature (34)..(507): Pfam Name: Cytochrome P450 Pfam Description: Cytochrome P450
  misc_feature (3)..(509): Homolog of NCBI NO: 15228566 NR Description: cytochrome P450, putative [Arabidopsis thaliana]
  misc_feature (334)..(509): Homolog of NCBI NO: 9757853 NR Description: cytochrome P450-like protein [Arabidopsis
  misc_feature (1)..(303): Homolog of NCBI NO: 9757853 NR Description: cytochrome P450-like protein [Arabidopsis
  misc_feature (1)..(511): Homolog of NCBI NO: 1432145 NR Description: cytochrome P450 [Arabidopsis thaliana]
  misc_feature (1)..(511): Homolog of NCBI NO: 15217771 NR Description: cytochrome P450, putative [Arabidopsis thaliana]
  misc_feature (1)..(511): Homolog of NCBI NO: 15217798 NR Description: cytochrome P450, putative [Arabidopsis thaliana]
  misc_feature (1)..(511): Homolog of NCBI NO: 15224379 NR Description: cytochrome P450, putative [Arabidopsis thaliana]
  misc_feature (1)..(511): Homolog of NCBI NO: 15450601 NR Description: At1g64950/F13O11_25 [Arabidopsis thaliana]
  misc_feature (1)..(511): Homolog of NCBI NO: 15217801 NR Description: cytochrome P450, putative [Arabidopsis thaliana]
  misc_feature (1)..(511): Homolog of NCBI NO: 15217800 NR Description: cytochrome P450, putative [Arabidopsis thaliana]
MEIWLLILGSLFLSLLVNHLLFRRRDSFSSLPLPPDPNFFPFIGTLKWLRKGLGGLDNYLRSVHHHLGPIITLRITSRPAIFVTDRSLAHQALVLNGAVFADRPPAESISKIISSNQHNISSCLYGATWRLLRRNLTSEILHPSRLRSYSHARRWVLEILFGRFGKNRGEEPIVVVDHLHYAMFALLVLMCFGDKLDEKQIKQVEYVQRRQLLGFSRFNILTLWPKFTKLIYRKRWEEFFQMQSEQQDVLLPLIRARRKIVDERKKRSSEEEKDNKEYVQSYVDTLLDVELPDEKRKLNEDEIVSLCSEFLNAGTDTTATALQWIMANLVKNPEIQRRLYEEIKSIVGEEAKEVEEQDAQKMPYLKAVVMEGLRRHPPGHFVLPHSVTEDTVLGGYKVPKKGTINFMVAEIGRDPKVWEEPMAFKPERFMEEAVDITGSRGIKMMPFGAGRRICPGIGLAMLHLEYYVANMVREFEWQEVQGHEVDLTEKLEFTVVMKHPLKALAVPRRSH

SEQ ID NO: 48633 - protein, 329 aa, Arabidopsis thaliana
  peptide (1)..(329): Ceres Seq. ID no. 13578943
  misc_feature (1)..(325): Pfam Name: Cytochrome P450 Pfam Description: Cytochrome P450
  misc_feature (1)..(327): Homolog of NCBI NO: 15228566 NR Description: cytochrome P450, putative [Arabidopsis thaliana]
  misc_feature (152)..(327): Homolog of NCBI NO: 9757853 NR Description: cytochrome P450-like protein [Arabidopsis
  misc_feature (1)..(121): Homolog of NCBI NO: 9757853 NR Description: cytochrome P450-like protein [Arabidopsis
  misc_feature (1)..(329): Homolog of NCBI NO: 1432145 NR Description: cytochrome P450 [Arabidopsis thaliana]
  misc_feature (1)..(329): Homolog of NCBI NO: 15217771 NR Description: cytochrome P450, putative [Arabidopsis thaliana]
  misc_feature (1)..(329): Homolog of NCBI NO: 15217798 NR Description: cytochrome P450, putative [Arabidopsis thaliana]
  misc_feature (1)..(329): Homolog of NCBI NO: 15224379 NR Description: cytochrome P450, putative [Arabidopsis thaliana]
  misc_feature (1)..(329): Homolog of NCBI NO: 15450601 NR Description: At1g64950/F13O11_25 [Arabidopsis thaliana]
  misc_feature (1)..(329): Homolog of NCBI NO: 15217801 NR Description: cytochrome P450, putative [Arabidopsis thaliana]
  misc_feature (1)..(329): Homolog of NCBI NO: 15217800 NR Description: cytochrome P450, putative [Arabidopsis thaliana]
MFALLVLMCFGDKLDEKQIKQVEYVQRRQLLGFSRFNILTLWPKFTKLIYRKRWEEFFQMQSEQQDVLLPLIRARRKIVDERKKRSSEEEKDNKEYVQSYVDTLLDVELPDEKRKLNEDEIVSLCSEFLNAGTDTTATALQWIMANLVKNPEIQRRLYEEIKSIVGEEAKEVEEQDAQKMPYLKAVVMEGLRRHPPGHFVLPHSVTEDTVLGGYKVPKKGTINFMVAEIGRDPKVWEEPMAFKPERFMEEAVDITGSRGIKMMPFGAGRRICPGIGLAMLHLEYYVANMVREFEWQEVQGHEVDLTEKLEFTVVMKHPLKALAVPRRSH

SEQ ID NO: 48634 - DNA, 1027 bp, Arabidopsis thaliana
  misc_feature (1)..(1027): Ceres Seq. ID no. 12575158
  misc_feature: MA Experiment ID: 108434 Result: Down-regulated in Transcription
  misc_feature: MA Experiment 108434 PARAMETER Experiment Name: At_Root_Tips_cDNA_P Parameter: Tissue Value: Root Tips
  misc_feature: MA Experiment ID: 108461 Result: Up-regulated in Transcription
  misc_feature: MA Experiment 108461 PARAMETER Experiment Name: At_Germinating_Seeds_cDNA_P Parameter: Age (day) Value: 1 vs. 0
  misc_feature: MA Experiment 108461 PARAMETER Experiment Name: At_Germinating_Seeds_cDNA_P Parameter: Tissue Value: Germinating Seeds
  misc_feature: MA Experiment ID: 108462 Result: Up-regulated in Transcription
  misc_feature: MA Experiment 108462 PARAMETER Experiment Name: At_Germinating_Seeds_cDNA_P Parameter: Age (day) Value: 2 vs. 0
  misc_feature: MA Experiment 108462 PARAMETER Experiment Name: At_Germinating_Seeds_cDNA_P Parameter: Tissue Value: Germinating Seeds
  misc_feature: MA Experiment ID: 108464 Result: Up-regulated in Transcription
  misc_feature: MA Experiment 108464 PARAMETER Experiment Name: At_Germinating_Seeds_cDNA_P Parameter: Age (day) Value: 4 vs. 0
  misc_feature: MA Experiment 108464 PARAMETER Experiment Name: At_Germinating_Seeds_cDNA_P Parameter: Tissue Value: Germinating Seeds
  misc_feature: MA Experiment ID: 108488 Result: Up-regulated in Transcription
  misc_feature: MA Experiment ID: 108489 Result: Down-regulated in Transcription
  misc_feature: MA Experiment ID: 20000180 Result: Up-regulated in Transcription
  misc_feature: MA Experiment 20000180 PARAMETER Experiment Name: At_Germinating_Seeds_P Parameter: Age (hr) Value: 24 vs. 0
  misc_feature: MA Experiment 20000180 PARAMETER Experiment Name: At_Germinating_Seeds_P Parameter: Tissue Value: Germinating Seeds
  misc_feature: MA Experiment ID: 20000227 Result: Down-regulated in Transcription
  misc_feature: MA Experiment 20000227 PARAMETER Experiment Name: At_Root-Tips-vs-Tops_P Parameter: Tissue Value: Root Tips vs. Root Tops
  misc_feature: MA Experiment ID: 20000265 Result: Down-regulated in Transcription
  misc_feature: MA Experiment 20000265 PARAMETER Experiment Name: At_Open_Flower_P Parameter: Age (day) Value: 21
  misc_feature: MA Experiment 20000265 PARAMETER Experiment Name: At_Open_Flower_P Parameter: Plant Line Value: WS
  misc_feature: MA Experiment 20000265 PARAMETER Experiment Name: At_Open_Flower_P Parameter: Tissue Value: Closed Flower vs. Whole Plant
  misc_feature: MA Experiment ID: 20000269 Result: Down-regulated in Transcription
  misc_feature: MA Experiment 20000269 PARAMETER Experiment Name: At_1mM_KNO3_L-vs-H_Roots_P Parameter: Age (day) Value: 7,10,12
  misc_feature: MA Experiment 20000269 PARAMETER Experiment Name: At_1mM_KNO3_L-vs-H_Roots_P Parameter: Organism Value: A. thaliana
  misc_feature: MA Experiment 20000269 PARAMETER Experiment Name: At_1mM_KNO3_L-vs-H_Roots_P Parameter: Plant Line Value: WS
  misc_feature: MA Experiment 20000269 PARAMETER Experiment Name: At_1mM_KNO3_L-vs-H_Roots_P Parameter: Timepoint (day) Value: 7,10,12
  misc_feature: MA Experiment 20000269 PARAMETER Experiment Name: At_1mM_KNO3_L-vs-H_Roots_P Parameter: Tissue Value: Roots
  misc_feature: MA Experiment 20000269 PARAMETER Experiment Name: At_1mM_KNO3_L-vs-H_Roots_P Parameter: Treatment Value: 1mM KNO3 vs. 50mM KNO3
  misc_feature: MA Experiment ID: 20000286 Result: Down-regulated in Transcription
  misc_feature: MA Experiment 20000286 PARAMETER Experiment Name: At_Open_Flower_P Parameter: Age (day) Value: 21
  misc_feature: MA Experiment 20000286 PARAMETER Experiment Name: At_Open_Flower_P Parameter: Plant Line Value: WS
  misc_feature: MA Experiment 20000286 PARAMETER Experiment Name: At_Open_Flower_P Parameter: Tissue Value: Half Open vs. Whole Plant
  misc_feature: MA Experiment ID: 20000436 Result: Up-regulated in Transcription
  misc_feature: MA Experiment 20000436 PARAMETER Experiment Name: At_Drought_P Parameter: Age (day) Value: 7
  misc_feature: MA Experiment 20000436 PARAMETER Experiment Name: At_Drought_P Parameter: Organism Value: A. thaliana
  misc_feature: MA Experiment 20000436 PARAMETER Experiment Name: At_Drought_P Parameter: Plant Line Value: WS
  misc_feature: MA Experiment 20000436 PARAMETER Experiment Name: At_Drought_P Parameter: Timepoint (hr) Value: 12
  misc_feature: MA Experiment 20000436 PARAMETER Experiment Name: At_Drought_P Parameter: Tissue Value: Whole Plant
  misc_feature: MA Experiment 20000436 PARAMETER Experiment Name: At_Drought_P Parameter: Treatment Value: Drought vs. No Drought
  misc_feature: MA Experiment ID: 20000439 Result: Down-regulated in Transcription
  misc_feature: MA Experiment 20000439 PARAMETER Experiment Name: At_Roots__P Parameter: Age (day) Value: 14 vs. 21
  misc_feature: MA Experiment 20000439 PARAMETER Experiment Name: At_Roots__P Parameter: Organism Value: A. thaliana
  misc_feature: MA Experiment 20000439 PARAMETER Experiment Name: At_Roots__P Parameter: Tissue Value: Roots vs. Whole Plant
  misc_feature: MA Experiment ID: 20000441 Result: Up-regulated in Transcription
  misc_feature: MA Experiment 20000441 PARAMETER Experiment Name: At_1uM_BR-BRZ__P Parameter: Tissue Value: Shoot Apices
  misc_feature: MA Experiment 20000441 PARAMETER Experiment Name: At_1uM_BR-BRZ__P Parameter: Treatment Value: 1uM BR vs. No Treatment
  misc_feature: MA Experiment ID: 20000443 Result: Up-regulated in Transcription
  misc_feature: MA Experiment 20000443 PARAMETER Experiment Name: At_1uM_BR-BRZ__P Parameter: Tissue Value: Shoot Apices
  misc_feature: MA Experiment 20000443 PARAMETER Experiment Name: At_1uM_BR-BRZ__P Parameter: Treatment Value: 1uM BRZ vs. No Treatment
  misc_feature: MA Experiment ID: 20001450 Result: Up-regulated in Transcription
  misc_feature: MA Experiment 20001450 PARAMETER Experiment Name: At_Far-red-induction_P Parameter: Age (day) Value: 7
  misc_feature: MA Experiment 20001450 PARAMETER Experiment Name: At_Far-red-induction_P Parameter: Light Value: Far-red vs. White
  misc_feature: MA Experiment 20001450 PARAMETER Experiment Name: At_Far-red-induction_P Parameter: Organism Value: A. thaliana
  misc_feature: MA Experiment 20001450 PARAMETER Experiment Name: At_Far-red-induction_P Parameter: Plant Line Value: Columbia
  misc_feature: MA Experiment 20001450 PARAMETER Experiment Name: At_Far-red-induction_P Parameter: Timepoint (hr) Value: 8
  misc_feature: MA Experiment 20001450 PARAMETER Experiment Name: At_Far-red-induction_P Parameter: Tissue Value: Whole Plant
  misc_feature: MA Experiment ID: 20001451 Result: Up-regulated in Transcription
  misc_feature: MA Experiment 20001451 PARAMETER Experiment Name: At_Far-red-induction_P Parameter: Age (day) Value: 7
  misc_feature: MA Experiment 20001451 PARAMETER Experiment Name: At_Far-red-induction_P Parameter: Light Value: Far-red vs. White
  misc_feature: MA Experiment 20001451 PARAMETER Experiment Name: At_Far-red-induction_P Parameter: Organism Value: A. thaliana
  misc_feature: MA Experiment 20001451 PARAMETER Experiment Name: At_Far-red-induction_P Parameter: Plant Line Value: Columbia
  misc_feature: MA Experiment 20001451 PARAMETER Experiment Name: At_Far-red-induction_P Parameter: Timepoint (hr) Value: 24
  misc_feature: MA Experiment 20001451 PARAMETER Experiment Name: At_Far-red-induction_P Parameter: Tissue Value: Whole Plant
  misc_feature: MA Experiment ID: 20001558 Result: Down-regulated in Transcription
  misc_feature: MA Experiment 20001558 PARAMETER Experiment Name: At_Drought_Soil_Dry_P Parameter: Age (day) Value: 27
  misc_feature: MA Experiment 20001558 PARAMETER Experiment Name: At_Drought_Soil_Dry_P Parameter: Organism Value: A. thaliana
  misc_feature: MA Experiment 20001558 PARAMETER Experiment Name: At_Drought_Soil_Dry_P Parameter: Plant Line Value: WS
  misc_feature: MA Experiment 20001558 PARAMETER Experiment Name: At_Drought_Soil_Dry_P Parameter: Post Timepoint (hr) Value: 6
  misc_feature: MA Experiment 20001558 PARAMETER Experiment Name: At_Drought_Soil_Dry_P Parameter: Post-Treatment Value: Re-Water vs. No Drought
  misc_feature: MA Experiment 20001558 PARAMETER Experiment Name: At_Drought_Soil_Dry_P Parameter: Timepoint (day) Value: 13
  misc_feature: MA Experiment 20001558 PARAMETER Experiment Name: At_Drought_Soil_Dry_P Parameter: Treatment Value: Drought vs. No Drought
  misc_feature: MA Experiment ID: 20001757 Result: Up-regulated in Transcription
  misc_feature: MA Experiment 20001757 PARAMETER Experiment Name: At_50mM_NH4NO3_L-to-H_P Parameter: Timepoint (hr) Value: 6
  misc_feature: MA Experiment 20001757 PARAMETER Experiment Name: At_50mM_NH4NO3_L-to-H_P Parameter: Tissue Value: Leaf
  misc_feature: MA Experiment 20001757 PARAMETER Experiment Name: At_50mM_NH4NO3_L-to-H_P Parameter: Treatment Value: 50mM NH4NO3 vs 100mM Mannitol
  misc_feature: MA Experiment ID: 20001905 Result: Down-regulated in Transcription
  misc_feature: MA Experiment 20001905 PARAMETER Experiment Name: At_Drought_Reproduction_P Parameter: Age (day) Value: 40
  misc_feature: MA Experiment 20001905 PARAMETER Experiment Name: At_Drought_Reproduction_P Parameter: Organism Value: A. thaliana
  misc_feature: MA Experiment 20001905 PARAMETER Experiment Name: At_Drought_Reproduction_P Parameter: Plant Line Value: WS
  misc_feature: MA Experiment 20001905 PARAMETER Experiment Name: At_Drought_Reproduction_P Parameter: Timepoint (day) Value: 10
  misc_feature: MA Experiment 20001905 PARAMETER Experiment Name: At_Drought_Reproduction_P Parameter: Tissue Value: Rosettes
  misc_feature: MA Experiment 20001905 PARAMETER Experiment Name: At_Drought_Reproduction_P Parameter: Treatment Value: Drought vs. No Drought
aatcactctcaccagtcacaaccaaaaaaaagaaaacacaaaaacaaagattataatggcttcctcaaccatggctttgtcctcccctgccttcgccggaaaggctgtgaagcctgccgcatcagatgtcctcggaagcggccgtgtgaccatgaggaagactgtcgccaagccaaagggtccatcaggcagcccatggtacggatctgaccgagtcaagtacttgggtccattctccggcgagcccccgagctaccttaccggtgagttccccggtgactacggatgggacaccgctggtctatccgccgacccagagaccttcgccaggaaccgtgagctagaagttatccacagcagatgggccatgctcggagccctaggctgcgttttccctgagctattggctaggaacggagtgaagttcggagaagcggtttggttcaaggccggttcacagatcttcagcgacggaggattggactacttgggcaacccgagcttggtccacgctcagagcatcttagccatttgggctactcaagttatcctcatgggagctgttgaaggctacagagtcgccggagatggtccattgggagaagcagaggacttgctttacccaggtggcagcttcgacccattgggcctcgctactgaccccgaggctttcgcagagttgaaggtgaaggagctcaagaacggaaggttggctatgttctctatgtttggattcttcgttcaagccatcgtcaccggaaagggacctttggagaacctcgccgaccatttggccgacccagtcaacaacaacgcttgggccttcgccaccaacttcgtccccggaaagtgagcggctgcttattatgtgaatgagagcagagaaagagagtttgtttgtggtctattctatgtaaatttgtgaactttcctttgtggtatctttgtatagaaatcgaacctctttttctctaactgtgttggcgttttatctgaagactcaattgaattgaaatatccactcttg

SEQ ID NO: 48635 - protein, 283 aa, Arabidopsis thaliana
  peptide (1)..(283): Ceres Seq. ID no. 12575159
  misc_feature (81)..(250): Pfam Name: Chlorophyll A-B binding protein Pfam Description: Chlorophyll A-B binding protein
  misc_feature (36)..(283): Homolog of NCBI NO: 12324161 NR Description: chlorophyll A-B-binding protein 2 precursor, 5'
  misc_feature (19)..(283): Homolog of NCBI NO: 30686051 NR Description: photosystem II type I chlorophyll a /b binding
  misc_feature (19)..(283): Homolog of NCBI NO: 18266039 NR Description: chlorophyll a/b binding protein [Brassica
  misc_feature (19)..(283): Homolog of NCBI NO: 21592428 NR Description: putative photosystem II type I chlorophyll a b
  misc_feature (19)..(283): Homolog of NCBI NO: 18403549 NR Description: photosystem II type I chlorophyll a /b binding
  misc_feature (19)..(283): Homolog of NCBI NO: 115778 NR Description: Chlorophyll A-B binding protein 1, chloroplast
  misc_feature (19)..(283): Homolog of NCBI NO: 17473828 NR Description: chlorophyll a/b-binding protein [Arabidopsis
  misc_feature (19)..(283): Homolog of NCBI NO: 18397286 NR Description: photosystem II type I chlorophyll a /b binding
  misc_feature (19)..(283): Homolog of NCBI NO: 15220615 NR Description: light-harvesting chlorophyll a/b binding protein
  misc_feature (19)..(283): Homolog of NCBI NO: 18403546 NR Description: photosystem II type I chlorophyll a /b binding
ITLTSHNQKKENTKTKIIMASSTMALSSPAFAGKAVKPAASDVLGSGRVTMRKTVAKPKGPSGSPWYGSDRVKYLGPFSGEPPSYLTGEFPGDYGWDTAGLSADPETFARNRELEVIHSRWAMLGALGCVFPELLARNGVKFGEAVWFKAGSQIFSDGGLDYLGNPSLVHAQSILAIWATQVILMGAVEGYRVAGDGPLGEAEDLLYPGGSFDPLGLATDPEAFAELKVKELKNGRLAMFSMFGFFVQAIVTGKGPLENLADHLADPVNNNAWAFATNFVPGK

SEQ ID NO: 48636 - protein, 265 aa, Arabidopsis thaliana; identical to SEQ ID NO: 29587
  peptide (1)..(265): Ceres Seq. ID no. 12575160
  misc_feature (63)..(232): Pfam Name: Chlorophyll A-B binding protein Pfam Description: Chlorophyll A-B binding protein
  misc_feature (18)..(265): Homolog of NCBI NO: 12324161 NR Description: chlorophyll A-B-binding protein 2 precursor, 5'
  misc_feature (1)..(265): Homolog of NCBI NO: 30686051 NR Description: photosystem II type I chlorophyll a /b binding
  misc_feature (1)..(265): Homolog of NCBI NO: 18266039 NR Description: chlorophyll a/b binding protein [Brassica
  misc_feature (1)..(265): Homolog of NCBI NO: 21592428 NR Description: putative photosystem II type I chlorophyll a b
  misc_feature (1)..(265): Homolog of NCBI NO: 18403549 NR Description: photosystem II type I chlorophyll a /b binding
  misc_feature (1)..(265): Homolog of NCBI NO: 115778 NR Description: Chlorophyll A-B binding protein 1, chloroplast
  misc_feature (1)..(265): Homolog of NCBI NO: 17473828 NR Description: chlorophyll a/b-binding protein [Arabidopsis
  misc_feature (1)..(265): Homolog of NCBI NO: 18397286 NR Description: photosystem II type I chlorophyll a /b binding
  misc_feature (1)..(265): Homolog of NCBI NO: 15220615 NR Description: light-harvesting chlorophyll a/b binding protein
  misc_feature (1)..(265): Homolog of NCBI NO: 18403546 NR Description: photosystem II type I chlorophyll a /b binding

SEQ ID NO: 48637 - protein, 260 aa, Arabidopsis thaliana; identical to SEQ ID NO: 29588
  peptide (1)..(260): Ceres Seq. ID no. 12575161
  misc_feature (58)..(227): Pfam Name: Chlorophyll A-B binding protein Pfam Description: Chlorophyll A-B binding protein
  misc_feature (13)..(260): Homolog of NCBI NO: 12324161 NR Description: chlorophyll A-B-binding protein 2 precursor, 5'
  misc_feature (1)..(260): Homolog of NCBI NO: 30686051 NR Description: photosystem II type I chlorophyll a /b binding
  misc_feature (1)..(260): Homolog of NCBI NO: 18266039 NR Description: chlorophyll a/b binding protein [Brassica
  misc_feature (1)..(260): Homolog of NCBI NO: 21592428 NR Description: putative photosystem II type I chlorophyll a b
  misc_feature (1)..(260): Homolog of NCBI NO: 18403549 NR Description: photosystem II type I chlorophyll a /b binding
  misc_feature (1)..(260): Homolog of NCBI NO: 115778 NR Description: Chlorophyll A-B binding protein 1, chloroplast
  misc_feature (1)..(260): Homolog of NCBI NO: 17473828 NR Description: chlorophyll a/b-binding protein [Arabidopsis
  misc_feature (1)..(260): Homolog of NCBI NO: 18397286 NR Description: photosystem II type I chlorophyll a /b binding
  misc_feature (1)..(260): Homolog of NCBI NO: 15220615 NR Description: light-harvesting chlorophyll a/b binding protein
  misc_feature (1)..(260): Homolog of NCBI NO: 18403546 NR Description: photosystem II type I chlorophyll a /b binding

SEQ ID NO: 48638 - DNA, 1232 bp, Arabidopsis thaliana
  misc_feature (1)..(1232): Ceres Seq. ID no. 15168779
  misc_feature: MA Experiment ID: 20000180 Result: Up-regulated in Transcription
  misc_feature: MA Experiment 20000180 PARAMETER Experiment Name: At_Germinating_Seeds_P Parameter: Age (hr) Value: 24 vs. 0
  misc_feature: MA Experiment 20000180 PARAMETER Experiment Name: At_Germinating_Seeds_P Parameter: Tissue Value: Germinating Seeds
  misc_feature: MA Experiment ID: 20000794 Result: Up-regulated in Transcription
  misc_feature: MA Experiment 20000794 PARAMETER Experiment Name: At_Petals_P Parameter: Age (day) Value: 23-25 days
  misc_feature: MA Experiment 20000794 PARAMETER Experiment Name: At_Petals_P Parameter: Plant Line Value: WS
  misc_feature: MA Experiment 20000794 PARAMETER Experiment Name: At_Petals_P Parameter: Tissue Value: Petals vs. Whole plant
  misc_feature: MA Experiment ID: 20001904 Result: Up-regulated in Transcription
  misc_feature: MA Experiment 20001904 PARAMETER Experiment Name: At_Drought_Reproduction_P Parameter: Age (day) Value: 37
  misc_feature: MA Experiment 20001904 PARAMETER Experiment Name: At_Drought_Reproduction_P Parameter: Organism Value: A. thaliana
  misc_feature: MA Experiment 20001904 PARAMETER Experiment Name: At_Drought_Reproduction_P Parameter: Plant Line Value: WS
  misc_feature: MA Experiment 20001904 PARAMETER Experiment Name: At_Drought_Reproduction_P Parameter: Timepoint (day) Value: 7
  misc_feature: MA Experiment 20001904 PARAMETER Experiment Name: At_Drought_Reproduction_P Parameter: Tissue Value: Rosettes
  misc_feature: MA Experiment 20001904 PARAMETER Experiment Name: At_Drought_Reproduction_P Parameter: Treatment Value: Drought vs. No Drought
ggcgtacgtcaatttgtagaagcaatctcactttttccctttctctgtacatcatcatccttcaagctcggagctctctcttcccgccggcgatctcctccgcttctctccgattttaagtcgatcgaatggggaaaatcaagaaagtgaatcaaaggggtcatattgctacaccgtatccatcaccatgttgtaagaaagaatgggctggctcaacctgtccagtatgcttggagtctccacacaatgcggttcttctcctgtgttcgtcttatcacaaaggatgccgtccttacatgtgtgctacaaacagccgttttgccaactgccttgatcaatacaggaaatcctacggtaacgaaaactcaggacaacccgagcttttgtgtccactgtgtagaggtcaagtgaaaggctggactgttgtgaaagatgctcggatgcattttaactccaagagaaggacttgtatgcaggataactgttcctttttaggaaatttccgaaagctcaagaaacacatgaaggaaaaacacccacatgcttgcccaagagccattgatccagctttagaaactaaatggaagaggcttgagagggaaagagacagaagagacgtgataagcacgataatgtcatcgacaccaggtgctgttgtgttgggagattatgtgatagagccgcataaccgaggtgtttatgatgaagaagacgaagaagaagattacagctcagatgactctctaagcaacgggatactggatctagaatcatcatggcaaggacaaagccatcatattcggtttcttgatatggaatcaagtgacttcgcatcctcttccagctcccctgcttctccaagccgttcgcttcaccgtttgctctttccaaggaaccagagaggcggcaatagaggagcagtataaaaaggctaacatgactagccaattagccatacacagggaattggaaaaaaaaaactcgcagtcgtccctttcttttatttattttcatgtaaattattgtattctgtgtaattgtattattgtttctgcattgttgtactttaatgaggaatgatctcttatgcctcatttcataatttctcttttatttccactttttttcctctgtatagatatgatcttcatcttcctcaagttctggaagaacaataaaaaggttatgtgaaaagaaaagaaaagaaaaaaagcttttctcacttcttaacg

SEQ ID NO: 48639 - protein, 265 aa, Arabidopsis thaliana
  peptide (1)..(265): Ceres Seq. ID no. 15168780
  misc_feature (26)..(204): Homolog of NCBI NO: 18417801 NR Description: expressed protein [Arabidopsis thaliana]
  misc_feature (26)..(204): Homolog of NCBI NO: 7486671 NR Description: hypothetical protein F8F16.230 - Arabidopsis
  misc_feature (24)..(83): Homolog of NCBI NO: 15230170 NR Description: expressed protein [Arabidopsis thaliana]
  misc_feature (78)..(194): Homolog of NCBI NO: 15230170 NR Description: expressed protein [Arabidopsis thaliana]
  misc_feature (23)..(203): Homolog of NCBI NO: 38344827 NR Description: OSJNBa0064H22.8 [Oryza sativa (japonica
  misc_feature (19)..(233): Homolog of NCBI NO: 15221290 NR Description: expressed protein [Arabidopsis thaliana]
  misc_feature (23)..(213): Homolog of NCBI NO: 7487028 NR Description: hypothetical protein T15F16.1 - Arabidopsis
  misc_feature (23)..(213): Homolog of NCBI NO: 15236507 NR Description: expressed protein [Arabidopsis thaliana]
  misc_feature (1)..(263): Homolog of NCBI NO: 25365932 NR Description: unknown protein T32E8.10 [imported] - Arabidopsis
  misc_feature (1)..(265): Homolog of NCBI NO: 30699285 NR Description: expressed protein [Arabidopsis thaliana]
MGKIKKVNQRGHIATPYPSPCCKKEWAGSTCPVCLESPHNAVLLLCSSYHKGCRPYMCATNSRFANCLDQYRKSYGNENSGQPELLCPLCRGQVKGWTVVKDARMHFNSKRRTCMQDNCSFLGNFRKLKKHMKEKHPHACPRAIDPALETKWKRLERERDRRDVISTIMSSTPGAVVLGDYVIEPHNRGVYDEEDEEEDYSSDDSLSNGILDLESSWQGQSHHIRFLDMESSDFASSSSSPASPSRSLHRLLFPRNQRGGNRGAV

SEQ ID NO: 48640 - protein, 209 aa, Arabidopsis thaliana
  peptide (1)..(209): Ceres Seq. ID no. 15168781
  misc_feature (1)..(148): Homolog of NCBI NO: 18417801 NR Description: expressed protein [Arabidopsis thaliana]
  misc_feature (1)..(148): Homolog of NCBI NO: 7486671 NR Description: hypothetical protein F8F16.230 - Arabidopsis
  misc_feature (1)..(27): Homolog of NCBI NO: 15230170 NR Description: expressed protein [Arabidopsis thaliana]
  misc_feature (22)..(138): Homolog of NCBI NO: 15230170 NR Description: expressed protein [Arabidopsis thaliana]
  misc_feature (1)..(147): Homolog of NCBI NO: 38344827 NR Description: OSJNBa0064H22.8 [Oryza sativa (japonica
  misc_feature (1)..(177): Homolog of NCBI NO: 15221290 NR Description: expressed protein [Arabidopsis thaliana]
  misc_feature (1)..(157): Homolog of NCBI NO: 7487028 NR Description: hypothetical protein T15F16.1 - Arabidopsis
  misc_feature (1)..(157): Homolog of NCBI NO: 15236507 NR Description: expressed protein [Arabidopsis thaliana]
  misc_feature (1)..(207): Homolog of NCBI NO: 25365932 NR Description: unknown protein T32E8.10 [imported] - Arabidopsis
  misc_feature (1)..(209): Homolog of NCBI NO: 30699285 NR Description: expressed protein [Arabidopsis thaliana]
MCATNSRFANCLDQYRKSYGNENSGQPELLCPLCRGQVKGWTVVKDARMHFNSKRRTCMQDNCSFLGNFRKLKKHMKEKHPHACPRAIDPALETKWKRLERERDRRDVISTIMSSTPGAVVLGDYVIEPHNRGVYDEEDEEEDYSSDDSLSNGILDLESSWQGQSHHIRFLDMESSDFASSSSSPASPSRSLHRLLFPRNQRGGNRGAV

SEQ ID NO: 48641 - protein, 161 aa, Arabidopsis thaliana
  peptide (1)..(161): Ceres Seq. ID no. 15168782
  misc_feature (1)..(76): Homolog of NCBI NO: 18404727 NR Description: expressed protein [Arabidopsis thaliana]
  misc_feature (1)..(100): Homolog of NCBI NO: 18417801 NR Description: expressed protein [Arabidopsis thaliana]
  misc_feature (1)..(100): Homolog of NCBI NO: 7486671 NR Description: hypothetical protein F8F16.230 - Arabidopsis
  misc_feature (1)..(90): Homolog of NCBI NO: 15230170 NR Description: expressed protein [Arabidopsis thaliana]
  misc_feature (1)..(99): Homolog of NCBI NO: 38344827 NR Description: OSJNBa0064H22.8 [Oryza sativa (japonica
  misc_feature (1)..(129): Homolog of NCBI NO: 15221290 NR Description: expressed protein [Arabidopsis thaliana]
  misc_feature (1)..(109): Homolog of NCBI NO: 7487028 NR Description: hypothetical protein T15F16.1 - Arabidopsis
  misc_feature (1)..(109): Homolog of NCBI NO: 15236507 NR Description: expressed protein [Arabidopsis thaliana]
  misc_feature (1)..(159): Homolog of NCBI NO: 25365932 NR Description: unknown protein T32E8.10 [imported] - Arabidopsis
  misc_feature (1)..(161): Homolog of NCBI NO: 30699285 NR Description: expressed protein [Arabidopsis thaliana]
MHFNSKRRTCMQDNCSFLGNFRKLKKHMKEKHPHACPRAIDPALETKWKRLERERDRRDVISTIMSSTPGAVVLGDYVIEPHNRGVYDEEDEEEDYSSDDSLSNGILDLESSWQGQSHHIRFLDMESSDFASSSSSPASPSRSLHRLLFPRNQRGGNRGAV

SEQ ID NO: 48642 - DNA, 2383 bp, Arabidopsis thaliana
  misc_feature (1)..(2383): Ceres Seq. ID no. 13578847
  misc_feature: MA Experiment ID: 20000171 Result: Down-regulated in Transcription
  misc_feature: MA Experiment 20000171 PARAMETER Experiment Name: At_42deg_Heat_P Parameter: Age (day) Value: 14
  misc_feature: MA Experiment 20000171 PARAMETER Experiment Name: At_42deg_Heat_P Parameter: Organism Value: A. thaliana
  misc_feature: MA Experiment 20000171 PARAMETER Experiment Name: At_42deg_Heat_P Parameter: Plant Line Value: WS
  misc_feature: MA Experiment 20000171 PARAMETER Experiment Name: At_42deg_Heat_P Parameter: Temperature (deg C) Value: 42 vs. 22
  misc_feature: MA Experiment 20000171 PARAMETER Experiment Name: At_42deg_Heat_P Parameter: Timepoint (hr) Value: 1
  misc_feature: MA Experiment 20000171 PARAMETER Experiment Name: At_42deg_Heat_P Parameter: Tissue Value: Aerial
  misc_feature: MA Experiment ID: 20000184 Result: Down-regulated in Transcription
  misc_feature: MA Experiment 20000184 PARAMETER Experiment Name: At_Shoots__P Parameter: Age (day) Value: 7
  misc_feature: MA Experiment 20000184 PARAMETER Experiment Name: At_Shoots__P Parameter: Tissue Value: Shoots vs. Whole Plant
  misc_feature: MA Experiment ID: 20000495 Result: Down-regulated in Transcription
  misc_feature: MA Experiment 20000495 PARAMETER Experiment Name: At_Guard_Cells_P Parameter: Harvest Date Value: 8/2/2002
  misc_feature: MA Experiment 20000495 PARAMETER Experiment Name: At_Guard_Cells_P Parameter: Organism Value: A. thaliana
  misc_feature: MA Experiment 20000495 PARAMETER Experiment Name: At_Guard_Cells_P Parameter: Tissue Value: Guard Cells vs. Leaves
  misc_feature: MA Experiment ID: 20000573 Result: Up-regulated in Transcription
  misc_feature: MA Experiment 20000573 PARAMETER Experiment Name: At_100uM_ABA_Mutants__P Parameter: Organism Value: A. thaliana
  misc_feature: MA Experiment 20000573 PARAMETER Experiment Name: At_100uM_ABA_Mutants__P Parameter: Plant Line Value: CS22 vs. Ler wt
  misc_feature: MA Experiment 20000573 PARAMETER Experiment Name: At_100uM_ABA_Mutants__P Parameter: Timepoint (hr) Value: N/A
  misc_feature: MA Experiment 20000573 PARAMETER Experiment Name: At_100uM_ABA_Mutants__P Parameter: Tissue Value: Whole Plant
  misc_feature: MA Experiment 20000573 PARAMETER Experiment Name: At_100uM_ABA_Mutants__P Parameter: Treatment Value: None
  misc_feature: MA Experiment ID: 20001247 Result: Up-regulated in Transcription
  misc_feature: MA Experiment 20001247 PARAMETER Experiment Name: At_Far-red-induction_P Parameter: Age (day) Value: 7
  misc_feature: MA Experiment 20001247 PARAMETER Experiment Name: At_Far-red-induction_P Parameter: Light Value: Far-red vs. White
  misc_feature: MA Experiment 20001247 PARAMETER Experiment Name: At_Far-red-induction_P Parameter: Organism Value: A. thaliana
  misc_feature: MA Experiment 20001247 PARAMETER Experiment Name: At_Far-red-induction_P Parameter: Plant Line Value: Columbia
  misc_feature: MA Experiment 20001247 PARAMETER Experiment Name: At_Far-red-induction_P Parameter: Timepoint (hr) Value: 1
  misc_feature: MA Experiment 20001247 PARAMETER Experiment Name: At_Far-red-induction_P Parameter: Tissue Value: Whole Plant
ggtcccaaatccaaaattactccttcttcttcgctgtaacgctttatacctaatcggagataaaacaatgcaatcgtcgaaaggacggcggaaagttggctccacaaccgccggagccggtatagattcggcggagaagctcgacgagctcttgatatcgtctgccatttgtaacggtgaagatttaggaccatttgttcggaaaactttcggtacagggaaaccagagactcttcttcaccatctcaagtttttcgcacgatctaaggaatcagagatcgaagaggtatgtaaagctcactatcaagactttatccacgccgtagacgatcttaaatcgcttctctcagatgttgaatcgcttaaatctgcgctttccgattcaaactctaaactccaatctgttgcggcgccgcttctttcgtctctcgattcgcttgttgaggctcagactgtgtctaagaacgtcgatctggcgattggagcggtgactcattgtgttcgtgttatggaacttgtctctcgagctaatcagcatcttcagagcggtaatttctacatggcgttgaaatgtgtggactcgattgagagtgatttcatggagaaaactccttcgtcaacgctgaaacggatgcttgagaataggattccggcgattcgatcttatgtggagaggaaagtgaataaggagtttggagattggttggttgagatccgtgtggtgagtcggaatttaggtcagttggctattggtgaagcttccgcggctcgtcagcgagaggaggagctcaggatcaagcagagacaagcggaggagcagagtagacttagtctacgcgattgcgtttatgcgctaaacgaagaagaggatgatgaatttggttctggccatgaaggcagcgatggtggtagttccggaggtggattgctaggttttgatttgacaccactttatagagcttatcacattcatcagacactatctcttggggatacttttaagcagtactattataacaatagggatcttcagcttacctctgacttccagattgctgggtttttcatagtagaggatagagttttaaggactggaggagggttgatttcgaagctggaagtggagactttgtgggatactgctgttactaagatgtgtgctgtgttggaggatcagttctctagaatgcagacggctaatcatctcttactgattaaggattatgtgagcttgttgggggtgagtctacgcagggacaagtatcatgagttgttactatctgattgccgtaaacagatcacagaagctttatcagcagataagtttgagcagatgttgatgaagaaagaatatgagtattccatgaatgtgctctctttccagttacaaacatcagaaatagtaccggcattccctttcattgctccattttcgaccaccgtcccagattgttgccggattgtgaggtcttttatcgaggattcggttagtttcatgtctcacggaggtcagcttgatttctatgatgtagtgaagaagtatctggataggcttctaggcgaggttctcgatgaggctctgttgaagctgattagcacgtcggttcatggagtttctcaggcaatgcaagttgcagcaaacatggccgtatttgaacgagcttgcgatttcttcttccgtcacgctgcacatctttcaggagttcctttgagaatggcggagagaggtaggaggcatttcccattgacgaaatctcaaaacactgcagaagatacactctcaggaatgcttaagaagaagatagatggtttcatgacattactcgagaatgtcaattggacaagcgacgatataccacaaggtgggaatgagtacatgaacgaagtgttgatctacttggaaactttggtttccaccgcacaacagatcttacccgctaaagtcttgaaaagggttttgcgtgatgtccttgctcacatttctgagaaaatcgttggaacgttatgcggggatctagtaaaaagattgagcatggctgcaatcaaaggacttgatgtggatattcagttgttggactcgtttacagagaacctaactccattgctcacggataaagaagcaagagagatgaaaaaagcgtttgtcgagataagacagatgatcaatttacttctgagtagtcatcctgagaattttgtaaacccggtgatcagagaaagaagctacaatgctttggattaccggaaagtagccacggtttcagagaaattcagagatccatcagatagtattttcgggacttttggaacaagagggtcgaggcaaaacccgaagaacaaatctttagatgcgttgataaagagattgaaagatgtgagctga

SEQ ID NO: 48643 - protein, 793 aa, Arabidopsis thaliana
  peptide (1)..(793): Ceres Seq. ID no. 13578848
  misc_feature (452)..(793): Pfam Name: Exocyst complex subunit Sec15-like Pfam Description: Exocyst complex subunit Sec15-like
  misc_feature (62)..(344): Homolog of NCBI NO: 24418657 NR Description: Exocyst complex component Sec15A (rSec15)
  misc_feature (418)..(790): Homolog of NCBI NO: 24418657 NR Description: Exocyst complex component Sec15A (rSec15)
  misc_feature (56)..(447): Homolog of NCBI NO: 34902596 NR Description: Unknown protein [Oryza sativa (japonica
  misc_feature (52)..(537): Homolog of NCBI NO: 37534338 NR Description: unknown protein [Oryza sativa (japonica
  misc_feature (48)..(449): Homolog of NCBI NO: 15228982 NR Description: hypothetical protein [Arabidopsis thaliana]
  misc_feature (350)..(793): Homolog of NCBI NO: 37534338 NR Description: unknown protein [Oryza sativa (japonica
  misc_feature (350)..(793): Homolog of NCBI NO: 34902596 NR Description: Unknown protein [Oryza sativa (japonica
  misc_feature (350)..(791): Homolog of NCBI NO: 15228982 NR Description: hypothetical protein [Arabidopsis thaliana]
  misc_feature (411)..(793): Homolog of NCBI NO: 34895194 NR Description: B1051E10.38 [Oryza sativa (japonica
  misc_feature (29)..(447): Homolog of NCBI NO: 34895194 NR Description: B1051E10.38 [Oryza sativa (japonica
VPNPKLLLLLRCNALYLIGDKTMQSSKGRRKVGSTTAGAGIDSAEKLDELLISSAICNGEDLGPFVRKTFGTGKPETLLHHLKFFARSKESEIEEVCKAHYQDFIHAVDDLKSLLSDVESLKSALSDSNSKLQSVAAPLLSSLDSLVEAQTVSKNVDLAIGAVTHCVRVMELVSRANQHLQSGNFYMALKCVDSIESDFMEKTPSSTLKRMLENRIPAIRSYVERKVNKEFGDWLVEIRVVSRNLGQLAIGEASAARQREEELRIKQRQAEEQSRLSLRDCVYALNEEEDDEFGSGHEGSDGGSSGGGLLGFDLTPLYRAYHIHQTLSLGDTFKQYYYNNRDLQLTSDFQIAGFFIVEDRVLRTGGGLISKLEVETLWDTAVTKMCAVLEDQFSRMQTANHLLLIKDYVSLLGVSLRRDKYHELLLSDCRKQITEALSADKFEQMLMKKEYEYSMNVLSFQLQTSEIVPAFPFIAPFSTTVPDCCRIVRSFIEDSVSFMSHGGQLDFYDVVKKYLDRLLGEVLDEALLKLISTSVHGVSQAMQVAANMAVFERACDFFFRHAAHLSGVPLRMAERGRRHFPLTKSQNTAEDTLSGMLKKKIDGFMTLLENVNWTSDDIPQGGNEYMNEVLIYLETLVSTAQQILPAKVLKRVLRDVLAHISEKIVGTLCGDLVKRLSMAAIKGLDVDIQLLDSFTENLTPLLTDKEAREMKKAFVEIRQMINLLLSSHPENFVNPVIRERSYNALDYRKVATVSEKFRDPSDSIFGTFGTRGSRQNPKNKSLDALIKRLKDVS

SEQ ID NO: 48644 - protein, 771 aa, Arabidopsis thaliana
  peptide (1)..(771): Ceres Seq. ID no. 13578849
  misc_feature (430)..(771): Pfam Name: Exocyst complex subunit Sec15-like Pfam Description: Exocyst complex subunit Sec15-like
  misc_feature (40)..(322): Homolog of NCBI NO: 24418657 NR Description: Exocyst complex component Sec15A (rSec15)
  misc_feature (396)..(768): Homolog of NCBI NO: 24418657 NR Description: Exocyst complex component Sec15A (rSec15)
  misc_feature (34)..(425): Homolog of NCBI NO: 34902596 NR Description: Unknown protein [Oryza sativa (japonica
  misc_feature (30)..(515): Homolog of NCBI NO: 37534338 NR Description: unknown protein [Oryza sativa (japonica
  misc_feature (26)..(427): Homolog of NCBI NO: 15228982 NR Description: hypothetical protein [Arabidopsis thaliana]
  misc_feature (328)..(771): Homolog of NCBI NO: 37534338 NR Description: unknown protein [Oryza sativa (japonica
  misc_feature (328)..(771): Homolog of NCBI NO: 34902596 NR Description: Unknown protein [Oryza sativa (japonica
  misc_feature (328)..(769): Homolog of NCBI NO: 15228982 NR Description: hypothetical protein [Arabidopsis thaliana]
  misc_feature (389)..(771): Homolog of NCBI NO: 34895194 NR Description: B1051E10.38 [Oryza sativa (japonica
  misc_feature (7)..(425): Homolog of NCBI NO: 34895194 NR Description: B1051E10.38 [Oryza sativa (japonica
MQSSKGRRKVGSTTAGAGIDSAEKLDELLISSAICNGEDLGPFVRKTFGTGKPETLLHHLKFFARSKESEIEEVCKAHYQDFIHAVDDLKSLLSDVESLKSALSDSNSKLQSVAAPLLSSLDSLVEAQTVSKNVDLAIGAVTHCVRVMELVSRANQHLQSGNFYMALKCVDSIESDFMEKTPSSTLKRMLENRIPAIRSYVERKVNKEFGDWLVEIRVVSRNLGQLAIGEASAARQREEELRIKQRQAEEQSRLSLRDCVYALNEEEDDEFGSGHEGSDGGSSGGGLLGFDLTPLYRAYHIHQTLSLGDTFKQYYYNNRDLQLTSDFQIAGFFIVEDRVLRTGGGLISKLEVETLWDTAVTKMCAVLEDQFSRMQTANHLLLIKDYVSLLGVSLRRDKYHELLLSDCRKQITEALSADKFEQMLMKKEYEYSMNVLSFQLQTSEIVPAFPFIAPFSTTVPDCCRIVRSFIEDSVSFMSHGGQLDFYDVVKKYLDRLLGEVLDEALLKLISTSVHGVSQAMQVAANMAVFERACDFFFRHAAHLSGVPLRMAERGRRHFPLTKSQNTAEDTLSGMLKKKIDGFMTLLENVNWTSDDIPQGGNEYMNEVLIYLETLVSTAQQILPAKVLKRVLRDVLAHISEKIVGTLCGDLVKRLSMAAIKGLDVDIQLLDSFTENLTPLLTDKEAREMKKAFVEIRQMINLLLSSHPENFVNPVIRERSYNALDYRKVATVSEKFRDPSDSIFGTFGTRGSRQNPKNKSLDALIKRLKDVS

SEQ ID NO: 48645 - protein, 624 aa, Arabidopsis thaliana
  peptide (1)..(624): Ceres Seq. ID no. 13578850
  misc_feature (283)..(624): Pfam Name: Exocyst complex subunit Sec15-like Pfam Description: Exocyst complex subunit Sec15-like
  misc_feature (1)..(175): Homolog of NCBI NO: 24418657 NR Description: Exocyst complex component Sec15A (rSec15)
  misc_feature (249)..(621): Homolog of NCBI NO: 24418657 NR Description: Exocyst complex component Sec15A (rSec15)
  misc_feature (1)..(278): Homolog of NCBI NO: 34902596 NR Description: Unknown protein [Oryza sativa (japonica
  misc_feature (1)..(368): Homolog of NCBI NO: 37534338 NR Description: unknown protein [Oryza sativa (japonica
  misc_feature (1)..(280): Homolog of NCBI NO: 15228982 NR Description: hypothetical protein [Arabidopsis thaliana]
  misc_feature (181)..(624): Homolog of NCBI NO: 37534338 NR Description: unknown protein [Oryza sativa (japonica
  misc_feature (181)..(624): Homolog of NCBI NO: 34902596 NR Description: Unknown protein [Oryza sativa (japonica
  misc_feature (181)..(622): Homolog of NCBI NO: 15228982 NR Description: hypothetical protein [Arabidopsis thaliana]
  misc_feature (242)..(624): Homolog of NCBI NO: 34895194 NR Description: B1051E10.38 [Oryza sativa (japonica
  misc_feature (1)..(278): Homolog of NCBI NO: 34895194 NR Description: B1051E10.38 [Oryza sativa (japonica
MELVSRANQHLQSGNFYMALKCVDSIESDFMEKTPSSTLKRMLENRIPAIRSYVERKVNKEFGDWLVEIRVVSRNLGQLAIGEASAARQREEELRIKQRQAEEQSRLSLRDCVYALNEEEDDEFGSGHEGSDGGSSGGGLLGFDLTPLYRAYHIHQTLSLGDTFKQYYYNNRDLQLTSDFQIAGFFIVEDRVLRTGGGLISKLEVETLWDTAVTKMCAVLEDQFSRMQTANHLLLIKDYVSLLGVSLRRDKYHELLLSDCRKQITEALSADKFEQMLMKKEYEYSMNVLSFQLQTSEIVPAFPFIAPFSTTVPDCCRIVRSFIEDSVSFMSHGGQLDFYDVVKKYLDRLLGEVLDEALLKLISTSVHGVSQAMQVAANMAVFERACDFFFRHAAHLSGVPLRMAERGRRHFPLTKSQNTAEDTLSGMLKKKIDGFMTLLENVNWTSDDIPQGGNEYMNEVLIYLETLVSTAQQILPAKVLKRVLRDVLAHISEKIVGTLCGDLVKRLSMAAIKGLDVDIQLLDSFTENLTPLLTDKEAREMKKAFVEIRQMINLLLSSHPENFVNPVIRERSYNALDYRKVATVSEKFRDPSDSIFGTFGTRGSRQNPKNKSLDALIKRLKDVS

SEQ ID NO: 48646 - DNA, 2049 bp, Arabidopsis thaliana; identical to SEQ ID NO: 48182
  misc_feature (1)..(2049): Ceres Seq. ID no. 12575434
  misc_feature: MA Experiment ID: 20000180 Result: Up-regulated in Transcription
  misc_feature: MA Experiment 20000180 PARAMETER Experiment Name: At_Germinating_Seeds_P Parameter: Age (hr) Value: 24 vs. 0
  misc_feature: MA Experiment 20000180 PARAMETER Experiment Name: At_Germinating_Seeds_P Parameter: Tissue Value: Germinating Seeds
  misc_feature: MA Experiment ID: 20000184 Result: Down-regulated in Transcription
  misc_feature: MA Experiment 20000184 PARAMETER Experiment Name: At_Shoots__P Parameter: Age (day) Value: 7
  misc_feature: MA Experiment 20000184 PARAMETER Experiment Name: At_Shoots__P Parameter: Tissue Value: Shoots vs. Whole Plant
  misc_feature: MA Experiment ID: 20000185 Result: Down-regulated in Transcription
  misc_feature: MA Experiment 20000185 PARAMETER Experiment Name: At_Roots__P Parameter: Age (day) Value: 7 vs. 21
  misc_feature: MA Experiment 20000185 PARAMETER Experiment Name: At_Roots__P Parameter: Organism Value: A. thaliana
  misc_feature: MA Experiment 20000185 PARAMETER Experiment Name: At_Roots__P Parameter: Tissue Value: Roots vs. Whole Plant
  misc_feature: MA Experiment ID: 20000234 Result: Up-regulated in Transcription
  misc_feature: MA Experiment 20000234 PARAMETER Experiment Name: At_Siliques_P Parameter: Age (day) Value: 21
  misc_feature: MA Experiment 20000234 PARAMETER Experiment Name: At_Siliques_P Parameter: Organism Value: A. thaliana
  misc_feature: MA Experiment 20000234 PARAMETER Experiment Name: At_Siliques_P Parameter: Plant Line Value: WS
  misc_feature: MA Experiment 20000234 PARAMETER Experiment Name: At_Siliques_P Parameter: Tissue Value: Less Than 5mm Siliques vs. Whole Plant
  misc_feature: MA Experiment ID: 20000439 Result: Down-regulated in Transcription
  misc_feature: MA Experiment 20000439 PARAMETER Experiment Name: At_Roots__P Parameter: Age (day) Value: 14 vs. 21
  misc_feature: MA Experiment 20000439 PARAMETER Experiment Name: At_Roots__P Parameter: Organism Value: A. thaliana
  misc_feature: MA Experiment 20000439 PARAMETER Experiment Name: At_Roots__P Parameter: Tissue Value: Roots vs. Whole Plant
  misc_feature: MA Experiment ID: 20001248 Result: Down-regulated in Transcription
  misc_feature: MA Experiment 20001248 PARAMETER Experiment Name: At_Far-red-induction_P Parameter: Age (day) Value: 7
  misc_feature: MA Experiment 20001248 PARAMETER Experiment Name: At_Far-red-induction_P Parameter: Light Value: Far-red vs. White
  misc_feature: MA Experiment 20001248 PARAMETER Experiment Name: At_Far-red-induction_P Parameter: Organism Value: A. thaliana
  misc_feature: MA Experiment 20001248 PARAMETER Experiment Name: At_Far-red-induction_P Parameter: Plant Line Value: Columbia
  misc_feature: MA Experiment 20001248 PARAMETER Experiment Name: At_Far-red-induction_P Parameter: Timepoint (hr) Value: 4
  misc_feature: MA Experiment 20001248 PARAMETER Experiment Name: At_Far-red-induction_P Parameter: Tissue Value: Whole Plant
  misc_feature: MA Experiment ID: 20001450 Result: Down-regulated in Transcription
  misc_feature: MA Experiment 20001450 PARAMETER Experiment Name: At_Far-red-induction_P Parameter: Age (day) Value: 7
  misc_feature: MA Experiment 20001450 PARAMETER Experiment Name: At_Far-red-induction_P Parameter: Light Value: Far-red vs. White
  misc_feature: MA Experiment 20001450 PARAMETER Experiment Name: At_Far-red-induction_P Parameter: Organism Value: A. thaliana
  misc_feature: MA Experiment 20001450 PARAMETER Experiment Name: At_Far-red-induction_P Parameter: Plant Line Value: Columbia
  misc_feature: MA Experiment 20001450 PARAMETER Experiment Name: At_Far-red-induction_P Parameter: Timepoint (hr) Value: 8
  misc_feature: MA Experiment 20001450 PARAMETER Experiment Name: At_Far-red-induction_P Parameter: Tissue Value: Whole Plant
  misc_feature: MA Experiment ID: 20001557 Result: Down-regulated in Transcription
  misc_feature: MA Experiment 20001557 PARAMETER Experiment Name: At_Drought_Soil_Dry_P Parameter: Age (day) Value: 27
  misc_feature: MA Experiment 20001557 PARAMETER Experiment Name: At_Drought_Soil_Dry_P Parameter: Organism Value: A. thaliana
  misc_feature: MA Experiment 20001557 PARAMETER Experiment Name: At_Drought_Soil_Dry_P Parameter: Plant Line Value: WS
  misc_feature: MA Experiment 20001557 PARAMETER Experiment Name: At_Drought_Soil_Dry_P Parameter: Post Timepoint (hr) Value: 3
  misc_feature: MA Experiment 20001557 PARAMETER Experiment Name: At_Drought_Soil_Dry_P Parameter: Post-Treatment Value: Re-Water vs. No Drought
  misc_feature: MA Experiment 20001557 PARAMETER Experiment Name: At_Drought_Soil_Dry_P Parameter: Timepoint (day) Value: 13
  misc_feature: MA Experiment 20001557 PARAMETER Experiment Name: At_Drought_Soil_Dry_P Parameter: Treatment Value: Drought vs. No Drought
  misc_feature: MA Experiment ID: 20001905 Result: Down-regulated in Transcription
  misc_feature: MA Experiment 20001905 PARAMETER Experiment Name: At_Drought_Reproduction_P Parameter: Age (day) Value: 40
  misc_feature: MA Experiment 20001905 PARAMETER Experiment Name: At_Drought_Reproduction_P Parameter: Organism Value: A. thaliana
  misc_feature: MA Experiment 20001905 PARAMETER Experiment Name: At_Drought_Reproduction_P Parameter: Plant Line Value: WS
  misc_feature: MA Experiment 20001905 PARAMETER Experiment Name: At_Drought_Reproduction_P Parameter: Timepoint (day) Value: 10
  misc_feature: MA Experiment 20001905 PARAMETER Experiment Name: At_Drought_Reproduction_P Parameter: Tissue Value: Rosettes
  misc_feature: MA Experiment 20001905 PARAMETER Experiment Name: At_Drought_Reproduction_P Parameter: Treatment Value: Drought vs. No Drought
  misc_feature: MA Experiment ID: 20001906 Result: Down-regulated in Transcription
  misc_feature: MA Experiment 20001906 PARAMETER Experiment Name: At_Drought_Reproduction_P Parameter: Age (day) Value: 35
  misc_feature: MA Experiment 20001906 PARAMETER Experiment Name: At_Drought_Reproduction_P Parameter: Organism Value: A. thaliana
  misc_feature: MA Experiment 20001906 PARAMETER Experiment Name: At_Drought_Reproduction_P Parameter: Plant Line Value: WS
  misc_feature: MA Experiment 20001906 PARAMETER Experiment Name: At_Drought_Reproduction_P Parameter: Timepoint (day) Value: 5
  misc_feature: MA Experiment 20001906 PARAMETER Experiment Name: At_Drought_Reproduction_P Parameter: Tissue Value: Siliques
  misc_feature: MA Experiment 20001906 PARAMETER Experiment Name: At_Drought_Reproduction_P Parameter: Treatment Value: Drought vs. No Drought
  misc_feature: MA Experiment ID: 20001908 Result: Down-regulated in Transcription
  misc_feature: MA Experiment 20001908 PARAMETER Experiment Name: At_Drought_Reproduction_P Parameter: Age (day) Value: 40
  misc_feature: MA Experiment 20001908 PARAMETER Experiment Name: At_Drought_Reproduction_P Parameter: Organism Value: A. thaliana
  misc_feature: MA Experiment 20001908 PARAMETER Experiment Name: At_Drought_Reproduction_P Parameter: Plant Line Value: WS
  misc_feature: MA Experiment 20001908 PARAMETER Experiment Name: At_Drought_Reproduction_P Parameter: Timepoint (day) Value: 10
  misc_feature: MA Experiment 20001908 PARAMETER Experiment Name: At_Drought_Reproduction_P Parameter: Tissue Value: Siliques
  misc_feature: MA Experiment 20001908 PARAMETER Experiment Name: At_Drought_Reproduction_P Parameter: Treatment Value: Drought vs. No Drought

SEQ ID NO: 48647 - protein, 595 aa, Arabidopsis thaliana; identical to SEQ ID NO: 48183
  peptide (1)..(595): Ceres Seq. ID no. 12575435
  misc_feature (485)..(576): Homolog of NCBI NO: 18479135 NR Description: cytochrome P450 [Skeletonema costatum]
  misc_feature (118)..(508): Homolog of NCBI NO: 18479135 NR Description: cytochrome P450 [Skeletonema costatum]
  misc_feature (109)..(569): Homolog of NCBI NO: 40218379 NR Description: chloroplast carotenoid epsilon-ring hydroxylase
  misc_feature (109)..(569): Homolog of NCBI NO: 20258842 NR Description: putative cytochrome P450 [Arabidopsis thaliana]
  misc_feature (105)..(566): Homolog of NCBI NO: 37536604 NR Description: putative cytochrome P450 monooxygenase
  misc_feature (485)..(576): Homolog of NCBI NO: 18479135 NR Description: cytochrome P450 [Skeletonema costatum]
  misc_feature (118)..(508): Homolog of NCBI NO: 18479135 NR Description: cytochrome P450 [Skeletonema costatum]
  misc_feature (109)..(569): Homolog of NCBI NO: 40218379 NR Description: chloroplast carotenoid epsilon-ring hydroxylase
  misc_feature (109)..(569): Homolog of NCBI NO: 20258842 NR Description: putative cytochrome P450 [Arabidopsis thaliana]
  misc_feature (105)..(566): Homolog of NCBI NO: 37536604 NR Description: putative cytochrome P450 monooxygenase

SEQ ID NO: 48648 - protein, 593 aa, Arabidopsis thaliana; identical to SEQ ID NO: 48184
  peptide (1)..(593): Ceres Seq. ID no. 12575436
  misc_feature (483)..(574): Homolog of NCBI NO: 18479135 NR Description: cytochrome P450 [Skeletonema costatum]
  misc_feature (116)..(506): Homolog of NCBI NO: 18479135 NR Description: cytochrome P450 [Skeletonema costatum]
  misc_feature (107)..(567): Homolog of NCBI NO: 40218379 NR Description: chloroplast carotenoid epsilon-ring hydroxylase
  misc_feature (107)..(567): Homolog of NCBI NO: 20258842 NR Description: putative cytochrome P450 [Arabidopsis thaliana]
  misc_feature (103)..(564): Homolog of NCBI NO: 37536604 NR Description: putative cytochrome P450 monooxygenase
  misc_feature (483)..(574): Homolog of NCBI NO: 18479135 NR Description: cytochrome P450 [Skeletonema costatum]
  misc_feature (116)..(506): Homolog of NCBI NO: 18479135 NR Description: cytochrome P450 [Skeletonema costatum]
  misc_feature (107)..(567): Homolog of NCBI NO: 40218379 NR Description: chloroplast carotenoid epsilon-ring hydroxylase
  misc_feature (107)..(567): Homolog of NCBI NO: 20258842 NR Description: putative cytochrome P450 [Arabidopsis thaliana]
  misc_feature (103)..(564): Homolog of NCBI NO: 37536604 NR Description: putative cytochrome P450 monooxygenase

SEQ ID NO: 48649 - protein, 496 aa, Arabidopsis thaliana; identical to SEQ ID NO: 48185
  peptide (1)..(496): Ceres Seq. ID no. 12575437
  misc_feature (386)..(477): Homolog of NCBI NO: 18479135 NR Description: cytochrome P450 [Skeletonema costatum]
  misc_feature (19)..(409): Homolog of NCBI NO: 18479135 NR Description: cytochrome P450 [Skeletonema costatum]
  misc_feature (10)..(470): Homolog of NCBI NO: 40218379 NR Description: chloroplast carotenoid epsilon-ring hydroxylase
  misc_feature (10)..(470): Homolog of NCBI NO: 20258842 NR Description: putative cytochrome P450 [Arabidopsis thaliana]
  misc_feature (6)..(467): Homolog of NCBI NO: 37536604 NR Description: putative cytochrome P450 monooxygenase
  misc_feature (386)..(477): Homolog of NCBI NO: 18479135 NR Description: cytochrome P450 [Skeletonema costatum]
  misc_feature (19)..(409): Homolog of NCBI NO: 18479135 NR Description: cytochrome P450 [Skeletonema costatum]
  misc_feature (10)..(470): Homolog of NCBI NO: 40218379 NR Description: chloroplast carotenoid epsilon-ring hydroxylase
  misc_feature (10)..(470): Homolog of NCBI NO: 20258842 NR Description: putative cytochrome P450 [Arabidopsis thaliana]
  misc_feature (6)..(467): Homolog of NCBI NO: 37536604 NR Description: putative cytochrome P450 monooxygenase

SEQ ID NO: 48650 - DNA, 1677 bp, Arabidopsis thaliana
  misc_feature (1)..(1677): Ceres Seq. ID no. 13618556
  misc_feature: MA Experiment ID: 20000307 Result: Up-regulated in Transcription
  misc_feature: MA Experiment 20000307 PARAMETER Experiment Name: At_Germinating_Seeds_Sub_P Parameter: Age (hr) Value: 24 vs. 0
  misc_feature: MA Experiment 20000307 PARAMETER Experiment Name: At_Germinating_Seeds_Sub_P Parameter: Organism Value: A. thaliana
  misc_feature: MA Experiment 20000307 PARAMETER Experiment Name: At_Germinating_Seeds_Sub_P Parameter: Plant Line Value: WS
  misc_feature: MA Experiment 20000307 PARAMETER Experiment Name: At_Germinating_Seeds_Sub_P Parameter: Tissue Value: Germinating Seeds
ccaactacgttcacagagagactcataaaccataactctctctccctctctctctgctcgaatcgaaccgttcccaggagctgctttgatttggtttatcgttgatctgtgaaaatggggacgaatgatctcgacatcgaagaagggactctggagatcggcatggagtatagaactgtttctggtgttgctggaccattggtcattcttgacaaagtgaagggtccaaagtaccaggagattgttaatattcgcttaggagatggatcaacgagacgtggtcaggttttggaagttgatggcgagaaagcagttgtgcaggtttttgaaggaacatctggaattgacaacaagtttacaaccgtgcaattcacaggagaggttttgaaaacacctgtatcattggacatgcttgggcgcatatttaacggttcaggaaagccgattgataatggccctcctattctgccagaagcataccttgatatttcaggaagttcaatcaaccccagtgaaagaacctatcctgaagagatgatacagacaggcatatcgaccatcgatgtcatgaattccattgctcgtggacagaagattccacttttctctgctgctggtcttccacataatgaaatagctgctcagatttgtcgtcaggctggtctagtcaagcgtttggaaaagactgttgatctacttgaggatcatggagaggacaattttgcaattgtgtttgcagctatgggtgtgaacatggagacagctcagttcttcaagcgagattttgaagaaaatggatcaatggagagagttactcttttcctgaacctggtaaatttgacttctatagctgattgccatatcatggagttttttcaagtatttagatgtttcttagctttaaacagatttaaccttcctttattccaacaggccaatgacccaaccattgagagaatcatcactcctcgaattgccctcacaacagctgaatatctggcttatgaatgtgggaaacacgtccttgttatattgacggatatgagttcttatgctgatgctcttcgtgaggtttccgctgcccgagaagaggttcccggaagacgtggatatccaggttatatgtacactgatcttgcaactatttatgaacgtgctgggcgtatagaaggaagaaaaggttccatcacccaaattccaatcctcactatgcccaatgacgatatcactcatccaactccggatcttactggttacattactgaaggtcagatatatatcgataggcaacttcacaacagacagatatatccacccatcaacgtgcttccatccctttctcgtttaatgaagagtgctatcggcgagggcatgactcgtaaagaccattctgatgtgtcgaaccagctgtatgcaaattatgcaatcgggaaagatgttcaagcgatgaaagctgttgttggagaagaagcactttcttcagaggatttgctttatctagagtttttggataagtttgagaggaagtttgtgatgcaaggagcttatgatacacgcaacatcttccagtcgctggacttagcttggacattgctccgtatcttcccacgggagcttcttcatcgtatccctgcaaagacacttgaccaattctacagccgcgactcaaccagttaa

SEQ ID NO: 48651 - protein, 520 aa, Arabidopsis thaliana
  peptide (1)..(520): Ceres Seq. ID no. 13618557
  misc_feature (274)..(415): Pfam Name: ATP synthase alpha/beta family, Pfam Description: ATP synthase alpha/beta family,
  misc_feature (274)..(518): Homolog of NCBI NO: 2493129 NR Description: Vacuolar ATP synthase subunit B isoform 1
  misc_feature (1)..(241): Homolog of NCBI NO: 15233891 NR Description: probable H+-transporting ATPase [Arabidopsis
  misc_feature (274)..(520): Homolog of NCBI NO: 15233891 NR Description: probable H+-transporting ATPase [Arabidopsis
  misc_feature (1)..(241): Homolog of NCBI NO: 17065080 NR Description: Unknown protein [Arabidopsis thaliana]
  misc_feature (274)..(520): Homolog of NCBI NO: 17065080 NR Description: Unknown protein [Arabidopsis thaliana]
  misc_feature (1)..(241): Homolog of NCBI NO: 15222929 NR Description: vacuolar ATP synthase subunit B [Arabidopsis
  misc_feature (274)..(520): Homolog of NCBI NO: 15222929 NR Description: vacuolar ATP synthase subunit B [Arabidopsis
  misc_feature (1)..(241): Homolog of NCBI NO: 81637 NR Description: H+-exporting ATPase (EC 3.6.3.6) 57K chain -
  misc_feature (274)..(520): Homolog of NCBI NO: 81637 NR Description: H+-exporting ATPase (EC 3.6.3.6) 57K chain -
  misc_feature (1)..(520): Homolog of NCBI NO: 25290419 NR Description: protein T4O12.24 [imported] - Arabidopsis
MGTNDLDIEEGTLEIGMEYRTVSGVAGPLVILDKVKGPKYQEIVNIRLGDGSTRRGQVLEVDGEKAVVQVFEGTSGIDNKFTTVQFTGEVLKTPVSLDMLGRIFNGSGKPIDNGPPILPEAYLDISGSSINPSERTYPEEMIQTGISTIDVMNSIARGQKIPLFSAAGLPHNEIAAQICRQAGLVKRLEKTVDLLEDHGEDNFAIVFAAMGVNMETAQFFKRDFEENGSMERVTLFLNLVNLTSIADCHIMEFFQVFRCFLALNRFNLPLFQQANDPTIERIITPRIALTTAEYLAYECGKHVLVILTDMSSYADALREVSAAREEVPGRRGYPGYMYTDLATIYERAGRIEGRKGSITQIPILTMPNDDITHPTPDLTGYITEGQIYIDRQLHNRQIYPPINVLPSLSRLMKSAIGEGMTRKDHSDVSNQLYANYAIGKDVQAMKAVVGEEALSSEDLLYLEFLDKFERKFVMQGAYDTRNIFQSLDLAWTLLRIFPRELLHRIPAKTLDQFYSRDSTS

SEQ ID NO: 48652 - protein, 504 aa, Arabidopsis thaliana
  peptide (1)..(504): Ceres Seq. ID no. 13618558
  misc_feature (258)..(399): Pfam Name: ATP synthase alpha/beta family, Pfam Description: ATP synthase alpha/beta family,
  misc_feature (258)..(502): Homolog of NCBI NO: 2493129 NR Description: Vacuolar ATP synthase subunit B isoform 1
  misc_feature (1)..(225): Homolog of NCBI NO: 15233891 NR Description: probable H+-transporting ATPase [Arabidopsis
  misc_feature (258)..(504): Homolog of NCBI NO: 15233891 NR Description: probable H+-transporting ATPase [Arabidopsis
  misc_feature (1)..(225): Homolog of NCBI NO: 17065080 NR Description: Unknown protein [Arabidopsis thaliana]
  misc_feature (258)..(504): Homolog of NCBI NO: 17065080 NR Description: Unknown protein [Arabidopsis thaliana]
  misc_feature (1)..(225): Homolog of NCBI NO: 15222929 NR Description: vacuolar ATP synthase subunit B [Arabidopsis
  misc_feature (258)..(504): Homolog of NCBI NO: 15222929 NR Description: vacuolar ATP synthase subunit B [Arabidopsis
  misc_feature (1)..(225): Homolog of NCBI NO: 81637 NR Description: H+-exporting ATPase (EC 3.6.3.6) 57K chain -
  misc_feature (258)..(504): Homolog of NCBI NO: 81637 NR Description: H+-exporting ATPase (EC 3.6.3.6) 57K chain -
  misc_feature (1)..(504): Homolog of NCBI NO: 25290419 NR Description: protein T4O12.24 [imported] - Arabidopsis
MEYRTVSGVAGPLVILDKVKGPKYQEIVNIRLGDGSTRRGQVLEVDGEKAVVQVFEGTSGIDNKFTTVQFTGEVLKTPVSLDMLGRIFNGSGKPIDNGPPILPEAYLDISGSSINPSERTYPEEMIQTGISTIDVMNSIARGQKIPLFSAAGLPHNEIAAQICRQAGLVKRLEKTVDLLEDHGEDNFAIVFAAMGVNMETAQFFKRDFEENGSMERVTLFLNLVNLTSIADCHIMEFFQVFRCFLALNRFNLPLFQQANDPTIERIITPRIALTTAEYLAYECGKHVLVILTDMSSYADALREVSAAREEVPGRRGYPGYMYTDLATIYERAGRIEGRKGSITQIPILTMPNDDITHPTPDLTGYITEGQIYIDRQLHNRQIYPPINVLPSLSRLMKSAIGEGMTRKDHSDVSNQLYANYAIGKDVQAMKAVVGEEALSSEDLLYLEFLDKFERKFVMQGAYDTRNIFQSLDLAWTLLRIFPRELLHRIPAKTLDQFYSRDSTS

SEQ ID NO: 48653 - protein, 422 aa, Arabidopsis thaliana
  peptide (1)..(422): Ceres Seq. ID no. 13618559
  misc_feature (176)..(317): Pfam Name: ATP synthase alpha/beta family, Pfam Description: ATP synthase alpha/beta family,
  misc_feature (176)..(420): Homolog of NCBI NO: 2493129 NR Description: Vacuolar ATP synthase subunit B isoform 1
  misc_feature (1)..(143): Homolog of NCBI NO: 15233891 NR Description: probable H+-transporting ATPase [Arabidopsis
  misc_feature (176)..(422): Homolog of NCBI NO: 15233891 NR Description: probable H+-transporting ATPase [Arabidopsis
  misc_feature (1)..(143): Homolog of NCBI NO: 17065080 NR Description: Unknown protein [Arabidopsis thaliana]
  misc_feature (176)..(422): Homolog of NCBI NO: 17065080 NR Description: Unknown protein [Arabidopsis thaliana]
  misc_feature (1)..(143): Homolog of NCBI NO: 15222929 NR Description: vacuolar ATP synthase subunit B [Arabidopsis
  misc_feature (176)..(422): Homolog of NCBI NO: 15222929 NR Description: vacuolar ATP synthase subunit B [Arabidopsis
  misc_feature (1)..(143): Homolog of NCBI NO: 81637 NR Description: H+-exporting ATPase (EC 3.6.3.6) 57K chain -
  misc_feature (176)..(422): Homolog of NCBI NO: 81637 NR Description: H+-exporting ATPase (EC 3.6.3.6) 57K chain -
  misc_feature (1)..(422): Homolog of NCBI NO: 25290419 NR Description: protein T4O12.24 [imported] - Arabidopsis
MLGRIFNGSGKPIDNGPPILPEAYLDISGSSINPSERTYPEEMIQTGISTIDVMNSIARGQKIPLFSAAGLPHNEIAAQICRQAGLVKRLEKTVDLLEDHGEDNFAIVFAAMGVNMETAQFFKRDFEENGSMERVTLFLNLVNLTSIADCHIMEFFQVFRCFLALNRFNLPLFQQANDPTIERIITPRIALTTAEYLAYECGKHVLVILTDMSSYADALREVSAAREEVPGRRGYPGYMYTDLATIYERAGRIEGRKGSITQIPILTMPNDDITHPTPDLTGYITEGQIYIDRQLHNRQIYPPINVLPSLSRLMKSAIGEGMTRKDHSDVSNQLYANYAIGKDVQAMKAVVGEEALSSEDLLYLEFLDKFERKFVMQGAYDTRNIFQSLDLAWTLLRIFPRELLHRIPAKTLDQFYSRDSTS

SEQ ID NO: 48654 - DNA, 2564 bp, Arabidopsis thaliana
  misc_feature (1)..(2564): Ceres Seq. ID no. 12601257
  misc_feature: MA Experiment ID: 20000314 Result: Up-regulated in Transcription
  misc_feature: MA Experiment 20000314 PARAMETER Experiment Name: At_14day_Shoots-Roots_Sub_P Parameter: Age (day) Value: 14
  misc_feature: MA Experiment 20000314 PARAMETER Experiment Name: At_14day_Shoots-Roots_Sub_P Parameter: Organism Value: A. thaliana
  misc_feature: MA Experiment 20000314 PARAMETER Experiment Name: At_14day_Shoots-Roots_Sub_P Parameter: Plant Line Value: WS
  misc_feature: MA Experiment 20000314 PARAMETER Experiment Name: At_14day_Shoots-Roots_Sub_P Parameter: Tissue Value: Roots vs. Whole Plant
gagagattccttctctctactcttttctctctctgtctctcactttcttcaaatttcaaatattttgcgtctgaatcacaccgcgtccaccaaatcctccatctccatctcttaaaatccgattctttcctccgcaaatctcgattactccaacaccctttttctctaagattccaaaccttttaggttttttgttgcagccacttgtgaattgtatggtggtcaaaatgaaacagatcatgcgttggccaccgtggcctccgctcttcgccgttaaattcgacgtgatcgtcgttgttcaccagatggatggtttgttggattccgatggtggtggcgatgatagtactgatcagagtcagcgaggaggagggacaacaacgaggaagagacctgttgttgagatcaaatggaaaggacctaaatcggttactctcaaacgctccgtcgtacggaatctcaccgaagaaggtggatttcgcggcgatggcgtcgttgaatggaacgaagagtttaagagggtttgcgaattctctgtttacaaggaaggatcgtttcttccttggttcgtttctttaaccgtcttcagtggactgaatcaaggatcgaaggagaaagttcgtagctttggaaaggcatcactgaacattgcagaatacttttcattgatgaaagaagatgatgttcaagtcaaagtgcctctcaaggattgtgactcatcatctgtgagaagtccacatgttcatatatcccttcagttttctcctaaagaatcgttgcctgaaagacagaggtctgctcttcctgttctatggtctcctctttccgcagaggctgagaaagctgagtctgttgttaaagtaggcctgagaaagatgaagaccttcaacaattgcatgtctagtacacaggcatcggaaaaggagagtgagaaagatggaagcagtggaagcggaagtgacggcaaaagtccggagagaaatcttgattctgactctagttatccttttgatacagattctttagatgaaggtgatgctgcagatgaatcagaagagaacaaagagaatgaaagtagcttagctgatccagttaattacaaaacacttcgttctgctaattgggctagaggctcatttcatactgttacaaaccccgaagacgaggatttgatatattacagtcaccgcagtccattagcagagacaggacattgcagtgatgaggtttccaatgatgtagtaagcttggagcaggcgaaaggacaaatgtctaagaagagaatgttatcttggaagaagagaaaacttagttttagatctcctaaacagaaaggcgagcctcttcttaagaaggattgtcttgaagaaggaggtgatgatatcgattttgaccgcagacaactaagttcatccgatgagtctaactctgattggtataggtctgatgatgcaatcatgaaaccattatcccagtttggagatgatgatttcgttgttggtagctgggagaccaaagagattataagccgtgatgggctgatgaaactcacggctcgagtatttctcgcatcaattgatcagagaagcgagagagctgctggagaaagcgcctgcacagctctagttgcagtgatggcacattggttaggatccaacagagacataatcccaacaaggtcagagtttgacagtcttatcagagaaggatcatccgagtggagaaatatgtgtgaaaacgaggaataccgggaacggtttccagacaaacatttcgatctcgagacggttctccaggcaaaagtcagacccatctgtgtagtccctgaaagatcattcatcgggtttttccatccagagaaatcagaggaagaagaaggaaaagaagatgctagtctagattttctcaaaggtgtaatgtcctttgacagtatctgggaagagctcatgaaacaagaaccagaagagtcggcaagcgaacctgtgatctacattgtaagctggaatgatcatttctttgtactccttgtgaaccacgatgcttattacatcatagacacgcttggagagaggctctatgagggttgcaaccaagcgtatgtcttgaaatttgacaaagatgcagagatcaaaagattaccatccgtcatcaaagacaacaaagccgacatgggaaaccagaaacaaggtggtaagaacaagtctgagcaacccgaaagatcaaaagaatcagaagaacaagaagaagaagaagtagtgtgtagaggtaaagagtcatgtagagagtatataaagagctttctcgcagcgattccaatacagcaagtgaaagctgatatgaagaaaggactggtttcatctttgcatcaccgtcttcaaatagagcttcactacacgaaacaccttcatcaccaccaacctaatatgtttgaatcctctgcaaccgaagtaactgtgtcagaagctgctgtgtctgtgacagtggcttggtcattggcgagccaattcagcaatagtggtgggtttagttgcgaaatggctgagcttttgggggttaaagtttaa

SEQ ID NO: 48655 - protein, 782 aa, Arabidopsis thaliana
  peptide (1)..(782): Ceres Seq. ID no. 12601258
  misc_feature (61)..(190): Homolog of NCBI NO: 18400834 NR Description: expressed protein
  misc_feature (61)..(190): Homolog of NCBI NO: 17063176 NR Description: SYNC1 protein [Arabidopsis thaliana]
  misc_feature (395)..(577): Homolog of NCBI NO: 18400834 NR Description: expressed protein
  misc_feature (395)..(577): Homolog of NCBI NO: 17063176 NR Description: SYNC1 protein [Arabidopsis thaliana]
  misc_feature (673)..(726): Homolog of NCBI NO: 25412320 NR Description: hypothetical protein At2g25460 [imported] -
  misc_feature (395)..(633): Homolog of NCBI NO: 25412320 NR Description: hypothetical protein At2g25460 [imported] -
  misc_feature (672)..(727): Homolog of NCBI NO: 34903512 NR Description: P0001B06.8 [Oryza sativa (japonica
  misc_feature (394)..(639): Homolog of NCBI NO: 34903512 NR Description: P0001B06.8 [Oryza sativa (japonica
  misc_feature (1)..(698): Homolog of NCBI NO: 15229852 NR Description: unknown protein; protein id: At3g11760.1
  misc_feature (505)..(782): Homolog of NCBI NO: 15226799 NR Description: unknown protein; protein id: At2g10560.1
MVVKMKQIMRWPPWPPLFAVKFDVIVVVHQMDGLLDSDGGGDDSTDQSQRGGGTTTRKRPVVEIKWKGPKSVTLKRSVVRNLTEEGGFRGDGVVEWNEEFKRVCEFSVYKEGSFLPWFVSLTVFSGLNQGSKEKVRSFGKASLNIAEYFSLMKEDDVQVKVPLKDCDSSSVRSPHVHISLQFSPKESLPERQRSALPVLWSPLSAEAEKAESVVKVGLRKMKTFNNCMSSTQASEKESEKDGSSGSGSDGKSPERNLDSDSSYPFDTDSLDEGDAADESEENKENESSLADPVNYKTLRSANWARGSFHTVTNPEDEDLIYYSHRSPLAETGHCSDEVSNDVVSLEQAKGQMSKKRMLSWKKRKLSFRSPKQKGEPLLKKDCLEEGGDDIDFDRRQLSSSDESNSDWYRSDDAIMKPLSQFGDDDFVVGSWETKEIISRDGLMKLTARVFLASIDQRSERAAGESACTALVAVMAHWLGSNRDIIPTRSEFDSLIREGSSEWRNMCENEEYRERFPDKHFDLETVLQAKVRPICVVPERSFIGFFHPEKSEEEEGKEDASLDFLKGVMSFDSIWEELMKQEPEESASEPVIYIVSWNDHFFVLLVNHDAYYIIDTLGERLYEGCNQAYVLKFDKDAEIKRLPSVIKDNKADMGNQKQGGKNKSEQPERSKESEEQEEEEVVCRGKESCREYIKSFLAAIPIQQVKADMKKGLVSSLHHRLQIELHYTKHLHHHQPNMFESSATEVTVSEAAVSVTVAWSLASQFSNSGGFSCEMAELLGVKV

SEQ ID NO: 48656 - protein, 778 aa, Arabidopsis thaliana
  peptide (1)..(778): Ceres Seq. ID no. 12601259
  misc_feature (57)..(186): Homolog of NCBI NO: 18400834 NR Description: expressed protein
  misc_feature (57)..(186): Homolog of NCBI NO: 17063176 NR Description: SYNC1 protein [Arabidopsis thaliana]
  misc_feature (391)..(573): Homolog of NCBI NO: 18400834 NR Description: expressed protein
  misc_feature (391)..(573): Homolog of NCBI NO: 17063176 NR Description: SYNC1 protein [Arabidopsis thaliana]
  misc_feature (669)..(722): Homolog of NCBI NO: 25412320 NR Description: hypothetical protein At2g25460 [imported] -
  misc_feature (391)..(629): Homolog of NCBI NO: 25412320 NR Description: hypothetical protein At2g25460 [imported] -
  misc_feature (668)..(723): Homolog of NCBI NO: 34903512 NR Description: P0001B06.8 [Oryza sativa (japonica
  misc_feature (390)..(635): Homolog of NCBI NO: 34903512 NR Description: P0001B06.8 [Oryza sativa (japonica
  misc_feature (1)..(694): Homolog of NCBI NO: 15229852 NR Description: unknown protein; protein id: At3g11760.1
  misc_feature (501)..(778): Homolog of NCBI NO: 15226799 NR Description: unknown protein; protein id: At2g10560.1
MKQIMRWPPWPPLFAVKFDVIVVVHQMDGLLDSDGGGDDSTDQSQRGGGTTTRKRPVVEIKWKGPKSVTLKRSVVRNLTEEGGFRGDGVVEWNEEFKRVCEFSVYKEGSFLPWFVSLTVFSGLNQGSKEKVRSFGKASLNIAEYFSLMKEDDVQVKVPLKDCDSSSVRSPHVHISLQFSPKESLPERQRSALPVLWSPLSAEAEKAESVVKVGLRKMKTFNNCMSSTQASEKESEKDGSSGSGSDGKSPERNLDSDSSYPFDTDSLDEGDAADESEENKENESSLADPVNYKTLRSANWARGSFHTVTNPEDEDLIYYSHRSPLAETGHCSDEVSNDVVSLEQAKGQMSKKRMLSWKKRKLSFRSPKQKGEPLLKKDCLEEGGDDIDFDRRQLSSSDESNSDWYRSDDAIMKPLSQFGDDDFVVGSWETKEIISRDGLMKLTARVFLASIDQRSERAAGESACTALVAVMAHWLGSNRDIIPTRSEFDSLIREGSSEWRNMCENEEYRERFPDKHFDLETVLQAKVRPICVVPERSFIGFFHPEKSEEEEGKEDASLDFLKGVMSFDSIWEELMKQEPEESASEPVIYIVSWNDHFFVLLVNHDAYYIIDTLGERLYEGCNQAYVLKFDKDAEIKRLPSVIKDNKADMGNQKQGGKNKSEQPERSKESEEQEEEEVVCRGKESCREYIKSFLAAIPIQQVKADMKKGLVSSLHHRLQIELHYTKHLHHHQPNMFESSATEVTVSEAAVSVTVAWSLASQFSNSGGFSCEMAELLGVKV

SEQ ID NO: 48657 - protein, 774 aa, Arabidopsis thaliana
  peptide (1)..(774): Ceres Seq. ID no. 12601260
  misc_feature (53)..(182): Homolog of NCBI NO: 18400834 NR Description: expressed protein
  misc_feature (53)..(182): Homolog of NCBI NO: 17063176 NR Description: SYNC1 protein [Arabidopsis thaliana]
  misc_feature (387)..(569): Homolog of NCBI NO: 18400834 NR Description: expressed protein
  misc_feature (387)..(569): Homolog of NCBI NO: 17063176 NR Description: SYNC1 protein [Arabidopsis thaliana]
  misc_feature (665)..(718): Homolog of NCBI NO: 25412320 NR Description: hypothetical protein At2g25460 [imported] -
  misc_feature (387)..(625): Homolog of NCBI NO: 25412320 NR Description: hypothetical protein At2g25460 [imported] -
  misc_feature (664)..(719): Homolog of NCBI NO: 34903512 NR Description: P0001B06.8 [Oryza sativa (japonica
  misc_feature (386)..(631): Homolog of NCBI NO: 34903512 NR Description: P0001B06.8 [Oryza sativa (japonica
  misc_feature (1)..(690): Homolog of NCBI NO: 15229852 NR Description: unknown protein; protein id: At3g11760.1
  misc_feature (497)..(774): Homolog of NCBI NO: 15226799 NR Description: unknown protein; protein id: At2g10560.1
MRWPPWPPLFAVKFDVIVVVHQMDGLLDSDGGGDDSTDQSQRGGGTTTRKRPVVEIKWKGPKSVTLKRSVVRNLTEEGGFRGDGVVEWNEEFKRVCEFSVYKEGSFLPWFVSLTVFSGLNQGSKEKVRSFGKASLNIAEYFSLMKEDDVQVKVPLKDCDSSSVRSPHVHISLQFSPKESLPERQRSALPVLWSPLSAEAEKAESVVKVGLRKMKTFNNCMSSTQASEKESEKDGSSGSGSDGKSPERNLDSDSSYPFDTDSLDEGDAADESEENKENESSLADPVNYKTLRSANWARGSFHTVTNPEDEDLIYYSHRSPLAETGHCSDEVSNDVVSLEQAKGQMSKKRMLSWKKRKLSFRSPKQKGEPLLKKDCLEEGGDDIDFDRRQLSSSDESNSDWYRSDDAIMKPLSQFGDDDFVVGSWETKEIISRDGLMKLTARVFLASIDQRSERAAGESACTALVAVMAHWLGSNRDIIPTRSEFDSLIREGSSEWRNMCENEEYRERFPDKHFDLETVLQAKVRPICVVPERSFIGFFHPEKSEEEEGKEDASLDFLKGVMSFDSIWEELMKQEPEESASEPVIYIVSWNDHFFVLLVNHDAYYIIDTLGERLYEGCNQAYVLKFDKDAEIKRLPSVIKDNKADMGNQKQGGKNKSEQPERSKESEEQEEEEVVCRGKESCREYIKSFLAAIPIQQVKADMKKGLVSSLHHRLQIELHYTKHLHHHQPNMFESSATEVTVSEAAVSVTVAWSLASQFSNSGGFSCEMAELLGVKV

SEQ ID NO: 48658 - DNA, 2078 bp, Arabidopsis thaliana; identical to SEQ ID NO: 47217
  misc_feature (1)..(2078): Ceres Seq. ID no. 12601002
  misc_feature: MA Experiment ID: 20000173 Result: Up-regulated in Transcription
  misc_feature: MA Experiment 20000173 PARAMETER Experiment Name: At_42deg_Heat_P Parameter: Age (day) Value: 14
  misc_feature: MA Experiment 20000173 PARAMETER Experiment Name: At_42deg_Heat_P Parameter: Organism Value: A. thaliana
  misc_feature: MA Experiment 20000173 PARAMETER Experiment Name: At_42deg_Heat_P Parameter: Plant Line Value: WS
  misc_feature: MA Experiment 20000173 PARAMETER Experiment Name: At_42deg_Heat_P Parameter: Temperature (deg C) Value: 42 vs. 22
  misc_feature: MA Experiment 20000173 PARAMETER Experiment Name: At_42deg_Heat_P Parameter: Timepoint (hr) Value: 6
  misc_feature: MA Experiment 20000173 PARAMETER Experiment Name: At_42deg_Heat_P Parameter: Tissue Value: Aerial
  misc_feature: MA Experiment ID: 20000438 Result: Up-regulated in Transcription
  misc_feature: MA Experiment 20000438 PARAMETER Experiment Name: At_Shoots__P Parameter: Age (day) Value: 14
  misc_feature: MA Experiment 20000438 PARAMETER Experiment Name: At_Shoots__P Parameter: Tissue Value: Shoots vs. Whole Plant
  misc_feature: MA Experiment ID: 20000441 Result: Up-regulated in Transcription
  misc_feature: MA Experiment 20000441 PARAMETER Experiment Name: At_1uM_BR-BRZ__P Parameter: Tissue Value: Shoot Apices
  misc_feature: MA Experiment 20000441 PARAMETER Experiment Name: At_1uM_BR-BRZ__P Parameter: Treatment Value: 1uM BR vs. No Treatment
  misc_feature: MA Experiment ID: 20000443 Result: Up-regulated in Transcription
  misc_feature: MA Experiment 20000443 PARAMETER Experiment Name: At_1uM_BR-BRZ__P Parameter: Tissue Value: Shoot Apices
  misc_feature: MA Experiment 20000443 PARAMETER Experiment Name: At_1uM_BR-BRZ__P Parameter: Treatment Value: 1uM BRZ vs. No Treatment
  misc_feature: MA Experiment ID: 20000460 Result: Down-regulated in Transcription
  misc_feature: MA Experiment 20000460 PARAMETER Experiment Name: At_10percent_PEG_P Parameter: Age (day) Value: 12
  misc_feature: MA Experiment 20000460 PARAMETER Experiment Name: At_10percent_PEG_P Parameter: Organism Value: A. thaliana
  misc_feature: MA Experiment 20000460 PARAMETER Experiment Name: At_10percent_PEG_P Parameter: Plant Line Value: WS
  misc_feature: MA Experiment 20000460 PARAMETER Experiment Name: At_10percent_PEG_P Parameter: Timepoint (day) Value: 12
  misc_feature: MA Experiment 20000460 PARAMETER Experiment Name: At_10percent_PEG_P Parameter: Tissue Value: Whole Plant
  misc_feature: MA Experiment 20000460 PARAMETER Experiment Name: At_10percent_PEG_P Parameter: Treatment Value: 10percent PEG vs. No Treatment
  misc_feature: MA Experiment ID: 20000574 Result: Down-regulated in Transcription
  misc_feature: MA Experiment 20000574 PARAMETER Experiment Name: At_100uM_ABA_Mutants__P Parameter: Organism Value: A. thaliana
  misc_feature: MA Experiment 20000574 PARAMETER Experiment Name: At_100uM_ABA_Mutants__P Parameter: Plant Line Value: CS23 vs. Ler wt
  misc_feature: MA Experiment 20000574 PARAMETER Experiment Name: At_100uM_ABA_Mutants__P Parameter: Timepoint (hr) Value: N/A
  misc_feature: MA Experiment 20000574 PARAMETER Experiment Name: At_100uM_ABA_Mutants__P Parameter: Tissue Value: Whole Plant
  misc_feature: MA Experiment 20000574 PARAMETER Experiment Name: At_100uM_ABA_Mutants__P Parameter: Treatment Value: None
  misc_feature: MA Experiment ID: 20001247 Result: Down-regulated in Transcription
  misc_feature: MA Experiment 20001247 PARAMETER Experiment Name: At_Far-red-induction_P Parameter: Age (day) Value: 7
  misc_feature: MA Experiment 20001247 PARAMETER Experiment Name: At_Far-red-induction_P Parameter: Light Value: Far-red vs. White
  misc_feature: MA Experiment 20001247 PARAMETER Experiment Name: At_Far-red-induction_P Parameter: Organism Value: A. thaliana
  misc_feature: MA Experiment 20001247 PARAMETER Experiment Name: At_Far-red-induction_P Parameter: Plant Line Value: Columbia
  misc_feature: MA Experiment 20001247 PARAMETER Experiment Name: At_Far-red-induction_P Parameter: Timepoint (hr) Value: 1
  misc_feature: MA Experiment 20001247 PARAMETER Experiment Name: At_Far-red-induction_P Parameter: Tissue Value: Whole Plant
  misc_feature: MA Experiment ID: 20001248 Result: Down-regulated in Transcription
  misc_feature: MA Experiment 20001248 PARAMETER Experiment Name: At_Far-red-induction_P Parameter: Age (day) Value: 7
  misc_feature: MA Experiment 20001248 PARAMETER Experiment Name: At_Far-red-induction_P Parameter: Light Value: Far-red vs. White
  misc_feature: MA Experiment 20001248 PARAMETER Experiment Name: At_Far-red-induction_P Parameter: Organism Value: A. thaliana
  misc_feature: MA Experiment 20001248 PARAMETER Experiment Name: At_Far-red-induction_P Parameter: Plant Line Value: Columbia
  misc_feature: MA Experiment 20001248 PARAMETER Experiment Name: At_Far-red-induction_P Parameter: Timepoint (hr) Value: 4
  misc_feature: MA Experiment 20001248 PARAMETER Experiment Name: At_Far-red-induction_P Parameter: Tissue Value: Whole Plant
  misc_feature: MA Experiment ID: 20001560 Result: Down-regulated in Transcription
  misc_feature: MA Experiment 20001560 PARAMETER Experiment Name: At_Drought_Soil_Dry_P Parameter: Age (day) Value: 28
  misc_feature: MA Experiment 20001560 PARAMETER Experiment Name: At_Drought_Soil_Dry_P Parameter: Organism Value: A. thaliana
  misc_feature: MA Experiment 20001560 PARAMETER Experiment Name: At_Drought_Soil_Dry_P Parameter: Plant Line Value: WS
  misc_feature: MA Experiment 20001560 PARAMETER Experiment Name: At_Drought_Soil_Dry_P Parameter: Post Timepoint (hr) Value: None
  misc_feature: MA Experiment 20001560 PARAMETER Experiment Name: At_Drought_Soil_Dry_P Parameter: Post-Treatment Value: None
  misc_feature: MA Experiment 20001560 PARAMETER Experiment Name: At_Drought_Soil_Dry_P Parameter: Timepoint (day) Value: 14
  misc_feature: MA Experiment 20001560 PARAMETER Experiment Name: At_Drought_Soil_Dry_P Parameter: Treatment Value: Drought vs. No Drought
  misc_feature: MA Experiment ID: 20001911 Result: Up-regulated in Transcription
  misc_feature: MA Experiment 20001911 PARAMETER Experiment Name: At_Drought_Reproduction_P Parameter: Age (day) Value: 40
  misc_feature: MA Experiment 20001911 PARAMETER Experiment Name: At_Drought_Reproduction_P Parameter: Organism Value: A. thaliana
  misc_feature: MA Experiment 20001911 PARAMETER Experiment Name: At_Drought_Reproduction_P Parameter: Plant Line Value: WS
  misc_feature: MA Experiment 20001911 PARAMETER Experiment Name: At_Drought_Reproduction_P Parameter: Timepoint (day) Value: 10
  misc_feature: MA Experiment 20001911 PARAMETER Experiment Name: At_Drought_Reproduction_P Parameter: Tissue Value: Flowers
  misc_feature: MA Experiment 20001911 PARAMETER Experiment Name: At_Drought_Reproduction_P Parameter: Treatment Value: Drought vs. No Drought

SEQ ID NO: 48659 - protein, 442 aa, Arabidopsis thaliana; identical to SEQ ID NO: 47218
  peptide (1)..(442): Ceres Seq. ID no. 12601003
  misc_feature (59)..(389): Homolog of NCBI NO: 22766878 NR Description: Unknown (protein for MGC:47349) [Mus musculus]
  misc_feature (66)..(389): Homolog of NCBI NO: 27677438 NR Description: similar to CG3552-PC [Drosophila melanogaster]
  misc_feature (97)..(402): Homolog of NCBI NO: 34907712 NR Description: P0035F12.16 [Oryza sativa (japonica
  misc_feature (1)..(182): Homolog of NCBI NO: 21070346 NR Description: VTC2 [Arabidopsis thaliana]
  misc_feature (1)..(182): Homolog of NCBI NO: 7452423 NR Description: hypothetical protein F10M23.190 - Arabidopsis
  misc_feature (1)..(416): Homolog of NCBI NO: 15240467 NR Description: putative protein
  misc_feature (41)..(442): Homolog of NCBI NO: 21070346 NR Description: VTC2 [Arabidopsis thaliana]
  misc_feature (41)..(442): Homolog of NCBI NO: 7452423 NR Description: hypothetical protein F10M23.190 - Arabidopsis
  misc_feature (1)..(442): Homolog of NCBI NO: 15810139 NR Description: unknown protein [Arabidopsis thaliana]
  misc_feature (1)..(442): Homolog of NCBI NO: 18416877 NR Description: putative protein
  misc_feature (59)..(389): Homolog of NCBI NO: 22766878 NR Description: Unknown (protein for MGC:47349) [Mus musculus]
  misc_feature (66)..(389): Homolog of NCBI NO: 27677438 NR Description: similar to CG3552-PC [Drosophila melanogaster]
  misc_feature (97)..(402): Homolog of NCBI NO: 34907712 NR Description: P0035F12.16 [Oryza sativa (japonica
  misc_feature (1)..(182): Homolog of NCBI NO: 21070346 NR Description: VTC2 [Arabidopsis thaliana]
  misc_feature (1)..(182): Homolog of NCBI NO: 7452423 NR Description: hypothetical protein F10M23.190 - Arabidopsis
  misc_feature (1)..(416): Homolog of NCBI NO: 15240467 NR Description: putative protein
  misc_feature (41)..(442): Homolog of NCBI NO: 21070346 NR Description: VTC2 [Arabidopsis thaliana]
  misc_feature (41)..(442): Homolog of NCBI NO: 7452423 NR Description: hypothetical protein F10M23.190 - Arabidopsis
  misc_feature (1)..(442): Homolog of NCBI NO: 15810139 NR Description: unknown protein [Arabidopsis thaliana]
  misc_feature (1)..(442): Homolog of NCBI NO: 18416877 NR Description: putative protein
  misc_feature (59)..(389): Homolog of NCBI NO: 22766878 NR Description: Unknown (protein for MGC:47349) [Mus musculus]
  misc_feature (66)..(389): Homolog of NCBI NO: 27677438 NR Description: similar to CG3552-PC [Drosophila melanogaster]
  misc_feature (97)..(402): Homolog of NCBI NO: 34907712 NR Description: P0035F12.16 [Oryza sativa (japonica
  misc_feature (1)..(182): Homolog of NCBI NO: 21070346 NR Description: VTC2 [Arabidopsis thaliana]
  misc_feature (1)..(182): Homolog of NCBI NO: 7452423 NR Description: hypothetical protein F10M23.190 - Arabidopsis
  misc_feature (1)..(416): Homolog of NCBI NO: 15240467 NR Description: putative protein
  misc_feature (41)..(442): Homolog of NCBI NO: 21070346 NR Description: VTC2 [Arabidopsis thaliana]
  misc_feature (41)..(442): Homolog of NCBI NO: 7452423 NR Description: hypothetical protein F10M23.190 - Arabidopsis
  misc_feature (1)..(442): Homolog of NCBI NO: 15810139 NR Description: unknown protein [Arabidopsis thaliana]
  misc_feature (1)..(442): Homolog of NCBI NO: 18416877 NR Description: putative protein

SEQ ID NO: 48660 - protein, 279 aa, Arabidopsis thaliana; identical to SEQ ID NO: 47219
  peptide (1)..(279): Ceres Seq. ID no. 12601004
  misc_feature (1)..(226): Homolog of NCBI NO: 22766878 NR Description: Unknown (protein for MGC:47349) [Mus musculus]
  misc_feature (1)..(226): Homolog of NCBI NO: 27677438 NR Description: similar to CG3552-PC [Drosophila melanogaster]
  misc_feature (1)..(239): Homolog of NCBI NO: 34907712 NR Description: P0035F12.16 [Oryza sativa (japonica
  misc_feature (1)..(19): Homolog of NCBI NO: 21070346 NR Description: VTC2 [Arabidopsis thaliana]
  misc_feature (1)..(19): Homolog of NCBI NO: 7452423 NR Description: hypothetical protein F10M23.190 - Arabidopsis
  misc_feature (1)..(253): Homolog of NCBI NO: 15240467 NR Description: putative protein
  misc_feature (1)..(279): Homolog of NCBI NO: 21070346 NR Description: VTC2 [Arabidopsis thaliana]
  misc_feature (1)..(279): Homolog of NCBI NO: 7452423 NR Description: hypothetical protein F10M23.190 - Arabidopsis
  misc_feature (1)..(279): Homolog of NCBI NO: 15810139 NR Description: unknown protein [Arabidopsis thaliana]
  misc_feature (1)..(279): Homolog of NCBI NO: 18416877 NR Description: putative protein
  misc_feature (1)..(226): Homolog of NCBI NO: 22766878 NR Description: Unknown (protein for MGC:47349) [Mus musculus]
  misc_feature (1)..(226): Homolog of NCBI NO: 27677438 NR Description: similar to CG3552-PC [Drosophila melanogaster]
  misc_feature (1)..(239): Homolog of NCBI NO: 34907712 NR Description: P0035F12.16 [Oryza sativa (japonica
  misc_feature (1)..(19): Homolog of NCBI NO: 21070346 NR Description: VTC2 [Arabidopsis thaliana]
  misc_feature (1)..(19): Homolog of NCBI NO: 7452423 NR Description: hypothetical protein F10M23.190 - Arabidopsis
  misc_feature (1)..(253): Homolog of NCBI NO: 15240467 NR Description: putative protein
  misc_feature (1)..(279): Homolog of NCBI NO: 21070346 NR Description: VTC2 [Arabidopsis thaliana]
  misc_feature (1)..(279): Homolog of NCBI NO: 7452423 NR Description: hypothetical protein F10M23.190 - Arabidopsis
  misc_feature (1)..(279): Homolog of NCBI NO: 15810139 NR Description: unknown protein [Arabidopsis thaliana]
  misc_feature (1)..(279): Homolog of NCBI NO: 18416877 NR Description: putative protein
  misc_feature (1)..(226): Homolog of NCBI NO: 22766878 NR Description: Unknown (protein for MGC:47349) [Mus musculus]
  misc_feature (1)..(226): Homolog of NCBI NO: 27677438 NR Description: similar to CG3552-PC [Drosophila melanogaster]
  misc_feature (1)..(239): Homolog of NCBI NO: 34907712 NR Description: P0035F12.16 [Oryza sativa (japonica
  misc_feature (1)..(19): Homolog of NCBI NO: 21070346 NR Description: VTC2 [Arabidopsis thaliana]
  misc_feature (1)..(19): Homolog of NCBI NO: 7452423 NR Description: hypothetical protein F10M23.190 - Arabidopsis
  misc_feature (1)..(253): Homolog of NCBI NO: 15240467 NR Description: putative protein
  misc_feature (1)..(279): Homolog of NCBI NO: 21070346 NR Description: VTC2 [Arabidopsis thaliana]
  misc_feature (1)..(279): Homolog of NCBI NO: 7452423 NR Description: hypothetical protein F10M23.190 - Arabidopsis
  misc_feature (1)..(279): Homolog of NCBI NO: 15810139 NR Description: unknown protein [Arabidopsis thaliana]
  misc_feature (1)..(279): Homolog of NCBI NO: 18416877 NR Description: putative protein

SEQ ID NO: 48661 - protein, 231 aa, Arabidopsis thaliana; identical to SEQ ID NO: 47220
  peptide (1)..(231): Ceres Seq. ID no. 12601005
  misc_feature (1)..(178): Homolog of NCBI NO: 26351153 NR Description: unnamed protein product [Mus musculus]
  misc_feature (1)..(191): Homolog of NCBI NO: 34527348 NR Description: unnamed protein product [Homo sapiens]
  misc_feature (1)..(178): Homolog of NCBI NO: 22766878 NR Description: Unknown (protein for MGC:47349) [Mus musculus]
  misc_feature (1)..(178): Homolog of NCBI NO: 27677438 NR Description: similar to CG3552-PC [Drosophila melanogaster]
  misc_feature (1)..(191): Homolog of NCBI NO: 34907712 NR Description: P0035F12.16 [Oryza sativa (japonica
  misc_feature (1)..(205): Homolog of NCBI NO: 15240467 NR Description: putative protein
  misc_feature (1)..(231): Homolog of NCBI NO: 21070346 NR Description: VTC2 [Arabidopsis thaliana]
  misc_feature (1)..(231): Homolog of NCBI NO: 7452423 NR Description: hypothetical protein F10M23.190 - Arabidopsis
  misc_feature (1)..(231): Homolog of NCBI NO: 15810139 NR Description: unknown protein [Arabidopsis thaliana]
  misc_feature (1)..(231): Homolog of NCBI NO: 18416877 NR Description: putative protein
  misc_feature (1)..(178): Homolog of NCBI NO: 26351153 NR Description: unnamed protein product [Mus musculus]
  misc_feature (1)..(191): Homolog of NCBI NO: 34527348 NR Description: unnamed protein product [Homo sapiens]
  misc_feature (1)..(178): Homolog of NCBI NO: 22766878 NR Description: Unknown (protein for MGC:47349) [Mus musculus]
  misc_feature (1)..(178): Homolog of NCBI NO: 27677438 NR Description: similar to CG3552-PC [Drosophila melanogaster]
  misc_feature (1)..(191): Homolog of NCBI NO: 34907712 NR Description: P0035F12.16 [Oryza sativa (japonica
  misc_feature (1)..(205): Homolog of NCBI NO: 15240467 NR Description: putative protein
  misc_feature (1)..(231): Homolog of NCBI NO: 21070346 NR Description: VTC2 [Arabidopsis thaliana]
  misc_feature (1)..(231): Homolog of NCBI NO: 7452423 NR Description: hypothetical protein F10M23.190 - Arabidopsis
  misc_feature (1)..(231): Homolog of NCBI NO: 15810139 NR Description: unknown protein [Arabidopsis thaliana]
  misc_feature (1)..(231): Homolog of NCBI NO: 18416877 NR Description: putative protein
  misc_feature (1)..(178): Homolog of NCBI NO: 26351153 NR Description: unnamed protein product [Mus musculus]
  misc_feature (1)..(191): Homolog of NCBI NO: 34527348 NR Description: unnamed protein product [Homo sapiens]
  misc_feature (1)..(178): Homolog of NCBI NO: 22766878 NR Description: Unknown (protein for MGC:47349) [Mus musculus]
  misc_feature (1)..(178): Homolog of NCBI NO: 27677438 NR Description: similar to CG3552-PC [Drosophila melanogaster]
  misc_feature (1)..(191): Homolog of NCBI NO: 34907712 NR Description: P0035F12.16 [Oryza sativa (japonica
  misc_feature (1)..(205): Homolog of NCBI NO: 15240467 NR Description: putative protein
  misc_feature (1)..(231): Homolog of NCBI NO: 21070346 NR Description: VTC2 [Arabidopsis thaliana]
  misc_feature (1)..(231): Homolog of NCBI NO: 7452423 NR Description: hypothetical protein F10M23.190 - Arabidopsis
  misc_feature (1)..(231): Homolog of NCBI NO: 15810139 NR Description: unknown protein [Arabidopsis thaliana]
  misc_feature (1)..(231): Homolog of NCBI NO: 18416877 NR Description: putative protein

SEQ ID NO: 48662 - DNA, 975 bp, Arabidopsis thaliana
  misc_feature (1)..(975): Ceres Seq. ID no. 12601261
  misc_feature: MA Experiment ID: 20001450 Result: Up-regulated in Transcription
  misc_feature: MA Experiment 20001450 PARAMETER Experiment Name: At_Far-red-induction_P Parameter: Age (day) Value: 7
  misc_feature: MA Experiment 20001450 PARAMETER Experiment Name: At_Far-red-induction_P Parameter: Light Value: Far-red vs. White
  misc_feature: MA Experiment 20001450 PARAMETER Experiment Name: At_Far-red-induction_P Parameter: Organism Value: A. thaliana
  misc_feature: MA Experiment 20001450 PARAMETER Experiment Name: At_Far-red-induction_P Parameter: Plant Line Value: Columbia
  misc_feature: MA Experiment 20001450 PARAMETER Experiment Name: At_Far-red-induction_P Parameter: Timepoint (hr) Value: 8
  misc_feature: MA Experiment 20001450 PARAMETER Experiment Name: At_Far-red-induction_P Parameter: Tissue Value: Whole Plant
atgtatctgaagagaccgatatggagcgatggcgcgtcagcaacgccggagaatccatcagaatcggagaccggagaagaatcagacgcggcgtcgatggtagtcgaagagctggtgacttctctcaatacacagagactttacagggagctgacactatccctcaggaccggtttacgcgatgcttgcgctgaattctccttccttcgcatccgtggtcttagatctcttctcaaaactctccgaactgtcgctgattcagattcaatcattcgtctcttctctcatacccaaaccatttccgatctccaactggttccggtgctttttcaacattcattgaaagaagcggaggatgataaagtgacgagcttggatcatatattcagtgtggagccgatgaagataacaagtccttctacggatgctgaggttgctgttgctcttagagttctcgaaggatgctgccttctccatcctcagagcactgtcctggctcataagcatggtgcagtccgcgtaatgatgaatgtattatcaacacgaggagtacttgagcaaggagcctgcttggatgccttaatctcagtattgctggattcatcagcaaatcaggtggattttggagcttgcaatggcattgaagaggttgcaatgctcatgcgagacaaacaagctgatgaaaacctcagtatttacacgataaaaattgccgtcaacgaagattcatttcctttttgtctcttctggttaagatgcggagagttcttactactgttagttggacacgtaaatgggaaggatcgatctccaatagcgagtgtaaatgaagacatcaggcgcctcttgggtgaaaaatctgcttctttaatatgggcggcgagtcaattcggttcaacaggtgatcctgaacaaagaatcacggcgcttcatatccaggctggtagagtgctcgagtctcttgacttgtactaa

SEQ ID NO: 48663 - protein, 324 aa, Arabidopsis thaliana
  peptide (1)..(324): Ceres Seq. ID no. 12601262
  misc_feature (5)..(173): Homolog of NCBI NO: 37536150 NR Description: hypothetical protein [Oryza sativa (japonica
  misc_feature (11)..(230): Homolog of NCBI NO: 34898066 NR Description: ESTs AU030224(E50782),AU077702(E50782) correspond a region of the predicted gene.~Similar to Arabidopsis thaliana
  misc_feature (251)..(324): Homolog of NCBI NO: 30687718 NR Description: expressed protein [Arabidopsis thaliana]
  misc_feature (1)..(232): Homolog of NCBI NO: 30687718 NR Description: expressed protein [Arabidopsis thaliana]
  misc_feature (1)..(324): Homolog of NCBI NO: 7452470 NR Description: hypothetical protein T29A15.240 - Arabidopsis
MYLKRPIWSDGASATPENPSESETGEESDAASMVVEELVTSLNTQRLYRELTLSLRTGLRDACAEFSFLRIRGLRSLLKTLRTVADSDSIIRLFSHTQTISDLQLVPVLFQHSLKEAEDDKVTSLDHIFSVEPMKITSPSTDAEVAVALRVLEGCCLLHPQSTVLAHKHGAVRVMMNVLSTRGVLEQGACLDALISVLLDSSANQVDFGACNGIEEVAMLMRDKQADENLSIYTIKIAVNEDSFPFCLFWLRCGEFLLLLVGHVNGKDRSPIASVNEDIRRLLGEKSASLIWAASQFGSTGDPEQRITALHIQAGRVLESLDLY

SEQ ID NO: 48664 - protein, 292 aa, Arabidopsis thaliana
  peptide (1)..(292): Ceres Seq. ID no. 12601263
  misc_feature (1)..(141): Homolog of NCBI NO: 37536150 NR Description: hypothetical protein [Oryza sativa (japonica
  misc_feature (1)..(198): Homolog of NCBI NO: 34898066 NR Description: ESTs AU030224(E50782),AU077702(E50782) correspond a region of the predicted gene.~Similar to Arabidopsis thaliana
  misc_feature (219)..(292): Homolog of NCBI NO: 30687718 NR Description: expressed protein [Arabidopsis thaliana]
  misc_feature (1)..(200): Homolog of NCBI NO: 30687718 NR Description: expressed protein [Arabidopsis thaliana]
  misc_feature (1)..(292): Homolog of NCBI NO: 7452470 NR Description: hypothetical protein T29A15.240 - Arabidopsis
MVVEELVTSLNTQRLYRELTLSLRTGLRDACAEFSFLRIRGLRSLLKTLRTVADSDSIIRLFSHTQTISDLQLVPVLFQHSLKEAEDDKVTSLDHIFSVEPMKITSPSTDAEVAVALRVLEGCCLLHPQSTVLAHKHGAVRVMMNVLSTRGVLEQGACLDALISVLLDSSANQVDFGACNGIEEVAMLMRDKQADENLSIYTIKIAVNEDSFPFCLFWLRCGEFLLLLVGHVNGKDRSPIASVNEDIRRLLGEKSASLIWAASQFGSTGDPEQRITALHIQAGRVLESLDLY

SEQ ID NO: 48665 - protein, 191 aa, Arabidopsis thaliana
  peptide (1)..(191): Ceres Seq. ID no. 12601264
  misc_feature (1)..(40): Homolog of NCBI NO: 37536150 NR Description: hypothetical protein [Oryza sativa (japonica
  misc_feature (1)..(97): Homolog of NCBI NO: 34898066 NR Description: ESTs AU030224(E50782),AU077702(E50782) correspond a region of the predicted gene.~Similar to Arabidopsis thaliana
  misc_feature (118)..(191): Homolog of NCBI NO: 30687718 NR Description: expressed protein [Arabidopsis thaliana]
  misc_feature (1)..(99): Homolog of NCBI NO: 30687718 NR Description: expressed protein [Arabidopsis thaliana]
  misc_feature (1)..(191): Homolog of NCBI NO: 7452470 NR Description: hypothetical protein T29A15.240 - Arabidopsis
MKITSPSTDAEVAVALRVLEGCCLLHPQSTVLAHKHGAVRVMMNVLSTRGVLEQGACLDALISVLLDSSANQVDFGACNGIEEVAMLMRDKQADENLSIYTIKIAVNEDSFPFCLFWLRCGEFLLLLVGHVNGKDRSPIASVNEDIRRLLGEKSASLIWAASQFGSTGDPEQRITALHIQAGRVLESLDLY

SEQ ID NO: 48666 - DNA, 1313 bp, Arabidopsis thaliana
  misc_feature (1)..(1313): Ceres Seq. ID no. 14310152
  misc_feature: MA Experiment ID: 20000185 Result: Down-regulated in Transcription
  misc_feature: MA Experiment 20000185 PARAMETER Experiment Name: At_Roots__P Parameter: Age (day) Value: 7 vs. 21
  misc_feature: MA Experiment 20000185 PARAMETER Experiment Name: At_Roots__P Parameter: Organism Value: A. thaliana
  misc_feature: MA Experiment 20000185 PARAMETER Experiment Name: At_Roots__P Parameter: Tissue Value: Roots vs. Whole Plant
  misc_feature: MA Experiment ID: 20000265 Result: Down-regulated in Transcription
  misc_feature: MA Experiment 20000265 PARAMETER Experiment Name: At_Open_Flower_P Parameter: Age (day) Value: 21
  misc_feature: MA Experiment 20000265 PARAMETER Experiment Name: At_Open_Flower_P Parameter: Plant Line Value: WS
  misc_feature: MA Experiment 20000265 PARAMETER Experiment Name: At_Open_Flower_P Parameter: Tissue Value: Closed Flower vs. Whole Plant
  misc_feature: MA Experiment ID: 20000267 Result: Up-regulated in Transcription
  misc_feature: MA Experiment 20000267 PARAMETER Experiment Name: At_Drought_P Parameter: Age (day) Value: 7
  misc_feature: MA Experiment 20000267 PARAMETER Experiment Name: At_Drought_P Parameter: Organism Value: A. thaliana
  misc_feature: MA Experiment 20000267 PARAMETER Experiment Name: At_Drought_P Parameter: Plant Line Value: WS
  misc_feature: MA Experiment 20000267 PARAMETER Experiment Name: At_Drought_P Parameter: Timepoint (hr) Value: 6
  misc_feature: MA Experiment 20000267 PARAMETER Experiment Name: At_Drought_P Parameter: Tissue Value: Whole Plant
  misc_feature: MA Experiment 20000267 PARAMETER Experiment Name: At_Drought_P Parameter: Treatment Value: Drought vs. No Drought
  misc_feature: MA Experiment ID: 20000269 Result: Up-regulated in Transcription
  misc_feature: MA Experiment 20000269 PARAMETER Experiment Name: At_1mM_KNO3_L-vs-H_Roots_P Parameter: Age (day) Value: 7,10,12
  misc_feature: MA Experiment 20000269 PARAMETER Experiment Name: At_1mM_KNO3_L-vs-H_Roots_P Parameter: Organism Value: A. thaliana
  misc_feature: MA Experiment 20000269 PARAMETER Experiment Name: At_1mM_KNO3_L-vs-H_Roots_P Parameter: Plant Line Value: WS
  misc_feature: MA Experiment 20000269 PARAMETER Experiment Name: At_1mM_KNO3_L-vs-H_Roots_P Parameter: Timepoint (day) Value: 7,10,12
  misc_feature: MA Experiment 20000269 PARAMETER Experiment Name: At_1mM_KNO3_L-vs-H_Roots_P Parameter: Tissue Value: Roots
  misc_feature: MA Experiment 20000269 PARAMETER Experiment Name: At_1mM_KNO3_L-vs-H_Roots_P Parameter: Treatment Value: 1mM KNO3 vs. 50mM KNO3
  misc_feature: MA Experiment ID: 20000436 Result: Up-regulated in Transcription
  misc_feature: MA Experiment 20000436 PARAMETER Experiment Name: At_Drought_P Parameter: Age (day) Value: 7
  misc_feature: MA Experiment 20000436 PARAMETER Experiment Name: At_Drought_P Parameter: Organism Value: A. thaliana
  misc_feature: MA Experiment 20000436 PARAMETER Experiment Name: At_Drought_P Parameter: Plant Line Value: WS
  misc_feature: MA Experiment 20000436 PARAMETER Experiment Name: At_Drought_P Parameter: Timepoint (hr) Value: 12
  misc_feature: MA Experiment 20000436 PARAMETER Experiment Name: At_Drought_P Parameter: Tissue Value: Whole Plant
  misc_feature: MA Experiment 20000436 PARAMETER Experiment Name: At_Drought_P Parameter: Treatment Value: Drought vs. No Drought
  misc_feature: MA Experiment ID: 20000437 Result: Up-regulated in Transcription
  misc_feature: MA Experiment 20000437 PARAMETER Experiment Name: At_Drought_P Parameter: Age (day) Value: 8
  misc_feature: MA Experiment 20000437 PARAMETER Experiment Name: At_Drought_P Parameter: Organism Value: A. thaliana
  misc_feature: MA Experiment 20000437 PARAMETER Experiment Name: At_Drought_P Parameter: Plant Line Value: WS
  misc_feature: MA Experiment 20000437 PARAMETER Experiment Name: At_Drought_P Parameter: Timepoint (hr) Value: 24
  misc_feature: MA Experiment 20000437 PARAMETER Experiment Name: At_Drought_P Parameter: Tissue Value: Whole Plant
  misc_feature: MA Experiment 20000437 PARAMETER Experiment Name: At_Drought_P Parameter: Treatment Value: Drought vs. No Drought
  misc_feature: MA Experiment ID: 20000438 Result: Down-regulated in Transcription
  misc_feature: MA Experiment 20000438 PARAMETER Experiment Name: At_Shoots__P Parameter: Age (day) Value: 14
  misc_feature: MA Experiment 20000438 PARAMETER Experiment Name: At_Shoots__P Parameter: Tissue Value: Shoots vs. Whole Plant
  misc_feature: MA Experiment ID: 20000794 Result: Up-regulated in Transcription
  misc_feature: MA Experiment 20000794 PARAMETER Experiment Name: At_Petals_P Parameter: Age (day) Value: 23-25 days
  misc_feature: MA Experiment 20000794 PARAMETER Experiment Name: At_Petals_P Parameter: Plant Line Value: WS
  misc_feature: MA Experiment 20000794 PARAMETER Experiment Name: At_Petals_P Parameter: Tissue Value: Petals vs. Whole plant
  misc_feature: MA Experiment ID: 20001555 Result: Up-regulated in Transcription
  misc_feature: MA Experiment 20001555 PARAMETER Experiment Name: At_Drought_Soil_Dry_P Parameter: Age (day) Value: 24
  misc_feature: MA Experiment 20001555 PARAMETER Experiment Name: At_Drought_Soil_Dry_P Parameter: Organism Value: A. thaliana
  misc_feature: MA Experiment 20001555 PARAMETER Experiment Name: At_Drought_Soil_Dry_P Parameter: Plant Line Value: WS
  misc_feature: MA Experiment 20001555 PARAMETER Experiment Name: At_Drought_Soil_Dry_P Parameter: Post Timepoint (hr) Value: None
  misc_feature: MA Experiment 20001555 PARAMETER Experiment Name: At_Drought_Soil_Dry_P Parameter: Post-Treatment Value: None
  misc_feature: MA Experiment 20001555 PARAMETER Experiment Name: At_Drought_Soil_Dry_P Parameter: Timepoint (day) Value: 10
  misc_feature: MA Experiment 20001555 PARAMETER Experiment Name: At_Drought_Soil_Dry_P Parameter: Treatment Value: Drought vs. No Drought
  misc_feature: MA Experiment ID: 20001556 Result: Up-regulated in Transcription
  misc_feature: MA Experiment 20001556 PARAMETER Experiment Name: At_Drought_Soil_Dry_P Parameter: Age (day) Value: 26
  misc_feature: MA Experiment 20001556 PARAMETER Experiment Name: At_Drought_Soil_Dry_P Parameter: Organism Value: A. thaliana
  misc_feature: MA Experiment 20001556 PARAMETER Experiment Name: At_Drought_Soil_Dry_P Parameter: Plant Line Value: WS
  misc_feature: MA Experiment 20001556 PARAMETER Experiment Name: At_Drought_Soil_Dry_P Parameter: Post Timepoint (hr) Value: None
  misc_feature: MA Experiment 20001556 PARAMETER Experiment Name: At_Drought_Soil_Dry_P Parameter: Post-Treatment Value: None
  misc_feature: MA Experiment 20001556 PARAMETER Experiment Name: At_Drought_Soil_Dry_P Parameter: Timepoint (day) Value: 12
  misc_feature: MA Experiment 20001556 PARAMETER Experiment Name: At_Drought_Soil_Dry_P Parameter: Treatment Value: Drought vs. No Drought
  misc_feature: MA Experiment ID: 20001757 Result: Down-regulated in Transcription
  misc_feature: MA Experiment 20001757 PARAMETER Experiment Name: At_50mM_NH4NO3_L-to-H_P Parameter: Timepoint (hr) Value: 6
  misc_feature: MA Experiment 20001757 PARAMETER Experiment Name: At_50mM_NH4NO3_L-to-H_P Parameter: Tissue Value: Leaf
  misc_feature: MA Experiment 20001757 PARAMETER Experiment Name: At_50mM_NH4NO3_L-to-H_P Parameter: Treatment Value: 50mM NH4NO3 vs 100mM Mannitol
  misc_feature: MA Experiment ID: 20001904 Result: Up-regulated in Transcription
  misc_feature: MA Experiment 20001904 PARAMETER Experiment Name: At_Drought_Reproduction_P Parameter: Age (day) Value: 37
  misc_feature: MA Experiment 20001904 PARAMETER Experiment Name: At_Drought_Reproduction_P Parameter: Organism Value: A. thaliana
  misc_feature: MA Experiment 20001904 PARAMETER Experiment Name: At_Drought_Reproduction_P Parameter: Plant Line Value: WS
  misc_feature: MA Experiment 20001904 PARAMETER Experiment Name: At_Drought_Reproduction_P Parameter: Timepoint (day) Value: 7
  misc_feature: MA Experiment 20001904 PARAMETER Experiment Name: At_Drought_Reproduction_P Parameter: Tissue Value: Rosettes
  misc_feature: MA Experiment 20001904 PARAMETER Experiment Name: At_Drought_Reproduction_P Parameter: Treatment Value: Drought vs. No Drought
  misc_feature: MA Experiment ID: 20001905 Result: Up-regulated in Transcription
  misc_feature: MA Experiment 20001905 PARAMETER Experiment Name: At_Drought_Reproduction_P Parameter: Age (day) Value: 40
  misc_feature: MA Experiment 20001905 PARAMETER Experiment Name: At_Drought_Reproduction_P Parameter: Organism Value: A. thaliana
  misc_feature: MA Experiment 20001905 PARAMETER Experiment Name: At_Drought_Reproduction_P Parameter: Plant Line Value: WS
  misc_feature: MA Experiment 20001905 PARAMETER Experiment Name: At_Drought_Reproduction_P Parameter: Timepoint (day) Value: 10
  misc_feature: MA Experiment 20001905 PARAMETER Experiment Name: At_Drought_Reproduction_P Parameter: Tissue Value: Rosettes
  misc_feature: MA Experiment 20001905 PARAMETER Experiment Name: At_Drought_Reproduction_P Parameter: Treatment Value: Drought vs. No Drought
  misc_feature: MA Experiment ID: 20001906 Result: Up-regulated in Transcription
  misc_feature: MA Experiment 20001906 PARAMETER Experiment Name: At_Drought_Reproduction_P Parameter: Age (day) Value: 35
  misc_feature: MA Experiment 20001906 PARAMETER Experiment Name: At_Drought_Reproduction_P Parameter: Organism Value: A. thaliana
  misc_feature: MA Experiment 20001906 PARAMETER Experiment Name: At_Drought_Reproduction_P Parameter: Plant Line Value: WS
  misc_feature: MA Experiment 20001906 PARAMETER Experiment Name: At_Drought_Reproduction_P Parameter: Timepoint (day) Value: 5
  misc_feature: MA Experiment 20001906 PARAMETER Experiment Name: At_Drought_Reproduction_P Parameter: Tissue Value: Siliques
  misc_feature: MA Experiment 20001906 PARAMETER Experiment Name: At_Drought_Reproduction_P Parameter: Treatment Value: Drought vs. No Drought
  misc_feature: MA Experiment ID: 20001908 Result: Up-regulated in Transcription
  misc_feature: MA Experiment 20001908 PARAMETER Experiment Name: At_Drought_Reproduction_P Parameter: Age (day) Value: 40
  misc_feature: MA Experiment 20001908 PARAMETER Experiment Name: At_Drought_Reproduction_P Parameter: Organism Value: A. thaliana
  misc_feature: MA Experiment 20001908 PARAMETER Experiment Name: At_Drought_Reproduction_P Parameter: Plant Line Value: WS
  misc_feature: MA Experiment 20001908 PARAMETER Experiment Name: At_Drought_Reproduction_P Parameter: Timepoint (day) Value: 10
  misc_feature: MA Experiment 20001908 PARAMETER Experiment Name: At_Drought_Reproduction_P Parameter: Tissue Value: Siliques
  misc_feature: MA Experiment 20001908 PARAMETER Experiment Name: At_Drought_Reproduction_P Parameter: Treatment Value: Drought vs. No Drought
gaccatcaacaaactcaatcacaatcacaagtaaatacaaaaatcaccatagaaaaatatgaagcgatttattgttcttgcgctttgcatgcttatggttcttgaaaccacaaagggtttagatttccatgacaaagatgtggaatcagagaatagcttgtgggagctatacgaacggtggaggagtcaccacactgttgctaggagccttgaagagaaagctaagaggttcaacgtgttcaagcacaacgtgaagcacatccatgagaccaacaagaaggataaatcttacaagctcaagctaaacaagtttggtgacatgactagtgaagaatttaggagaacatacgctggttcaaacatcaaacatcataggatgtttcaaggcaaaaaaaaggccacaaagagcttcatgtatgcaaatgtaaatactctcccaacctccgttgattggagaaagaatggagccgtcactcctgtcaaaaaccaaggccaatgcgggagttgttgggcgttttcaacagttgttgcggtggaagggatcaaccaaataagaactaaaaagctgacatcactctcagagcaagagctagtagattgtgatacaaaccagaaccaaggatgcaatggaggtctaatggaccttgcttttgagttcatcaaggagaaaggaggactcacaagtgagctagtgtacccttacaaggcttctgatgaaacttgtgacacaaacaaagaaaatgctccggtagtttcaatcgatggacacgaagatgttcctaagaacagcgaggatgatctaatgaaagctgttgctaatcagcctgtttctgttgctattgatgctggaggctcagactttcaattctactccgagggagtgtttaccgggagatgcggaacagagctaaaccatggagttgcggtagtagggtatggaacaacgatagacggaacaaagtattggattgttaagaattcatggggagaggaatggggagagaaaggatacataagaatgcagagagggattcgtcataaagaaggactttgtggtattgctatggaagcttcttatcctctcaagaactccaacactaacccttctagactttccttggactcgcttaaggatgaactctaaattaaatctctttatattaagattaaatagacattgacaagtttgtttatgatgattgtttttttttaaatatatttctttttcattaataggttatggttttcaatgtatgaagttgatgggaatcgtttgaattcgttaaatgaataaataaatggttttatgtagc

SEQ ID NO: 48667 - protein, 361 aa, Arabidopsis thaliana
  peptide (1)..(361): Ceres Seq. ID no. 14310153
  misc_feature (126)..(342): Pfam Name: Papain family cysteine protease Pfam Description: Papain family cysteine protease
  misc_feature (1)..(361): Homolog of NCBI NO: 445927 NR Description: Cys endopeptidase
  misc_feature (1)..(361): Homolog of NCBI NO: 7435817 NR Description: cysteine endopeptidase (EC 3.4.22.-) precursor -
  misc_feature (1)..(361): Homolog of NCBI NO: 18423124 NR Description: cysteine proteinase [Arabidopsis thaliana]
MKRFIVLALCMLMVLETTKGLDFHDKDVESENSLWELYERWRSHHTVARSLEEKAKRFNVFKHNVKHIHETNKKDKSYKLKLNKFGDMTSEEFRRTYAGSNIKHHRMFQGKKKATKSFMYANVNTLPTSVDWRKNGAVTPVKNQGQCGSCWAFSTVVAVEGINQIRTKKLTSLSEQELVDCDTNQNQGCNGGLMDLAFEFIKEKGGLTSELVYPYKASDETCDTNKENAPVVSIDGHEDVPKNSEDDLMKAVANQPVSVAIDAGGSDFQFYSEGVFTGRCGTELNHGVAVVGYGTTIDGTKYWIVKNSWGEEWGEKGYIRMQRGIRHKEGLCGIAMEASYPLKNSNTNPSRLSLDSLKDEL

SEQ ID NO: 48668 - protein, 351 aa, Arabidopsis thaliana
  peptide (1)..(351): Ceres Seq. ID no. 14310154
  misc_feature (116)..(332): Pfam Name: Papain family cysteine protease Pfam Description: Papain family cysteine protease
  misc_feature (1)..(351): Homolog of NCBI NO: 445927 NR Description: Cys endopeptidase
  misc_feature (1)..(351): Homolog of NCBI NO: 7435817 NR Description: cysteine endopeptidase (EC 3.4.22.-) precursor -
  misc_feature (1)..(351): Homolog of NCBI NO: 18423124 NR Description: cysteine proteinase [Arabidopsis thaliana]
MLMVLETTKGLDFHDKDVESENSLWELYERWRSHHTVARSLEEKAKRFNVFKHNVKHIHETNKKDKSYKLKLNKFGDMTSEEFRRTYAGSNIKHHRMFQGKKKATKSFMYANVNTLPTSVDWRKNGAVTPVKNQGQCGSCWAFSTVVAVEGINQIRTKKLTSLSEQELVDCDTNQNQGCNGGLMDLAFEFIKEKGGLTSELVYPYKASDETCDTNKENAPVVSIDGHEDVPKNSEDDLMKAVANQPVSVAIDAGGSDFQFYSEGVFTGRCGTELNHGVAVVGYGTTIDGTKYWIVKNSWGEEWGEKGYIRMQRGIRHKEGLCGIAMEASYPLKNSNTNPSRLSLDSLKDEL

SEQ ID NO: 48669 - protein, 349 aa, Arabidopsis thaliana
  peptide (1)..(349): Ceres Seq. ID no. 14310155
  misc_feature (114)..(330): Pfam Name: Papain family cysteine protease Pfam Description: Papain family cysteine protease
  misc_feature (1)..(349): Homolog of NCBI NO: 445927 NR Description: Cys endopeptidase
  misc_feature (1)..(349): Homolog of NCBI NO: 7435817 NR Description: cysteine endopeptidase (EC 3.4.22.-) precursor -
  misc_feature (1)..(349): Homolog of NCBI NO: 18423124 NR Description: cysteine proteinase [Arabidopsis thaliana]
MVLETTKGLDFHDKDVESENSLWELYERWRSHHTVARSLEEKAKRFNVFKHNVKHIHETNKKDKSYKLKLNKFGDMTSEEFRRTYAGSNIKHHRMFQGKKKATKSFMYANVNTLPTSVDWRKNGAVTPVKNQGQCGSCWAFSTVVAVEGINQIRTKKLTSLSEQELVDCDTNQNQGCNGGLMDLAFEFIKEKGGLTSELVYPYKASDETCDTNKENAPVVSIDGHEDVPKNSEDDLMKAVANQPVSVAIDAGGSDFQFYSEGVFTGRCGTELNHGVAVVGYGTTIDGTKYWIVKNSWGEEWGEKGYIRMQRGIRHKEGLCGIAMEASYPLKNSNTNPSRLSLDSLKDEL

SEQ ID NO: 48670 - DNA, 3452 bp, Arabidopsis thaliana
  misc_feature (1)..(3452): Ceres Seq. ID no. 14316172
  misc_feature: MA Experiment ID: 20000235 Result: Up-regulated in Transcription
  misc_feature: MA Experiment 20000235 PARAMETER Experiment Name: At_Siliques_P Parameter: Age (day) Value: 21
  misc_feature: MA Experiment 20000235 PARAMETER Experiment Name: At_Siliques_P Parameter: Organism Value: A. thaliana
  misc_feature: MA Experiment 20000235 PARAMETER Experiment Name: At_Siliques_P Parameter: Plant Line Value: WS
  misc_feature: MA Experiment 20000235 PARAMETER Experiment Name: At_Siliques_P Parameter: Tissue Value: 5-10mm Siliques vs. Whole Plant
  misc_feature: MA Experiment ID: 20000495 Result: Up-regulated in Transcription
  misc_feature: MA Experiment 20000495 PARAMETER Experiment Name: At_Guard_Cells_P Parameter: Harvest Date Value: 8/2/2002
  misc_feature: MA Experiment 20000495 PARAMETER Experiment Name: At_Guard_Cells_P Parameter: Organism Value: A. thaliana
  misc_feature: MA Experiment 20000495 PARAMETER Experiment Name: At_Guard_Cells_P Parameter: Tissue Value: Guard Cells vs. Leaves
ttatgccatggagcaagtctctcttcactttggcttcctcttgatctagtatttgaagatgcaatggatggatatcaagtaaacccaactagtgcgattgaaatcattaccggtctagctaaaacacttaaagaaattaatgggagcacttggcatgacactttcttggggctttggatagcagctctccgacttgttcaaagggaaagggatcctattgagggacctattcctcgactggacacaaggctgtgcatgtcattatgtattgtgcctcttgtggtcgcaaaccttattgaagaggggaaatacgaatctgtcatggaaaagctgcgagatgaccttgttacaagtttgcaggtcctcggtgatttccctggattgctggctcctcccaaatgcgttgtttctgctgccaacaaggctgccacaaaggcaatcttgtttttgtctggtggcaatgttggaaagtcatgttttgatgtcataaacatgaaggacatgcctgtcaactgctctggaaacatgcgccacctgatagtcgaggcttgtattgcaagaaacatactggatatgtcggcttattcgtggcctggctatgttaatggccgaatcaaccaaatacctcagagtctgccgaatgaagtaccctgctggtcatcatttgtgaaaggggctccactaaatgccgcaatggtgaatacattagtttcagttcctgcttcaaggtagaatgagttattatcttctttttgtttctttttcctctattagctccacactacttcatccacatagtcttccctccaaatcatacagtcagtggtaatttaaaattactatacaaaattaagctacggagtttcaaagtcgtaacctaaggaaaccattgccacaatgagaatagtggttgcattctagtttgacttaagttctgcttcttcttcagttattcatttttgtttcttagccaggtaatgctctttttttaatttaccgagagtaaagcaactgaaatacctcatggatttgatggaagcttagcagagctcgagaaactatttgaggttgcagtcaaaggatcggatgacgagaagatatctgctgctacagttctttgcggggcatctctcacacggggttggaacatacaggaacacactgttgaatatcttacaagattactatccccacccgttccagcagattattccagggctgaaaatcatttgattggttatgcctgcatgttgaatgttgttattgttgggataggatctgttgacagcattcaaattttctctttacatggcatggttccgcaacttgcttgctcactaatgccaatttgtgaagagtttggatcttacaccccgagtgtatcatggactcttccttctggagaagcaatatcagcatattctgttttctcaaatgcattcactcttcttttaaagctatggagattcaatcatcctcctattgagcatggtgtgggagatgttcccacagttggctcccaactcactcctgaacatcttctttcagtgcgtaattcttatcttgtttcatcggagatccttgatagagaccgaaacagaaagagactttcagaagttgcaagggcagcatcttgccagcccgtgtttgtggactcgttccccaagctgaaagtctggtataggcagcaccaaagatgcatagcagccacattatctggacttacacatggatctcccgttcatcagacagttgaagcacttctcaacatgacgttcggaaaggtcagaggcagtcagactttaaatccagtaaattcgggcacaagcagttcatcaggagctgcaagtgaagatagcaatataagacctgagtttcctgcttgggatatcctcaaagccgttccatatgttgtcgatgctgctttaaccgcttgtactcatggaaggctttcgcctcgtcagttagctacagggctgaaagacttagcagattttctcccggcatcattagcaacgatagtaagctatttctcagctgaggtgagtagaggtgtttggaagccagtattcatgaacggcgtggattggccaagtccagctacaaatctatccactgttgaggaatatataacgaaaattcttgcaacaacaggcgtcgatatccctagccttgctccaggagggagttctccggcaacgcttcctttacctctagccgcatttgttagtctaaccattacttacaaaattgacaaagcctcagagcggtttctcaacctggctggcccagctctggagtgcttggctgcaggctgcccttggccttgcatgcccattgtagcttcattatggacccaaaaggcgaaacgttggtttgacttccttgttttctctgcctctcgcaccgtcttccttcacaaccaagacgctgtgattcagctcctcagaaactgcttcagtgccactctgggtttgaatgctgcccccatgtcaaatgatggtggcgttggagctcttcttggccatggattcggctctcatttctatggagggatctctcctgtagcaccagggattctttatctccgtatgtatcgtgctctcagagatactgtctccgtatcggaagagattctctctctgctgatacattcggtggaggatatagcccagaacaggctctcaaaggagaagctggaaaagctgaagacagtgaagaacggatcaagatacggccaaagttctctagcaacagcaatgactcaagtgaagcttgctgcttcgctgagtgcctcgttggtatggctaaccggtggcttaggtgtggtccacgttctcatcaaagaaacgatcccatcttggtttctatcaactgacaaatcagaccgagaacaaggaccatcagatctagttgcagagctaagaggtcatgcccttgcctactttgtggtcctatgtggagcacttacttggggcgtggattcaagatcatctgcatccaaacgccgccgccaagcaatcttgggaagccacttggagttcatcgcgagtgccttagatgggaaaatatcagtgggatgtgaaacagcaacttggcgaacatatatttccggtttggtgagtctaatggtgagctgtttgccgctctgggtgacagagatcgatacagaagtgttaaagagtctaagcaatggactaagaaaatggggaaaagacgagctagcgattgtattactctccttgggaggtctcaaaacaatggattacgcagctgatttcatcattcatttgcgttcatagcttcttaaaaagttttgatcttctccagatttcagatagttgtttgatagatgtttttcttctagtgtttgcttccttgttgtgacttgtgttctctagctccagtgttgtgtgatgaaatcaatcacgcatatgtatagagagaaacag

SEQ ID NO: 48671 - protein, 684 aa, Arabidopsis thaliana
  peptide (1)..(684): Ceres Seq. ID no. 14316173
  misc_feature (362)..(680): Homolog of NCBI NO: 34394478 NR Description: unknown protein [Oryza sativa (japonica
  misc_feature (338)..(680): Homolog of NCBI NO: 1223579 NR Description: ORF [Arabidopsis thaliana]
  misc_feature (1)..(680): Homolog of NCBI NO: 33146669 NR Description: unknown protein [Oryza sativa (japonica
  misc_feature (1)..(335): Homolog of NCBI NO: 20197556 NR Description: unknown protein [Arabidopsis thaliana]
  misc_feature (1)..(680): Homolog of NCBI NO: 33146668 NR Description: unknown protein [Oryza sativa (japonica
  misc_feature (24)..(680): Homolog of NCBI NO: 25370851 NR Description: hypothetical protein At2g48110 [imported] -
  misc_feature (1)..(680): Homolog of NCBI NO: 18407529 NR Description: hypothetical protein [Arabidopsis thaliana]
MLNVVIVGIGSVDSIQIFSLHGMVPQLACSLMPICEEFGSYTPSVSWTLPSGEAISAYSVFSNAFTLLLKLWRFNHPPIEHGVGDVPTVGSQLTPEHLLSVRNSYLVSSEILDRDRNRKRLSEVARAASCQPVFVDSFPKLKVWYRQHQRCIAATLSGLTHGSPVHQTVEALLNMTFGKVRGSQTLNPVNSGTSSSSGAASEDSNIRPEFPAWDILKAVPYVVDAALTACTHGRLSPRQLATGLKDLADFLPASLATIVSYFSAEVSRGVWKPVFMNGVDWPSPATNLSTVEEYITKILATTGVDIPSLAPGGSSPATLPLPLAAFVSLTITYKIDKASERFLNLAGPALECLAAGCPWPCMPIVASLWTQKAKRWFDFLVFSASRTVFLHNQDAVIQLLRNCFSATLGLNAAPMSNDGGVGALLGHGFGSHFYGGISPVAPGILYLRMYRALRDTVSVSEEILSLLIHSVEDIAQNRLSKEKLEKLKTVKNGSRYGQSSLATAMTQVKLAASLSASLVWLTGGLGVVHVLIKETIPSWFLSTDKSDREQGPSDLVAELRGHALAYFVVLCGALTWGVDSRSSASKRRRQAILGSHLEFIASALDGKISVGCETATWRTYISGLVSLMVSCLPLWVTEIDTEVLKSLSNGLRKWGKDELAIVLLSLGGLKTMDYAADFIIHLRS

SEQ ID NO: 48672 - protein, 662 aa, Arabidopsis thaliana
  peptide (1)..(662): Ceres Seq. ID no. 14316174
  misc_feature (340)..(658): Homolog of NCBI NO: 34394478 NR Description: unknown protein [Oryza sativa (japonica
  misc_feature (316)..(658): Homolog of NCBI NO: 1223579 NR Description: ORF [Arabidopsis thaliana]
  misc_feature (1)..(658): Homolog of NCBI NO: 33146669 NR Description: unknown protein [Oryza sativa (japonica
  misc_feature (1)..(313): Homolog of NCBI NO: 20197556 NR Description: unknown protein [Arabidopsis thaliana]
  misc_feature (1)..(658): Homolog of NCBI NO: 33146668 NR Description: unknown protein [Oryza sativa (japonica
  misc_feature (2)..(658): Homolog of NCBI NO: 25370851 NR Description: hypothetical protein At2g48110 [imported] -
  misc_feature (1)..(658): Homolog of NCBI NO: 18407529 NR Description: hypothetical protein [Arabidopsis thaliana]
MVPQLACSLMPICEEFGSYTPSVSWTLPSGEAISAYSVFSNAFTLLLKLWRFNHPPIEHGVGDVPTVGSQLTPEHLLSVRNSYLVSSEILDRDRNRKRLSEVARAASCQPVFVDSFPKLKVWYRQHQRCIAATLSGLTHGSPVHQTVEALLNMTFGKVRGSQTLNPVNSGTSSSSGAASEDSNIRPEFPAWDILKAVPYVVDAALTACTHGRLSPRQLATGLKDLADFLPASLATIVSYFSAEVSRGVWKPVFMNGVDWPSPATNLSTVEEYITKILATTGVDIPSLAPGGSSPATLPLPLAAFVSLTITYKIDKASERFLNLAGPALECLAAGCPWPCMPIVASLWTQKAKRWFDFLVFSASRTVFLHNQDAVIQLLRNCFSATLGLNAAPMSNDGGVGALLGHGFGSHFYGGISPVAPGILYLRMYRALRDTVSVSEEILSLLIHSVEDIAQNRLSKEKLEKLKTVKNGSRYGQSSLATAMTQVKLAASLSASLVWLTGGLGVVHVLIKETIPSWFLSTDKSDREQGPSDLVAELRGHALAYFVVLCGALTWGVDSRSSASKRRRQAILGSHLEFIASALDGKISVGCETATWRTYISGLVSLMVSCLPLWVTEIDTEVLKSLSNGLRKWGKDELAIVLLSLGGLKTMDYAADFIIHLRS

SEQ ID NO: 48673 - protein, 653 aa, Arabidopsis thaliana
  peptide (1)..(653): Ceres Seq. ID no. 14316175
  misc_feature (331)..(649): Homolog of NCBI NO: 34394478 NR Description: unknown protein [Oryza sativa (japonica
  misc_feature (307)..(649): Homolog of NCBI NO: 1223579 NR Description: ORF [Arabidopsis thaliana]
  misc_feature (1)..(649): Homolog of NCBI NO: 33146669 NR Description: unknown protein [Oryza sativa (japonica
  misc_feature (1)..(304): Homolog of NCBI NO: 20197556 NR Description: unknown protein [Arabidopsis thaliana]
  misc_feature (1)..(649): Homolog of NCBI NO: 33146668 NR Description: unknown protein [Oryza sativa (japonica
  misc_feature (1)..(649): Homolog of NCBI NO: 25370851 NR Description: hypothetical protein At2g48110 [imported] -
  misc_feature (1)..(649): Homolog of NCBI NO: 18407529 NR Description: hypothetical protein [Arabidopsis thaliana]
MPICEEFGSYTPSVSWTLPSGEAISAYSVFSNAFTLLLKLWRFNHPPIEHGVGDVPTVGSQLTPEHLLSVRNSYLVSSEILDRDRNRKRLSEVARAASCQPVFVDSFPKLKVWYRQHQRCIAATLSGLTHGSPVHQTVEALLNMTFGKVRGSQTLNPVNSGTSSSSGAASEDSNIRPEFPAWDILKAVPYVVDAALTACTHGRLSPRQLATGLKDLADFLPASLATIVSYFSAEVSRGVWKPVFMNGVDWPSPATNLSTVEEYITKILATTGVDIPSLAPGGSSPATLPLPLAAFVSLTITYKIDKASERFLNLAGPALECLAAGCPWPCMPIVASLWTQKAKRWFDFLVFSASRTVFLHNQDAVIQLLRNCFSATLGLNAAPMSNDGGVGALLGHGFGSHFYGGISPVAPGILYLRMYRALRDTVSVSEEILSLLIHSVEDIAQNRLSKEKLEKLKTVKNGSRYGQSSLATAMTQVKLAASLSASLVWLTGGLGVVHVLIKETIPSWFLSTDKSDREQGPSDLVAELRGHALAYFVVLCGALTWGVDSRSSASKRRRQAILGSHLEFIASALDGKISVGCETATWRTYISGLVSLMVSCLPLWVTEIDTEVLKSLSNGLRKWGKDELAIVLLSLGGLKTMDYAADFIIHLRS

SEQ ID NO: 48674 - DNA, 1675 bp, Arabidopsis thaliana
  misc_feature (1)..(1675): Ceres Seq. ID no. 12575235
  misc_feature: MA Experiment ID: 20000437 Result: Down-regulated in Transcription
  misc_feature: MA Experiment 20000437 PARAMETER Experiment Name: At_Drought_P Parameter: Age (day) Value: 8
  misc_feature: MA Experiment 20000437 PARAMETER Experiment Name: At_Drought_P Parameter: Organism Value: A. thaliana
  misc_feature: MA Experiment 20000437 PARAMETER Experiment Name: At_Drought_P Parameter: Plant Line Value: WS
  misc_feature: MA Experiment 20000437 PARAMETER Experiment Name: At_Drought_P Parameter: Timepoint (hr) Value: 24
  misc_feature: MA Experiment 20000437 PARAMETER Experiment Name: At_Drought_P Parameter: Tissue Value: Whole Plant
  misc_feature: MA Experiment 20000437 PARAMETER Experiment Name: At_Drought_P Parameter: Treatment Value: Drought vs. No Drought
  misc_feature: MA Experiment ID: 20000495 Result: Up-regulated in Transcription
  misc_feature: MA Experiment 20000495 PARAMETER Experiment Name: At_Guard_Cells_P Parameter: Harvest Date Value: 8/2/2002
  misc_feature: MA Experiment 20000495 PARAMETER Experiment Name: At_Guard_Cells_P Parameter: Organism Value: A. thaliana
  misc_feature: MA Experiment 20000495 PARAMETER Experiment Name: At_Guard_Cells_P Parameter: Tissue Value: Guard Cells vs. Leaves
  misc_feature: MA Experiment ID: 20001558 Result: Up-regulated in Transcription
  misc_feature: MA Experiment 20001558 PARAMETER Experiment Name: At_Drought_Soil_Dry_P Parameter: Age (day) Value: 27
  misc_feature: MA Experiment 20001558 PARAMETER Experiment Name: At_Drought_Soil_Dry_P Parameter: Organism Value: A. thaliana
  misc_feature: MA Experiment 20001558 PARAMETER Experiment Name: At_Drought_Soil_Dry_P Parameter: Plant Line Value: WS
  misc_feature: MA Experiment 20001558 PARAMETER Experiment Name: At_Drought_Soil_Dry_P Parameter: Post Timepoint (hr) Value: 6
  misc_feature: MA Experiment 20001558 PARAMETER Experiment Name: At_Drought_Soil_Dry_P Parameter: Post-Treatment Value: Re-Water vs. No Drought
  misc_feature: MA Experiment 20001558 PARAMETER Experiment Name: At_Drought_Soil_Dry_P Parameter: Timepoint (day) Value: 13
  misc_feature: MA Experiment 20001558 PARAMETER Experiment Name: At_Drought_Soil_Dry_P Parameter: Treatment Value: Drought vs. No Drought
  misc_feature: MA Experiment ID: 20001757 Result: Up-regulated in Transcription
  misc_feature: MA Experiment 20001757 PARAMETER Experiment Name: At_50mM_NH4NO3_L-to-H_P Parameter: Timepoint (hr) Value: 6
  misc_feature: MA Experiment 20001757 PARAMETER Experiment Name: At_50mM_NH4NO3_L-to-H_P Parameter: Tissue Value: Leaf
  misc_feature: MA Experiment 20001757 PARAMETER Experiment Name: At_50mM_NH4NO3_L-to-H_P Parameter: Treatment Value: 50mM NH4NO3 vs 100mM Mannitol
ttcttctccgtttctctttagattatctcaaccatacagccataaatccatcggaagaggaggaagataatgcaagaatcagtcgctgagtctgaatctgaaggggaagagttgcacaataagctcaagctcctcttcaatggctttcactagcatggtttccaccgttcctgttctcttcttcttcttcactcttcttttgatttctgcgaattcgtcgtctttatctcacaacattaaggttcaggaacaagacaaagatcccttcgttggtttcaacatcggcacagatgtctctaatcttctctcgccgacggaattagtcaaatttctccaagctcagaaagtaaatcacgtccgattatacgatgctgatccagaattgctcaaagcattagctaaaaccaaggtacgagtcataatcagtgtaccaaacaatcagcttctcgctattggatcatccaacagtactgctgcgtcatggattggtagaaatgttgttgcttattaccctgaaacattaatcacagccatttctgttggagatgaggttttaacaactgtgccttcttcagctcctttgcttttacctgctattgagtctttatacaatgctcttgttgcttctaatctccacactcaaatcaaggtctctacgcctcacgcagcttccatcatgctcgatactttcccgccttctcaagcttactttaaccagacttggcattcgattatggttcctctgcttcagttcttgtcgaaaacaggttctcctttgatgatgaatctgtatccttactatgtttatatgcagaacaaaggtgtggttccgctcgataactgtttgtttgagccattgacaccgtctaaagaaatggtggatccgaacactttgttgcattacacgaatgttcttgatgctatggttgatgctgcttatgtctcgatgaaaaacttaaatgtgtctgatgtggctgtgcttgtgactgagagtggctggccttcgaaaggtgactcgaaagagccttatgctactatcgacaatgctgatacgtacaactcgaatttgatcaagcatgtgtttgatagaactggtactcctttgcaccctgagatgacttcaagtgtctacatttatgagttgtttaatgaggatttgagggctcctccggttagtgaagctagttgggggttattctatgggaactctacaccggtttatttgcttcatgtatctggaagtggaacgttcttagcgaatgatacaacaaaccagacttactgcattgctatggatggtgtggatgcgaagacgcttcaagctgcattggattgggcttgtggacctgggagatctaactgtagtgagattcaacctggggagagttgttaccagccgaataatgtgaagggacatgcttcgtttgcttttaatagttattaccagaaggaaggaagagcttctggttcatgtgacttcaaaggtgtggctatgatcactactactgacccaagtcatggaagctgcattttcccgggaagcaagaaggtcggaaataggacacagacagtggtgaattcgactgaagttgccgcgggtgaagctacttcaaggagtctctcaagaggcttctgtgtcactattatgattcttgtaacattttccatattgtaa

SEQ ID NO: 48675 - protein, 511 aa, Arabidopsis thaliana
  peptide (1)..(511): Ceres Seq. ID no. 12575236
  misc_feature (44)..(365): Pfam Name: Glycosyl hydrolases family 17 Pfam Description: Glycosyl hydrolases family 17
  misc_feature (43)..(492): Homolog of NCBI NO: 15231273 NR Description: glycosyl hydrolase family 17
  misc_feature (58)..(459): Homolog of NCBI NO: 15219603 NR Description: glycosyl hydrolase family 17; protein id:
  misc_feature (40)..(459): Homolog of NCBI NO: 25410916 NR Description: probable beta-1,3-glucanase [imported] -
  misc_feature (41)..(459): Homolog of NCBI NO: 34394649 NR Description: putative beta-1,3-glucanase
  misc_feature (13)..(485): Homolog of NCBI NO: 22748323 NR Description: Putative beta-1,3-glucanase
  misc_feature (40)..(491): Homolog of NCBI NO: 18379267 NR Description: glycosyl hydrolase family 17 (beta-1,3-glucanase)
  misc_feature (41)..(496): Homolog of NCBI NO: 34394648 NR Description: putative beta-1,3-glucanase
  misc_feature (180)..(511): Homolog of NCBI NO: 28393722 NR Description: unknown protein [Arabidopsis thaliana]
  misc_feature (1)..(459): Homolog of NCBI NO: 25402689 NR Description: hypothetical protein [imported] - Arabidopsis
  misc_feature (1)..(511): Homolog of NCBI NO: 15220923 NR Description: glycosyl hydrolase family 17; protein id:
MAFTSMVSTVPVLFFFFTLLLISANSSSLSHNIKVQEQDKDPFVGFNIGTDVSNLLSPTELVKFLQAQKVNHVRLYDADPELLKALAKTKVRVIISVPNNQLLAIGSSNSTAASWIGRNVVAYYPETLITAISVGDEVLTTVPSSAPLLLPAIESLYNALVASNLHTQIKVSTPHAASIMLDTFPPSQAYFNQTWHSIMVPLLQFLSKTGSPLMMNLYPYYVYMQNKGVVPLDNCLFEPLTPSKEMVDPNTLLHYTNVLDAMVDAAYVSMKNLNVSDVAVLVTESGWPSKGDSKEPYATIDNADTYNSNLIKHVFDRTGTPLHPEMTSSVYIYELFNEDLRAPPVSEASWGLFYGNSTPVYLLHVSGSGTFLANDTTNQTYCIAMDGVDAKTLQAALDWACGPGRSNCSEIQPGESCYQPNNVKGHASFAFNSYYQKEGRASGSCDFKGVAMITTTDPSHGSCIFPGSKKVGNRTQTVVNSTEVAAGEATSRSLSRGFCVTIMILVTFSIL

SEQ ID NO: 48676 - protein, 506 aa, Arabidopsis thaliana
  peptide (1)..(506): Ceres Seq. ID no. 12575237
  misc_feature (39)..(360): Pfam Name: Glycosyl hydrolases family 17 Pfam Description: Glycosyl hydrolases family 17
  misc_feature (38)..(487): Homolog of NCBI NO: 15231273 NR Description: glycosyl hydrolase family 17
  misc_feature (53)..(454): Homolog of NCBI NO: 15219603 NR Description: glycosyl hydrolase family 17; protein id:
  misc_feature (35)..(454): Homolog of NCBI NO: 25410916 NR Description: probable beta-1,3-glucanase [imported] -
  misc_feature (36)..(454): Homolog of NCBI NO: 34394649 NR Description: putative beta-1,3-glucanase
  misc_feature (8)..(480): Homolog of NCBI NO: 22748323 NR Description: Putative beta-1,3-glucanase
  misc_feature (35)..(486): Homolog of NCBI NO: 18379267 NR Description: glycosyl hydrolase family 17 (beta-1,3-glucanase)
  misc_feature (36)..(491): Homolog of NCBI NO: 34394648 NR Description: putative beta-1,3-glucanase
  misc_feature (175)..(506): Homolog of NCBI NO: 28393722 NR Description: unknown protein [Arabidopsis thaliana]
  misc_feature (1)..(454): Homolog of NCBI NO: 25402689 NR Description: hypothetical protein [imported] - Arabidopsis
  misc_feature (1)..(506): Homolog of NCBI NO: 15220923 NR Description: glycosyl hydrolase family 17; protein id:
MVSTVPVLFFFFTLLLISANSSSLSHNIKVQEQDKDPFVGFNIGTDVSNLLSPTELVKFLQAQKVNHVRLYDADPELLKALAKTKVRVIISVPNNQLLAIGSSNSTAASWIGRNVVAYYPETLITAISVGDEVLTTVPSSAPLLLPAIESLYNALVASNLHTQIKVSTPHAASIMLDTFPPSQAYFNQTWHSIMVPLLQFLSKTGSPLMMNLYPYYVYMQNKGVVPLDNCLFEPLTPSKEMVDPNTLLHYTNVLDAMVDAAYVSMKNLNVSDVAVLVTESGWPSKGDSKEPYATIDNADTYNSNLIKHVFDRTGTPLHPEMTSSVYIYELFNEDLRAPPVSEASWGLFYGNSTPVYLLHVSGSGTFLANDTTNQTYCIAMDGVDAKTLQAALDWACGPGRSNCSEIQPGESCYQPNNVKGHASFAFNSYYQKEGRASGSCDFKGVAMITTTDPSHGSCIFPGSKKVGNRTQTVVNSTEVAAGEATSRSLSRGFCVTIMILVTFSIL

SEQ ID NO: 48677 - protein, 332 aa, Arabidopsis thaliana
  peptide (1)..(332): Ceres Seq. ID no. 12575238
  misc_feature (1)..(186): Pfam Name: Glycosyl hydrolases family 17 Pfam Description: Glycosyl hydrolases family 17
  misc_feature (1)..(313): Homolog of NCBI NO: 15231273 NR Description: glycosyl hydrolase family 17
  misc_feature (1)..(280): Homolog of NCBI NO: 15219603 NR Description: glycosyl hydrolase family 17; protein id:
  misc_feature (1)..(280): Homolog of NCBI NO: 25410916 NR Description: probable beta-1,3-glucanase [imported] -
  misc_feature (1)..(280): Homolog of NCBI NO: 34394649 NR Description: putative beta-1,3-glucanase
  misc_feature (1)..(306): Homolog of NCBI NO: 22748323 NR Description: Putative beta-1,3-glucanase
  misc_feature (1)..(312): Homolog of NCBI NO: 18379267 NR Description: glycosyl hydrolase family 17 (beta-1,3-glucanase)
  misc_feature (1)..(317): Homolog of NCBI NO: 34394648 NR Description: putative beta-1,3-glucanase
  misc_feature (1)..(332): Homolog of NCBI NO: 28393722 NR Description: unknown protein [Arabidopsis thaliana]
  misc_feature (1)..(280): Homolog of NCBI NO: 25402689 NR Description: hypothetical protein [imported] - Arabidopsis
  misc_feature (1)..(332): Homolog of NCBI NO: 15220923 NR Description: glycosyl hydrolase family 17; protein id:
MLDTFPPSQAYFNQTWHSIMVPLLQFLSKTGSPLMMNLYPYYVYMQNKGVVPLDNCLFEPLTPSKEMVDPNTLLHYTNVLDAMVDAAYVSMKNLNVSDVAVLVTESGWPSKGDSKEPYATIDNADTYNSNLIKHVFDRTGTPLHPEMTSSVYIYELFNEDLRAPPVSEASWGLFYGNSTPVYLLHVSGSGTFLANDTTNQTYCIAMDGVDAKTLQAALDWACGPGRSNCSEIQPGESCYQPNNVKGHASFAFNSYYQKEGRASGSCDFKGVAMITTTDPSHGSCIFPGSKKVGNRTQTVVNSTEVAAGEATSRSLSRGFCVTIMILVTFSIL

SEQ ID NO: 48678 - DNA, 2089 bp, Arabidopsis thaliana
  misc_feature (1)..(2089): Ceres Seq. ID no. 13591931
  misc_feature: MA Experiment ID: 20000171 Result: Down-regulated in Transcription
  misc_feature: MA Experiment 20000171 PARAMETER Experiment Name: At_42deg_Heat_P Parameter: Age (day) Value: 14
  misc_feature: MA Experiment 20000171 PARAMETER Experiment Name: At_42deg_Heat_P Parameter: Organism Value: A. thaliana
  misc_feature: MA Experiment 20000171 PARAMETER Experiment Name: At_42deg_Heat_P Parameter: Plant Line Value: WS
  misc_feature: MA Experiment 20000171 PARAMETER Experiment Name: At_42deg_Heat_P Parameter: Temperature (deg C) Value: 42 vs. 22
  misc_feature: MA Experiment 20000171 PARAMETER Experiment Name: At_42deg_Heat_P Parameter: Timepoint (hr) Value: 1
  misc_feature: MA Experiment 20000171 PARAMETER Experiment Name: At_42deg_Heat_P Parameter: Tissue Value: Aerial
  misc_feature: MA Experiment ID: 20000173 Result: Down-regulated in Transcription
  misc_feature: MA Experiment 20000173 PARAMETER Experiment Name: At_42deg_Heat_P Parameter: Age (day) Value: 14
  misc_feature: MA Experiment 20000173 PARAMETER Experiment Name: At_42deg_Heat_P Parameter: Organism Value: A. thaliana
  misc_feature: MA Experiment 20000173 PARAMETER Experiment Name: At_42deg_Heat_P Parameter: Plant Line Value: WS
  misc_feature: MA Experiment 20000173 PARAMETER Experiment Name: At_42deg_Heat_P Parameter: Temperature (deg C) Value: 42 vs. 22
  misc_feature: MA Experiment 20000173 PARAMETER Experiment Name: At_42deg_Heat_P Parameter: Timepoint (hr) Value: 6
  misc_feature: MA Experiment 20000173 PARAMETER Experiment Name: At_42deg_Heat_P Parameter: Tissue Value: Aerial
  misc_feature: MA Experiment ID: 20000182 Result: Up-regulated in Transcription
  misc_feature: MA Experiment 20000182 PARAMETER Experiment Name: At_2mM_SA_P Parameter: Age (day) Value: 14
  misc_feature: MA Experiment 20000182 PARAMETER Experiment Name: At_2mM_SA_P Parameter: Organism Value: A. thaliana
  misc_feature: MA Experiment 20000182 PARAMETER Experiment Name: At_2mM_SA_P Parameter: Plant Line Value: WS
  misc_feature: MA Experiment 20000182 PARAMETER Experiment Name: At_2mM_SA_P Parameter: Timepoint (hr) Value: 6
  misc_feature: MA Experiment 20000182 PARAMETER Experiment Name: At_2mM_SA_P Parameter: Tissue Value: Aerial
  misc_feature: MA Experiment 20000182 PARAMETER Experiment Name: At_2mM_SA_P Parameter: Treatment Value: 2mM SA vs. No Treatment
  misc_feature: MA Experiment ID: 20000184 Result: Down-regulated in Transcription
  misc_feature: MA Experiment 20000184 PARAMETER Experiment Name: At_Shoots__P Parameter: Age (day) Value: 7
  misc_feature: MA Experiment 20000184 PARAMETER Experiment Name: At_Shoots__P Parameter: Tissue Value: Shoots vs. Whole Plant
  misc_feature: MA Experiment ID: 20000185 Result: Up-regulated in Transcription
  misc_feature: MA Experiment 20000185 PARAMETER Experiment Name: At_Roots__P Parameter: Age (day) Value: 7 vs. 21
  misc_feature: MA Experiment 20000185 PARAMETER Experiment Name: At_Roots__P Parameter: Organism Value: A. thaliana
  misc_feature: MA Experiment 20000185 PARAMETER Experiment Name: At_Roots__P Parameter: Tissue Value: Roots vs. Whole Plant
  misc_feature: MA Experiment ID: 20000439 Result: Up-regulated in Transcription
  misc_feature: MA Experiment 20000439 PARAMETER Experiment Name: At_Roots__P Parameter: Age (day) Value: 14 vs. 21
  misc_feature: MA Experiment 20000439 PARAMETER Experiment Name: At_Roots__P Parameter: Organism Value: A. thaliana
  misc_feature: MA Experiment 20000439 PARAMETER Experiment Name: At_Roots__P Parameter: Tissue Value: Roots vs. Whole Plant
gaatttaacttttaaattccttccaccatcgaatcacaatctctctctctctcgcttgctgttactcgctttttcccagaaccggcttcgatttttctaaagcagccgaaatttacgattcccagaattttccctactgacaaaatttcacttcaaatacaaatctcgtcttcatgagtcttcttcttcgtccaaattgaattttctccgcacacgagagttgaattttgattttcggctgtttatatggtctccggtcccttagggttttaattcttctgcagatctctcacgatgagcgttgcgaaatcccaagtatggcagccatgcaagaagaagaggtcctcctcctgattcaatagagatctatctatatatatataagagaccgagatatatatatagagagagagatggcttctcgaacaacgccttcacgatcgactccttcacgatcaacgccttctggtagttcttctggtggtaggacacgagttggtaagtatgagcttggacgaactttgggtgaaggaactttcgctaaggtcaaattcgctagaaatgttgagaatggtgataatgtcgctattaaggttattgataaagagaaagttctgaaaaataagatgatcgctcagatcaagcgtgagatttcgacgatgaaattgatcaagcacccgaatgtcattcgtatgtttgaggtgatggctagcaaaactaagatctacttcgttttggaattcgtcactggtggggagcttttcgataaaatttcaagcaatgggagattgaaggaagatgaggcgaggaagtatttccaacagctgattaatgcggttgattattgtcatagcaggggagtttatcatagagaccttaagccagaaaatttgcttttggatgctaatggtgctttgaaagtgtctgactttggattgagcgctctacctcagcaagttcgagaggatgggttacttcacacaacctgtggaacacccaattatgttgctccggaggtaatcaacaacaaaggttatgatggagcgaaggctgatttgtggtcttgtggagtaattctctttgttttaatggctggttatttaccttttgaagattctaacctgacgtcgttatataaaaagatattcaaagcagaatttacttgccctccctggttctctgcaagtgctaagaagttaatcaaaagaattctggatcccaatccagcaacgaggattacatttgctgaggtcattgaaaatgagtggtttaaaaaagggtataaagcacctaaatttgagaatgctgatgtcagccttgatgatgttgatgcaatctttgatgactcaggggagtctaagaatcttgttgtggagaggcgagaagaaggactcaaaacaccagtaacgatgaatgcttttgagctcatctcgacatcccagggtctcaatctcggttcacttttcgaaaaacaaatggggctggtgaaacgaaaaactcgatttacttccaaatcttcggctaatgagatagttacaaaaattgaggctgcggcagcacctatggggtttgatgtcaagacaaataactacaagatgaagctgacaggagagaaatcaggccgcaagggtcagttggcagttgccactgaggtttttcaagttgctccatctctttacatggttgaaatgcgaaaatcagggggtgacacattggaattccacaagttttacaagaaccttaccacgggacttaaggacattgtttggaaaaccatcgacgaagagaaagaggaaggaaccgatggtggtggtactaatggtgccatggctaaccggacaattgcaaaacagtcgacataagctgtttacttttttctaatatagattttgttcgttataaattactatagtagtacggagtggttttgaagttaatacaaaaggaagcgtcaagaagtggagcagaagcagtttgaaactatattggggaatggggattattgatattttaatcatgtttgattccatggaatgttgtgaatagcatatgcgtgttgcgaggttcttggcttgaatcgattaaccgg

SEQ ID NO: 48679 - protein, 482 aa, Arabidopsis thaliana
  peptide (1)..(482): Ceres Seq. ID no. 13591932
  misc_feature (31)..(286): Pfam Name: Protein kinase domain Pfam Description: Protein kinase domain
  misc_feature (31)..(286): Pfam Name: Protein kinase domain Pfam Description: Protein kinase domain
  misc_feature (18)..(459): Homolog of NCBI NO: 34902248 NR Description: Putative serine/threonine kinase
  misc_feature (20)..(456): Homolog of NCBI NO: 7446372 NR Description: probable serine/threonine kinase (EC 2.7.1.-)
  misc_feature (20)..(458): Homolog of NCBI NO: 7446371 NR Description: probable serine/threonine kinase (EC 2.7.1.-)
  misc_feature (20)..(461): Homolog of NCBI NO: 25387057 NR Description: protein T25K16.13 [imported] - Arabidopsis
  misc_feature (20)..(461): Homolog of NCBI NO: 30677901 NR Description: CBL-interacting protein kinase 9 [Arabidopsis
  misc_feature (18)..(459): Homolog of NCBI NO: 34902248 NR Description: Putative serine/threonine kinase
  misc_feature (20)..(458): Homolog of NCBI NO: 7446371 NR Description: probable serine/threonine kinase (EC 2.7.1.-)
  misc_feature (20)..(461): Homolog of NCBI NO: 30677901 NR Description: CBL-interacting protein kinase 9 [Arabidopsis
  misc_feature (1)..(482): Homolog of NCBI NO: 18397430 NR Description: CBL-interacting protein kinase 23 [Arabidopsis
  misc_feature (1)..(482): Homolog of NCBI NO: 25387051 NR Description: probable serine/threonine kinase
  misc_feature (20)..(461): Homolog of NCBI NO: 15223317 NR Description: CBL-interacting protein kinase 9 [Arabidopsis
  misc_feature (20)..(461): Homolog of NCBI NO: 14423524 NR Description: similar to wpk4 protein kinase [Arabidopsis
  misc_feature (20)..(461): Homolog of NCBI NO: 30677898 NR Description: CBL-interacting protein kinase 9 [Arabidopsis
  misc_feature (20)..(461): Homolog of NCBI NO: 25387057 NR Description: protein T25K16.13 [imported] - Arabidopsis
  misc_feature (20)..(456): Homolog of NCBI NO: 7446372 NR Description: probable serine/threonine kinase (EC 2.7.1.-)
  misc_feature (20)..(461): Homolog of NCBI NO: 30677898 NR Description: CBL-interacting protein kinase 9 [Arabidopsis
  misc_feature (20)..(461): Homolog of NCBI NO: 14423524 NR Description: similar to wpk4 protein kinase [Arabidopsis
  misc_feature (20)..(461): Homolog of NCBI NO: 15223317 NR Description: CBL-interacting protein kinase 9 [Arabidopsis
  misc_feature (1)..(482): Homolog of NCBI NO: 25387051 NR Description: probable serine/threonine kinase
  misc_feature (1)..(482): Homolog of NCBI NO: 18397430 NR Description: CBL-interacting protein kinase 23 [Arabidopsis
MASRTTPSRSTPSRSTPSGSSSGGRTRVGKYELGRTLGEGTFAKVKFARNVENGDNVAIKVIDKEKVLKNKMIAQIKREISTMKLIKHPNVIRMFEVMASKTKIYFVLEFVTGGELFDKISSNGRLKEDEARKYFQQLINAVDYCHSRGVYHRDLKPENLLLDANGALKVSDFGLSALPQQVREDGLLHTTCGTPNYVAPEVINNKGYDGAKADLWSCGVILFVLMAGYLPFEDSNLTSLYKKIFKAEFTCPPWFSASAKKLIKRILDPNPATRITFAEVIENEWFKKGYKAPKFENADVSLDDVDAIFDDSGESKNLVVERREEGLKTPVTMNAFELISTSQGLNLGSLFEKQMGLVKRKTRFTSKSSANEIVTKIEAAAAPMGFDVKTNNYKMKLTGEKSGRKGQLAVATEVFQVAPSLYMVEMRKSGGDTLEFHKFYKNLTTGLKDIVWKTIDEEKEEGTDGGGTNGAMANRTIAKQST

SEQ ID NO: 48680 - protein, 411 aa, Arabidopsis thaliana
  peptide (1)..(411): Ceres Seq. ID no. 13591933
  misc_feature (1)..(215): Pfam Name: Protein kinase domain Pfam Description: Protein kinase domain
  misc_feature (1)..(215): Pfam Name: Protein kinase domain Pfam Description: Protein kinase domain
  misc_feature (1)..(388): Homolog of NCBI NO: 34902248 NR Description: Putative serine/threonine kinase
  misc_feature (1)..(385): Homolog of NCBI NO: 7446372 NR Description: probable serine/threonine kinase (EC 2.7.1.-)
  misc_feature (1)..(387): Homolog of NCBI NO: 7446371 NR Description: probable serine/threonine kinase (EC 2.7.1.-)
  misc_feature (1)..(390): Homolog of NCBI NO: 25387057 NR Description: protein T25K16.13 [imported] - Arabidopsis
  misc_feature (1)..(390): Homolog of NCBI NO: 30677901 NR Description: CBL-interacting protein kinase 9 [Arabidopsis
  misc_feature (1)..(388): Homolog of NCBI NO: 34902248 NR Description: Putative serine/threonine kinase
  misc_feature (1)..(387): Homolog of NCBI NO: 7446371 NR Description: probable serine/threonine kinase (EC 2.7.1.-)
  misc_feature (1)..(390): Homolog of NCBI NO: 30677901 NR Description: CBL-interacting protein kinase 9 [Arabidopsis
  misc_feature (1)..(411): Homolog of NCBI NO: 18397430 NR Description: CBL-interacting protein kinase 23 [Arabidopsis
  misc_feature (1)..(411): Homolog of NCBI NO: 25387051 NR Description: probable serine/threonine kinase
  misc_feature (1)..(390): Homolog of NCBI NO: 15223317 NR Description: CBL-interacting protein kinase 9 [Arabidopsis
  misc_feature (1)..(390): Homolog of NCBI NO: 14423524 NR Description: similar to wpk4 protein kinase [Arabidopsis
  misc_feature (1)..(390): Homolog of NCBI NO: 30677898 NR Description: CBL-interacting protein kinase 9 [Arabidopsis
  misc_feature (1)..(390): Homolog of NCBI NO: 25387057 NR Description: protein T25K16.13 [imported] - Arabidopsis
  misc_feature (1)..(385): Homolog of NCBI NO: 7446372 NR Description: probable serine/threonine kinase (EC 2.7.1.-)
  misc_feature (1)..(390): Homolog of NCBI NO: 30677898 NR Description: CBL-interacting protein kinase 9 [Arabidopsis
  misc_feature (1)..(390): Homolog of NCBI NO: 14423524 NR Description: similar to wpk4 protein kinase [Arabidopsis
  misc_feature (1)..(390): Homolog of NCBI NO: 15223317 NR Description: CBL-interacting protein kinase 9 [Arabidopsis
  misc_feature (1)..(411): Homolog of NCBI NO: 25387051 NR Description: probable serine/threonine kinase
  misc_feature (1)..(411): Homolog of NCBI NO: 18397430 NR Description: CBL-interacting protein kinase 23 [Arabidopsis
MIAQIKREISTMKLIKHPNVIRMFEVMASKTKIYFVLEFVTGGELFDKISSNGRLKEDEARKYFQQLINAVDYCHSRGVYHRDLKPENLLLDANGALKVSDFGLSALPQQVREDGLLHTTCGTPNYVAPEVINNKGYDGAKADLWSCGVILFVLMAGYLPFEDSNLTSLYKKIFKAEFTCPPWFSASAKKLIKRILDPNPATRITFAEVIENEWFKKGYKAPKFENADVSLDDVDAIFDDSGESKNLVVERREEGLKTPVTMNAFELISTSQGLNLGSLFEKQMGLVKRKTRFTSKSSANEIVTKIEAAAAPMGFDVKTNNYKMKLTGEKSGRKGQLAVATEVFQVAPSLYMVEMRKSGGDTLEFHKFYKNLTTGLKDIVWKTIDEEKEEGTDGGGTNGAMANRTIAKQST

SEQ ID NO: 48681 - protein, 400 aa, Arabidopsis thaliana
  peptide (1)..(400): Ceres Seq. ID no. 13591934
  misc_feature (1)..(204): Pfam Name: Protein kinase domain Pfam Description: Protein kinase domain
  misc_feature (1)..(204): Pfam Name: Protein kinase domain Pfam Description: Protein kinase domain
  misc_feature (1)..(377): Homolog of NCBI NO: 34902248 NR Description: Putative serine/threonine kinase
  misc_feature (1)..(374): Homolog of NCBI NO: 7446372 NR Description: probable serine/threonine kinase (EC 2.7.1.-)
  misc_feature (1)..(376): Homolog of NCBI NO: 7446371 NR Description: probable serine/threonine kinase (EC 2.7.1.-)
  misc_feature (1)..(379): Homolog of NCBI NO: 25387057 NR Description: protein T25K16.13 [imported] - Arabidopsis
  misc_feature (1)..(379): Homolog of NCBI NO: 30677901 NR Description: CBL-interacting protein kinase 9 [Arabidopsis
  misc_feature (1)..(377): Homolog of NCBI NO: 34902248 NR Description: Putative serine/threonine kinase
  misc_feature (1)..(376): Homolog of NCBI NO: 7446371 NR Description: probable serine/threonine kinase (EC 2.7.1.-)
  misc_feature (1)..(379): Homolog of NCBI NO: 30677901 NR Description: CBL-interacting protein kinase 9 [Arabidopsis
  misc_feature (1)..(400): Homolog of NCBI NO: 18397430 NR Description: CBL-interacting protein kinase 23 [Arabidopsis
  misc_feature (1)..(400): Homolog of NCBI NO: 25387051 NR Description: probable serine/threonine kinase
  misc_feature (1)..(379): Homolog of NCBI NO: 15223317 NR Description: CBL-interacting protein kinase 9 [Arabidopsis
  misc_feature (1)..(379): Homolog of NCBI NO: 14423524 NR Description: similar to wpk4 protein kinase [Arabidopsis
  misc_feature (1)..(379): Homolog of NCBI NO: 30677898 NR Description: CBL-interacting protein kinase 9 [Arabidopsis
  misc_feature (1)..(379): Homolog of NCBI NO: 25387057 NR Description: protein T25K16.13 [imported] - Arabidopsis
  misc_feature (1)..(374): Homolog of NCBI NO: 7446372 NR Description: probable serine/threonine kinase (EC 2.7.1.-)
  misc_feature (1)..(379): Homolog of NCBI NO: 30677898 NR Description: CBL-interacting protein kinase 9 [Arabidopsis
  misc_feature (1)..(379): Homolog of NCBI NO: 14423524 NR Description: similar to wpk4 protein kinase [Arabidopsis
  misc_feature (1)..(379): Homolog of NCBI NO: 15223317 NR Description: CBL-interacting protein kinase 9 [Arabidopsis
  misc_feature (1)..(400): Homolog of NCBI NO: 25387051 NR Description: probable serine/threonine kinase
  misc_feature (1)..(400): Homolog of NCBI NO: 18397430 NR Description: CBL-interacting protein kinase 23 [Arabidopsis
MKLIKHPNVIRMFEVMASKTKIYFVLEFVTGGELFDKISSNGRLKEDEARKYFQQLINAVDYCHSRGVYHRDLKPENLLLDANGALKVSDFGLSALPQQVREDGLLHTTCGTPNYVAPEVINNKGYDGAKADLWSCGVILFVLMAGYLPFEDSNLTSLYKKIFKAEFTCPPWFSASAKKLIKRILDPNPATRITFAEVIENEWFKKGYKAPKFENADVSLDDVDAIFDDSGESKNLVVERREEGLKTPVTMNAFELISTSQGLNLGSLFEKQMGLVKRKTRFTSKSSANEIVTKIEAAAAPMGFDVKTNNYKMKLTGEKSGRKGQLAVATEVFQVAPSLYMVEMRKSGGDTLEFHKFYKNLTTGLKDIVWKTIDEEKEEGTDGGGTNGAMANRTIAKQST

SEQ ID NO: 48682 - DNA, 2092 bp, Arabidopsis thaliana
  misc_feature (1)..(2092): Ceres Seq. ID no. 13592139
  misc_feature: MA Experiment ID: 20000173 Result: Down-regulated in Transcription
  misc_feature: MA Experiment 20000173 PARAMETER Experiment Name: At_42deg_Heat_P Parameter: Age (day) Value: 14
  misc_feature: MA Experiment 20000173 PARAMETER Experiment Name: At_42deg_Heat_P Parameter: Organism Value: A. thaliana
  misc_feature: MA Experiment 20000173 PARAMETER Experiment Name: At_42deg_Heat_P Parameter: Plant Line Value: WS
  misc_feature: MA Experiment 20000173 PARAMETER Experiment Name: At_42deg_Heat_P Parameter: Temperature (deg C) Value: 42 vs. 22
  misc_feature: MA Experiment 20000173 PARAMETER Experiment Name: At_42deg_Heat_P Parameter: Timepoint (hr) Value: 6
  misc_feature: MA Experiment 20000173 PARAMETER Experiment Name: At_42deg_Heat_P Parameter: Tissue Value: Aerial
  misc_feature: MA Experiment ID: 20000180 Result: Up-regulated in Transcription
  misc_feature: MA Experiment 20000180 PARAMETER Experiment Name: At_Germinating_Seeds_P Parameter: Age (hr) Value: 24 vs. 0
  misc_feature: MA Experiment 20000180 PARAMETER Experiment Name: At_Germinating_Seeds_P Parameter: Tissue Value: Germinating Seeds
  misc_feature: MA Experiment ID: 20000235 Result: Up-regulated in Transcription
  misc_feature: MA Experiment 20000235 PARAMETER Experiment Name: At_Siliques_P Parameter: Age (day) Value: 21
  misc_feature: MA Experiment 20000235 PARAMETER Experiment Name: At_Siliques_P Parameter: Organism Value: A. thaliana
  misc_feature: MA Experiment 20000235 PARAMETER Experiment Name: At_Siliques_P Parameter: Plant Line Value: WS
  misc_feature: MA Experiment 20000235 PARAMETER Experiment Name: At_Siliques_P Parameter: Tissue Value: 5-10mm Siliques vs. Whole Plant
  misc_feature: MA Experiment ID: 20001451 Result: Down-regulated in Transcription
  misc_feature: MA Experiment 20001451 PARAMETER Experiment Name: At_Far-red-induction_P Parameter: Age (day) Value: 7
  misc_feature: MA Experiment 20001451 PARAMETER Experiment Name: At_Far-red-induction_P Parameter: Light Value: Far-red vs. White
  misc_feature: MA Experiment 20001451 PARAMETER Experiment Name: At_Far-red-induction_P Parameter: Organism Value: A. thaliana
  misc_feature: MA Experiment 20001451 PARAMETER Experiment Name: At_Far-red-induction_P Parameter: Plant Line Value: Columbia
  misc_feature: MA Experiment 20001451 PARAMETER Experiment Name: At_Far-red-induction_P Parameter: Timepoint (hr) Value: 24
  misc_feature: MA Experiment 20001451 PARAMETER Experiment Name: At_Far-red-induction_P Parameter: Tissue Value: Whole Plant
gaacgaaactagaaaacgcctatctctgctcattggcttctccatctccgatcaaatccgcggtcgtagtcagagagagagacaaatggctatgcctagggcaacctctggtcccgcttacccggagaggttctacgctgctgcatcttatgtcggtctcgacggatctgattcgtcggcgaaaaacgtcatctcgaaattccccgatgatactgcactacttctctatgcgctataccagcaggctactgtaggaccatgcaacactccgaaacctagtgcctggagaccagtggagcaaagcaaatggaaaagttggcaggggctcggaaccatgccctccattgaggcaatgcgtctctttgtgaaaattctggaggaagatgatcctggttggtattcgagggcatctaatgatattccagatcctgttgtagatgtccaaattaatagagcaaaagatgagcctgttgttgagaatgggagcacatttagtgagacaaaaacaatttctacggagaatggacgtttggctgaaacccaagataaagatgtagtctcagaagactcaaatactgtttctgtatataaccagtggactgcaccccaaacatcaggtcagcgtccaaaagctcgttacgagcatggcgcagcagttattcaagataagatgtatatatatggtggaaatcacaatggccgttaccttggtgatcttcatgttctagatttaaaaagttggacttggtcaagagttgaaaccaaggttgcaacagaatctcaggaaacatcaactccgacattgttagctccttgtgctggtcattctttgatagcatgggacaacaagctgctgtctatcggtggtcacacaaaggatccctcagaatctatgcaagtgaaggtctttgatccccataccattacatggtcaatgttaaagacatatggaaaaccaccggtttcacgtggaggccagtcagttacaatggtgggtaaaaccttggtgatatttggcgggcaagatgcaaagagatcacttctgaacgatttgcatatacttgacctagacacgatgacctgggatgagatagatgccgtgggtgtatctccatctccgaggtctgatcatgctgctgcagtgcatgcagaacggttccttcttatctttggtggcggctcacatgcaacctgtttcgatgacctgcatgtccttgatttgcaaactatggagtggtcaagaccagcacagcaaggtgatgcaccaactccaagagctggacatgctggcgtgacaattggggagaactggtttattgttggtggcggtgataacaagagtggggcatcggagagtgttgtactaaacatgtcaactcttgcatggtcggtcgttgcttcagttcaaggacgtgtacctcttgctagcgagggattaagtttagtggtgagttcatacaatggtgaagatgtactagtcgcttttggtggatacaatggacgttacaataacgaaattaatcttcttaaaccaagccacaaatcaacattgcaaacaaagactctggaagcgcctttgccaggtagtctttctgctgttaataatgccacaaccagagacattgagtctgaggttgaggtgagccaagaaggcagggtacgggaaattgtcatggacaatgttaaccctggatcaaaggttgaaggaaacagcgaacgcattattgcgactattaaatctgagaaggaagagctggaggcatcactgaacaaagagaggatgcagactctccaactaaggcaagagttaggagaagcagaattacgaaacacagatttgtacaaggaacttcaatctgttcgtggccaacttgcagccgaacaatcaaggtgtttcaaactggaggttgatgttgcagagctaagacaaaagcttcaaacattggaaacactacagaaggaactcgaactcctgcaacgtcaaaaggctgcctcagaacaagctgcaatgaacgctaaacgacagggctcgggtggcgtatggggctggctcgctggaagccctcaggaaaaagatgatgattcgccttga

SEQ ID NO: 48683 - protein, 696 aa, Arabidopsis thaliana
  peptide (1)..(696): Ceres Seq. ID no. 13592140
  misc_feature (40)..(131): Pfam Name: Acyl CoA binding protein Pfam Description: Acyl CoA binding protein
  misc_feature (199)..(447): Homolog of NCBI NO: 15221823 NR Description: Kelch repeat-containing protein [Arabidopsis
  misc_feature (190)..(447): Homolog of NCBI NO: 25518069 NR Description: F25I16.5 protein - Arabidopsis thaliana
  misc_feature (199)..(608): Homolog of NCBI NO: 34905476 NR Description: P0682B08.13 [Oryza sativa (japonica
  misc_feature (566)..(691): Homolog of NCBI NO: 22327105 NR Description: acyl CoA binding protein (ACBP) family
  misc_feature (171)..(573): Homolog of NCBI NO: 30686896 NR Description: RanGAP1 interacting protein [Arabidopsis
  misc_feature (171)..(573): Homolog of NCBI NO: 21950739 NR Description: RanGAP1 interacting protein [Arabidopsis thaliana]
  misc_feature (183)..(682): Homolog of NCBI NO: 15724206 NR Description: AT5g04420/T32M21_20 [Arabidopsis thaliana]
  misc_feature (183)..(682): Homolog of NCBI NO: 15237715 NR Description: Kelch repeat-containing protein [Arabidopsis
  misc_feature (31)..(636): Homolog of NCBI NO: 22327105 NR Description: acyl CoA binding protein (ACBP) family
  misc_feature (34)..(693): Homolog of NCBI NO: 40714674 NR Description: putative transcription factor
NETRKRLSLLIGFSISDQIRGRSQRERQMAMPRATSGPAYPERFYAAASYVGLDGSDSSAKNVISKFPDDTALLLYALYQQATVGPCNTPKPSAWRPVEQSKWKSWQGLGTMPSIEAMRLFVKILEEDDPGWYSRASNDIPDPVVDVQINRAKDEPVVENGSTFSETKTISTENGRLAETQDKDVVSEDSNTVSVYNQWTAPQTSGQRPKARYEHGAAVIQDKMYIYGGNHNGRYLGDLHVLDLKSWTWSRVETKVATESQETSTPTLLAPCAGHSLIAWDNKLLSIGGHTKDPSESMQVKVFDPHTITWSMLKTYGKPPVSRGGQSVTMVGKTLVIFGGQDAKRSLLNDLHILDLDTMTWDEIDAVGVSPSPRSDHAAAVHAERFLLIFGGGSHATCFDDLHVLDLQTMEWSRPAQQGDAPTPRAGHAGVTIGENWFIVGGGDNKSGASESVVLNMSTLAWSVVASVQGRVPLASEGLSLVVSSYNGEDVLVAFGGYNGRYNNEINLLKPSHKSTLQTKTLEAPLPGSLSAVNNATTRDIESEVEVSQEGRVREIVMDNVNPGSKVEGNSERIIATIKSEKEELEASLNKERMQTLQLRQELGEAELRNTDLYKELQSVRGQLAAEQSRCFKLEVDVAELRQKLQTLETLQKELELLQRQKAASEQAAMNAKRQGSGGVWGWLAGSPQEKDDDSP

SEQ ID NO: 48684 - protein, 668 aa, Arabidopsis thaliana
  peptide (1)..(668): Ceres Seq. ID no. 13592141
  misc_feature (12)..(103): Pfam Name: Acyl CoA binding protein Pfam Description: Acyl CoA binding protein
  misc_feature (171)..(419): Homolog of NCBI NO: 15221823 NR Description: Kelch repeat-containing protein [Arabidopsis
  misc_feature (162)..(419): Homolog of NCBI NO: 25518069 NR Description: F25I16.5 protein - Arabidopsis thaliana
  misc_feature (171)..(580): Homolog of NCBI NO: 34905476 NR Description: P0682B08.13 [Oryza sativa (japonica
  misc_feature (538)..(663): Homolog of NCBI NO: 22327105 NR Description: acyl CoA binding protein (ACBP) family
  misc_feature (143)..(545): Homolog of NCBI NO: 30686896 NR Description: RanGAP1 interacting protein [Arabidopsis
  misc_feature (143)..(545): Homolog of NCBI NO: 21950739 NR Description: RanGAP1 interacting protein [Arabidopsis thaliana]
  misc_feature (155)..(654): Homolog of NCBI NO: 15724206 NR Description: AT5g04420/T32M21_20 [Arabidopsis thaliana]
  misc_feature (155)..(654): Homolog of NCBI NO: 15237715 NR Description: Kelch repeat-containing protein [Arabidopsis
  misc_feature (3)..(608): Homolog of NCBI NO: 22327105 NR Description: acyl CoA binding protein (ACBP) family
  misc_feature (6)..(665): Homolog of NCBI NO: 40714674 NR Description: putative transcription factor
MAMPRATSGPAYPERFYAAASYVGLDGSDSSAKNVISKFPDDTALLLYALYQQATVGPCNTPKPSAWRPVEQSKWKSWQGLGTMPSIEAMRLFVKILEEDDPGWYSRASNDIPDPVVDVQINRAKDEPVVENGSTFSETKTISTENGRLAETQDKDVVSEDSNTVSVYNQWTAPQTSGQRPKARYEHGAAVIQDKMYIYGGNHNGRYLGDLHVLDLKSWTWSRVETKVATESQETSTPTLLAPCAGHSLIAWDNKLLSIGGHTKDPSESMQVKVFDPHTITWSMLKTYGKPPVSRGGQSVTMVGKTLVIFGGQDAKRSLLNDLHILDLDTMTWDEIDAVGVSPSPRSDHAAAVHAERFLLIFGGGSHATCFDDLHVLDLQTMEWSRPAQQGDAPTPRAGHAGVTIGENWFIVGGGDNKSGASESVVLNMSTLAWSVVASVQGRVPLASEGLSLVVSSYNGEDVLVAFGGYNGRYNNEINLLKPSHKSTLQTKTLEAPLPGSLSAVNNATTRDIESEVEVSQEGRVREIVMDNVNPGSKVEGNSERIIATIKSEKEELEASLNKERMQTLQLRQELGEAELRNTDLYKELQSVRGQLAAEQSRCFKLEVDVAELRQKLQTLETLQKELELLQRQKAASEQAAMNAKRQGSGGVWGWLAGSPQEKDDDSP

SEQ ID NO: 48685 - protein, 666 aa, Arabidopsis thaliana
  peptide (1)..(666): Ceres Seq. ID no. 13592142
  misc_feature (10)..(101): Pfam Name: Acyl CoA binding protein Pfam Description: Acyl CoA binding protein
  misc_feature (169)..(417): Homolog of NCBI NO: 15221823 NR Description: Kelch repeat-containing protein [Arabidopsis
  misc_feature (160)..(417): Homolog of NCBI NO: 25518069 NR Description: F25I16.5 protein - Arabidopsis thaliana
  misc_feature (169)..(578): Homolog of NCBI NO: 34905476 NR Description: P0682B08.13 [Oryza sativa (japonica
  misc_feature (536)..(661): Homolog of NCBI NO: 22327105 NR Description: acyl CoA binding protein (ACBP) family
  misc_feature (141)..(543): Homolog of NCBI NO: 30686896 NR Description: RanGAP1 interacting protein [Arabidopsis
  misc_feature (141)..(543): Homolog of NCBI NO: 21950739 NR Description: RanGAP1 interacting protein [Arabidopsis thaliana]
  misc_feature (153)..(652): Homolog of NCBI NO: 15724206 NR Description: AT5g04420/T32M21_20 [Arabidopsis thaliana]
  misc_feature (153)..(652): Homolog of NCBI NO: 15237715 NR Description: Kelch repeat-containing protein [Arabidopsis
  misc_feature (1)..(606): Homolog of NCBI NO: 22327105 NR Description: acyl CoA binding protein (ACBP) family
  misc_feature (4)..(663): Homolog of NCBI NO: 40714674 NR Description: putative transcription factor
MPRATSGPAYPERFYAAASYVGLDGSDSSAKNVISKFPDDTALLLYALYQQATVGPCNTPKPSAWRPVEQSKWKSWQGLGTMPSIEAMRLFVKILEEDDPGWYSRASNDIPDPVVDVQINRAKDEPVVENGSTFSETKTISTENGRLAETQDKDVVSEDSNTVSVYNQWTAPQTSGQRPKARYEHGAAVIQDKMYIYGGNHNGRYLGDLHVLDLKSWTWSRVETKVATESQETSTPTLLAPCAGHSLIAWDNKLLSIGGHTKDPSESMQVKVFDPHTITWSMLKTYGKPPVSRGGQSVTMVGKTLVIFGGQDAKRSLLNDLHILDLDTMTWDEIDAVGVSPSPRSDHAAAVHAERFLLIFGGGSHATCFDDLHVLDLQTMEWSRPAQQGDAPTPRAGHAGVTIGENWFIVGGGDNKSGASESVVLNMSTLAWSVVASVQGRVPLASEGLSLVVSSYNGEDVLVAFGGYNGRYNNEINLLKPSHKSTLQTKTLEAPLPGSLSAVNNATTRDIESEVEVSQEGRVREIVMDNVNPGSKVEGNSERIIATIKSEKEELEASLNKERMQTLQLRQELGEAELRNTDLYKELQSVRGQLAAEQSRCFKLEVDVAELRQKLQTLETLQKELELLQRQKAASEQAAMNAKRQGSGGVWGWLAGSPQEKDDDSP

SEQ ID NO: 48686 - DNA, 2611 bp, Arabidopsis thaliana; identical to SEQ ID NO: 44956
  misc_feature (1)..(2611): Ceres Seq. ID no. 13591498
  misc_feature: MA Experiment ID: 20000179 Result: Down-regulated in Transcription
  misc_feature: MA Experiment 20000179 PARAMETER Experiment Name: At_Germinating_Seeds_P Parameter: Age (hr) Value: 6 vs. 0
  misc_feature: MA Experiment 20000179 PARAMETER Experiment Name: At_Germinating_Seeds_P Parameter: Tissue Value: Germinating Seeds
  misc_feature: MA Experiment ID: 20000180 Result: Down-regulated in Transcription
  misc_feature: MA Experiment 20000180 PARAMETER Experiment Name: At_Germinating_Seeds_P Parameter: Age (hr) Value: 24 vs. 0
  misc_feature: MA Experiment 20000180 PARAMETER Experiment Name: At_Germinating_Seeds_P Parameter: Tissue Value: Germinating Seeds
  misc_feature: MA Experiment ID: 20000184 Result: Up-regulated in Transcription
  misc_feature: MA Experiment 20000184 PARAMETER Experiment Name: At_Shoots__P Parameter: Age (day) Value: 7
  misc_feature: MA Experiment 20000184 PARAMETER Experiment Name: At_Shoots__P Parameter: Tissue Value: Shoots vs. Whole Plant
  misc_feature: MA Experiment ID: 20000234 Result: Up-regulated in Transcription
  misc_feature: MA Experiment 20000234 PARAMETER Experiment Name: At_Siliques_P Parameter: Age (day) Value: 21
  misc_feature: MA Experiment 20000234 PARAMETER Experiment Name: At_Siliques_P Parameter: Organism Value: A. thaliana
  misc_feature: MA Experiment 20000234 PARAMETER Experiment Name: At_Siliques_P Parameter: Plant Line Value: WS
  misc_feature: MA Experiment 20000234 PARAMETER Experiment Name: At_Siliques_P Parameter: Tissue Value: Less Than 5mm Siliques vs. Whole Plant
  misc_feature: MA Experiment ID: 20000235 Result: Up-regulated in Transcription
  misc_feature: MA Experiment 20000235 PARAMETER Experiment Name: At_Siliques_P Parameter: Age (day) Value: 21
  misc_feature: MA Experiment 20000235 PARAMETER Experiment Name: At_Siliques_P Parameter: Organism Value: A. thaliana
  misc_feature: MA Experiment 20000235 PARAMETER Experiment Name: At_Siliques_P Parameter: Plant Line Value: WS
  misc_feature: MA Experiment 20000235 PARAMETER Experiment Name: At_Siliques_P Parameter: Tissue Value: 5-10mm Siliques vs. Whole Plant
  misc_feature: MA Experiment ID: 20000794 Result: Up-regulated in Transcription
  misc_feature: MA Experiment 20000794 PARAMETER Experiment Name: At_Petals_P Parameter: Age (day) Value: 23-25 days
  misc_feature: MA Experiment 20000794 PARAMETER Experiment Name: At_Petals_P Parameter: Plant Line Value: WS
  misc_feature: MA Experiment 20000794 PARAMETER Experiment Name: At_Petals_P Parameter: Tissue Value: Petals vs. Whole plant
  misc_feature: MA Experiment ID: 20001757 Result: Down-regulated in Transcription
  misc_feature: MA Experiment 20001757 PARAMETER Experiment Name: At_50mM_NH4NO3_L-to-H_P Parameter: Timepoint (hr) Value: 6
  misc_feature: MA Experiment 20001757 PARAMETER Experiment Name: At_50mM_NH4NO3_L-to-H_P Parameter: Tissue Value: Leaf
  misc_feature: MA Experiment 20001757 PARAMETER Experiment Name: At_50mM_NH4NO3_L-to-H_P Parameter: Treatment Value: 50mM NH4NO3 vs 100mM Mannitol

SEQ ID NO: 48687 - protein, 798 aa, Arabidopsis thaliana; identical to SEQ ID NO: 44957
  peptide (1)..(798): Ceres Seq. ID no. 13591499
  misc_feature (403)..(502): Pfam Name: PA domain Pfam Description: PA domain
  misc_feature (403)..(502): Pfam Name: PA domain Pfam Description: PA domain
  misc_feature (403)..(502): Pfam Name: PA domain Pfam Description: PA domain
  misc_feature (403)..(502): Pfam Name: PA domain Pfam Description: PA domain
  misc_feature (403)..(502): Pfam Name: PA domain Pfam Description: PA domain
  misc_feature (106)..(796): Homolog of NCBI NO: 24414066 NR Description: OJ1136_A10.14 [Oryza sativa (japonica
  misc_feature (35)..(795): Homolog of NCBI NO: 30697281 NR Description: subtilisin-like serine protease [Arabidopsis
  misc_feature (46)..(797): Homolog of NCBI NO: 30678198 NR Description: subtilisin-like serine protease, putative
  misc_feature (243)..(798): Homolog of NCBI NO: 29786399 NR Description: putative serine protease [Populus euramericana]
  misc_feature (42)..(797): Homolog of NCBI NO: 7435656 NR Description: subtilisin-like proteinase (EC 3.4.21.-) 2 -
  misc_feature (106)..(796): Homolog of NCBI NO: 24414066 NR Description: OJ1136_A10.14 [Oryza sativa (japonica
  misc_feature (46)..(797): Homolog of NCBI NO: 30678198 NR Description: subtilisin-like serine protease, putative
  misc_feature (42)..(797): Homolog of NCBI NO: 7435656 NR Description: subtilisin-like proteinase (EC 3.4.21.-) 2 -
  misc_feature (243)..(798): Homolog of NCBI NO: 29786399 NR Description: putative serine protease [Populus euramericana]
  misc_feature (46)..(797): Homolog of NCBI NO: 30678198 NR Description: subtilisin-like serine protease, putative
  misc_feature (35)..(795): Homolog of NCBI NO: 30697281 NR Description: subtilisin-like serine protease [Arabidopsis
  misc_feature (106)..(796): Homolog of NCBI NO: 24414066 NR Description: OJ1136_A10.14 [Oryza sativa (japonica
  misc_feature (52)..(798): Homolog of NCBI NO: 7435657 NR Description: subtilisin-like proteinase (EC 3.4.21.-) 1 -
  misc_feature (69)..(798): Homolog of NCBI NO: 14488360 NR Description: putative serine protease [Oryza sativa (japonica
  misc_feature (42)..(797): Homolog of NCBI NO: 18396193 NR Description: subtilisin-like serine protease, putative
  misc_feature (42)..(797): Homolog of NCBI NO: 22331076 NR Description: subtilisin-like serine protease, putative
  misc_feature (68)..(797): Homolog of NCBI NO: 18423316 NR Description: subtilisin-like serine protease [Arabidopsis
  misc_feature (106)..(796): Homolog of NCBI NO: 24414066 NR Description: OJ1136_A10.14 [Oryza sativa (japonica
  misc_feature (52)..(798): Homolog of NCBI NO: 7435657 NR Description: subtilisin-like proteinase (EC 3.4.21.-) 1 -
  misc_feature (69)..(798): Homolog of NCBI NO: 14488360 NR Description: putative serine protease [Oryza sativa (japonica
  misc_feature (42)..(797): Homolog of NCBI NO: 18396193 NR Description: subtilisin-like serine protease, putative
  misc_feature (42)..(797): Homolog of NCBI NO: 22331076 NR Description: subtilisin-like serine protease, putative
  misc_feature (68)..(797): Homolog of NCBI NO: 18423316 NR Description: subtilisin-like serine protease [Arabidopsis
  misc_feature (42)..(797): Homolog of NCBI NO: 7435656 NR Description: subtilisin-like proteinase (EC 3.4.21.-) 2 -
  misc_feature (243)..(798): Homolog of NCBI NO: 29786399 NR Description: putative serine protease [Populus euramericana]
  misc_feature (46)..(797): Homolog of NCBI NO: 30678198 NR Description: subtilisin-like serine protease, putative
  misc_feature (52)..(798): Homolog of NCBI NO: 7435657 NR Description: subtilisin-like proteinase (EC 3.4.21.-) 1 -
  misc_feature (69)..(798): Homolog of NCBI NO: 14488360 NR Description: putative serine protease [Oryza sativa (japonica
  misc_feature (42)..(797): Homolog of NCBI NO: 18396193 NR Description: subtilisin-like serine protease, putative
  misc_feature (42)..(797): Homolog of NCBI NO: 22331076 NR Description: subtilisin-like serine protease, putative
  misc_feature (68)..(797): Homolog of NCBI NO: 18423316 NR Description: subtilisin-like serine protease [Arabidopsis
  misc_feature (42)..(797): Homolog of NCBI NO: 7435656 NR Description: subtilisin-like proteinase (EC 3.4.21.-) 2 -
  misc_feature (243)..(798): Homolog of NCBI NO: 29786399 NR Description: putative serine protease [Populus euramericana]
  misc_feature (46)..(797): Homolog of NCBI NO: 30678198 NR Description: subtilisin-like serine protease, putative
  misc_feature (35)..(795): Homolog of NCBI NO: 30697281 NR Description: subtilisin-like serine protease [Arabidopsis
  misc_feature (35)..(795): Homolog of NCBI NO: 30697281 NR Description: subtilisin-like serine protease [Arabidopsis
  misc_feature (106)..(796): Homolog of NCBI NO: 24414066 NR Description: OJ1136_A10.14 [Oryza sativa (japonica
  misc_feature (52)..(798): Homolog of NCBI NO: 7435657 NR Description: subtilisin-like proteinase (EC 3.4.21.-) 1 -
  misc_feature (69)..(798): Homolog of NCBI NO: 14488360 NR Description: putative serine protease [Oryza sativa (japonica
  misc_feature (42)..(797): Homolog of NCBI NO: 18396193 NR Description: subtilisin-like serine protease, putative
  misc_feature (42)..(797): Homolog of NCBI NO: 22331076 NR Description: subtilisin-like serine protease, putative
  misc_feature (68)..(797): Homolog of NCBI NO: 18423316 NR Description: subtilisin-like serine protease [Arabidopsis
  misc_feature (42)..(797): Homolog of NCBI NO: 7435656 NR Description: subtilisin-like proteinase (EC 3.4.21.-) 2 -
  misc_feature (243)..(798): Homolog of NCBI NO: 29786399 NR Description: putative serine protease [Populus euramericana]
  misc_feature (35)..(795): Homolog of NCBI NO: 30697281 NR Description: subtilisin-like serine protease [Arabidopsis
  misc_feature (68)..(797): Homolog of NCBI NO: 18423316 NR Description: subtilisin-like serine protease [Arabidopsis
  misc_feature (42)..(797): Homolog of NCBI NO: 22331076 NR Description: subtilisin-like serine protease, putative
  misc_feature (42)..(797): Homolog of NCBI NO: 18396193 NR Description: subtilisin-like serine protease, putative
  misc_feature (69)..(798): Homolog of NCBI NO: 14488360 NR Description: putative serine protease [Oryza sativa (japonica
  misc_feature (52)..(798): Homolog of NCBI NO: 7435657 NR Description: subtilisin-like proteinase (EC 3.4.21.-) 1 -

SEQ ID NO: 48688 - protein, 757 aa, Arabidopsis thaliana; identical to SEQ ID NO: 44958
  peptide (1)..(757): Ceres Seq. ID no. 13591500
  misc_feature (362)..(461): Pfam Name: PA domain Pfam Description: PA domain
  misc_feature (362)..(461): Pfam Name: PA domain Pfam Description: PA domain
  misc_feature (362)..(461): Pfam Name: PA domain Pfam Description: PA domain
  misc_feature (362)..(461): Pfam Name: PA domain Pfam Description: PA domain
  misc_feature (362)..(461): Pfam Name: PA domain Pfam Description: PA domain
  misc_feature (65)..(755): Homolog of NCBI NO: 24414066 NR Description: OJ1136_A10.14 [Oryza sativa (japonica
  misc_feature (1)..(754): Homolog of NCBI NO: 30697281 NR Description: subtilisin-like serine protease [Arabidopsis
  misc_feature (5)..(756): Homolog of NCBI NO: 30678198 NR Description: subtilisin-like serine protease, putative
  misc_feature (202)..(757): Homolog of NCBI NO: 29786399 NR Description: putative serine protease [Populus euramericana]
  misc_feature (1)..(756): Homolog of NCBI NO: 7435656 NR Description: subtilisin-like proteinase (EC 3.4.21.-) 2 -
  misc_feature (65)..(755): Homolog of NCBI NO: 24414066 NR Description: OJ1136_A10.14 [Oryza sativa (japonica
  misc_feature (5)..(756): Homolog of NCBI NO: 30678198 NR Description: subtilisin-like serine protease, putative
  misc_feature (1)..(756): Homolog of NCBI NO: 7435656 NR Description: subtilisin-like proteinase (EC 3.4.21.-) 2 -
  misc_feature (202)..(757): Homolog of NCBI NO: 29786399 NR Description: putative serine protease [Populus euramericana]
  misc_feature (5)..(756): Homolog of NCBI NO: 30678198 NR Description: subtilisin-like serine protease, putative
  misc_feature (1)..(754): Homolog of NCBI NO: 30697281 NR Description: subtilisin-like serine protease [Arabidopsis
  misc_feature (65)..(755): Homolog of NCBI NO: 24414066 NR Description: OJ1136_A10.14 [Oryza sativa (japonica
  misc_feature (11)..(757): Homolog of NCBI NO: 7435657 NR Description: subtilisin-like proteinase (EC 3.4.21.-) 1 -
  misc_feature (28)..(757): Homolog of NCBI NO: 14488360 NR Description: putative serine protease [Oryza sativa (japonica
  misc_feature (1)..(756): Homolog of NCBI NO: 18396193 NR Description: subtilisin-like serine protease, putative
  misc_feature (1)..(756): Homolog of NCBI NO: 22331076 NR Description: subtilisin-like serine protease, putative
  misc_feature (27)..(756): Homolog of NCBI NO: 18423316 NR Description: subtilisin-like serine protease [Arabidopsis
  misc_feature (65)..(755): Homolog of NCBI NO: 24414066 NR Description: OJ1136_A10.14 [Oryza sativa (japonica
  misc_feature (11)..(757): Homolog of NCBI NO: 7435657 NR Description: subtilisin-like proteinase (EC 3.4.21.-) 1 -
  misc_feature (28)..(757): Homolog of NCBI NO: 14488360 NR Description: putative serine protease [Oryza sativa (japonica
  misc_feature (1)..(756): Homolog of NCBI NO: 18396193 NR Description: subtilisin-like serine protease, putative
  misc_feature (1)..(756): Homolog of NCBI NO: 22331076 NR Description: subtilisin-like serine protease, putative
  misc_feature (27)..(756): Homolog of NCBI NO: 18423316 NR Description: subtilisin-like serine protease [Arabidopsis
  misc_feature (1)..(756): Homolog of NCBI NO: 7435656 NR Description: subtilisin-like proteinase (EC 3.4.21.-) 2 -
  misc_feature (202)..(757): Homolog of NCBI NO: 29786399 NR Description: putative serine protease [Populus euramericana]
  misc_feature (5)..(756): Homolog of NCBI NO: 30678198 NR Description: subtilisin-like serine protease, putative
  misc_feature (11)..(757): Homolog of NCBI NO: 7435657 NR Description: subtilisin-like proteinase (EC 3.4.21.-) 1 -
  misc_feature (28)..(757): Homolog of NCBI NO: 14488360 NR Description: putative serine protease [Oryza sativa (japonica
  misc_feature (1)..(756): Homolog of NCBI NO: 18396193 NR Description: subtilisin-like serine protease, putative
  misc_feature (1)..(756): Homolog of NCBI NO: 22331076 NR Description: subtilisin-like serine protease, putative
  misc_feature (27)..(756): Homolog of NCBI NO: 18423316 NR Description: subtilisin-like serine protease [Arabidopsis
  misc_feature (1)..(756): Homolog of NCBI NO: 7435656 NR Description: subtilisin-like proteinase (EC 3.4.21.-) 2 -
  misc_feature (202)..(757): Homolog of NCBI NO: 29786399 NR Description: putative serine protease [Populus euramericana]
  misc_feature (5)..(756): Homolog of NCBI NO: 30678198 NR Description: subtilisin-like serine protease, putative
  misc_feature (1)..(754): Homolog of NCBI NO: 30697281 NR Description: subtilisin-like serine protease [Arabidopsis
  misc_feature (1)..(754): Homolog of NCBI NO: 30697281 NR Description: subtilisin-like serine protease [Arabidopsis
  misc_feature (65)..(755): Homolog of NCBI NO: 24414066 NR Description: OJ1136_A10.14 [Oryza sativa (japonica
  misc_feature (11)..(757): Homolog of NCBI NO: 7435657 NR Description: subtilisin-like proteinase (EC 3.4.21.-) 1 -
  misc_feature (28)..(757): Homolog of NCBI NO: 14488360 NR Description: putative serine protease [Oryza sativa (japonica
  misc_feature (1)..(756): Homolog of NCBI NO: 18396193 NR Description: subtilisin-like serine protease, putative
  misc_feature (1)..(756): Homolog of NCBI NO: 22331076 NR Description: subtilisin-like serine protease, putative
  misc_feature (27)..(756): Homolog of NCBI NO: 18423316 NR Description: subtilisin-like serine protease [Arabidopsis
  misc_feature (1)..(756): Homolog of NCBI NO: 7435656 NR Description: subtilisin-like proteinase (EC 3.4.21.-) 2 -
  misc_feature (202)..(757): Homolog of NCBI NO: 29786399 NR Description: putative serine protease [Populus euramericana]
  misc_feature (1)..(754): Homolog of NCBI NO: 30697281 NR Description: subtilisin-like serine protease [Arabidopsis
  misc_feature (27)..(756): Homolog of NCBI NO: 18423316 NR Description: subtilisin-like serine protease [Arabidopsis
  misc_feature (1)..(756): Homolog of NCBI NO: 22331076 NR Description: subtilisin-like serine protease, putative
  misc_feature (1)..(756): Homolog of NCBI NO: 18396193 NR Description: subtilisin-like serine protease, putative
  misc_feature (28)..(757): Homolog of NCBI NO: 14488360 NR Description: putative serine protease [Oryza sativa (japonica
  misc_feature (11)..(757): Homolog of NCBI NO: 7435657 NR Description: subtilisin-like proteinase (EC 3.4.21.-) 1 -

SEQ ID NO: 48689 - protein, 722 aa, Arabidopsis thaliana; identical to SEQ ID NO: 44959
  peptide (1)..(722): Ceres Seq. ID no. 13591501
  misc_feature (327)..(426): Pfam Name: PA domain Pfam Description: PA domain
  misc_feature (327)..(426): Pfam Name: PA domain Pfam Description: PA domain
  misc_feature (327)..(426): Pfam Name: PA domain Pfam Description: PA domain
  misc_feature (327)..(426): Pfam Name: PA domain Pfam Description: PA domain
  misc_feature (327)..(426): Pfam Name: PA domain Pfam Description: PA domain
  misc_feature (30)..(720): Homolog of NCBI NO: 24414066 NR Description: OJ1136_A10.14 [Oryza sativa (japonica
  misc_feature (1)..(719): Homolog of NCBI NO: 30697281 NR Description: subtilisin-like serine protease [Arabidopsis
  misc_feature (1)..(721): Homolog of NCBI NO: 30678198 NR Description: subtilisin-like serine protease, putative
  misc_feature (167)..(722): Homolog of NCBI NO: 29786399 NR Description: putative serine protease [Populus euramericana]
  misc_feature (1)..(721): Homolog of NCBI NO: 7435656 NR Description: subtilisin-like proteinase (EC 3.4.21.-) 2 -
  misc_feature (30)..(720): Homolog of NCBI NO: 24414066 NR Description: OJ1136_A10.14 [Oryza sativa (japonica
  misc_feature (1)..(721): Homolog of NCBI NO: 30678198 NR Description: subtilisin-like serine protease, putative
  misc_feature (1)..(721): Homolog of NCBI NO: 7435656 NR Description: subtilisin-like proteinase (EC 3.4.21.-) 2 -
  misc_feature (167)..(722): Homolog of NCBI NO: 29786399 NR Description: putative serine protease [Populus euramericana]
  misc_feature (1)..(721): Homolog of NCBI NO: 30678198 NR Description: subtilisin-like serine protease, putative
  misc_feature (1)..(719): Homolog of NCBI NO: 30697281 NR Description: subtilisin-like serine protease [Arabidopsis
  misc_feature (30)..(720): Homolog of NCBI NO: 24414066 NR Description: OJ1136_A10.14 [Oryza sativa (japonica
  misc_feature (1)..(722): Homolog of NCBI NO: 7435657 NR Description: subtilisin-like proteinase (EC 3.4.21.-) 1 -
  misc_feature (1)..(722): Homolog of NCBI NO: 14488360 NR Description: putative serine protease [Oryza sativa (japonica
  misc_feature (1)..(721): Homolog of NCBI NO: 18396193 NR Description: subtilisin-like serine protease, putative
  misc_feature (1)..(721): Homolog of NCBI NO: 22331076 NR Description: subtilisin-like serine protease, putative
  misc_feature (1)..(721): Homolog of NCBI NO: 18423316 NR Description: subtilisin-like serine protease [Arabidopsis
  misc_feature (30)..(720): Homolog of NCBI NO: 24414066 NR Description: OJ1136_A10.14 [Oryza sativa (japonica
  misc_feature (1)..(722): Homolog of NCBI NO: 7435657 NR Description: subtilisin-like proteinase (EC 3.4.21.-) 1 -
  misc_feature (1)..(722): Homolog of NCBI NO: 14488360 NR Description: putative serine protease [Oryza sativa (japonica
  misc_feature (1)..(721): Homolog of NCBI NO: 18396193 NR Description: subtilisin-like serine protease, putative
  misc_feature (1)..(721): Homolog of NCBI NO: 22331076 NR Description: subtilisin-like serine protease, putative
  misc_feature (1)..(721): Homolog of NCBI NO: 18423316 NR Description: subtilisin-like serine protease [Arabidopsis
  misc_feature (1)..(721): Homolog of NCBI NO: 7435656 NR Description: subtilisin-like proteinase (EC 3.4.21.-) 2 -
  misc_feature (167)..(722): Homolog of NCBI NO: 29786399 NR Description: putative serine protease [Populus euramericana]
  misc_feature (1)..(721): Homolog of NCBI NO: 30678198 NR Description: subtilisin-like serine protease, putative
  misc_feature (1)..(722): Homolog of NCBI NO: 7435657 NR Description: subtilisin-like proteinase (EC 3.4.21.-) 1 -
  misc_feature (1)..(722): Homolog of NCBI NO: 14488360 NR Description: putative serine protease [Oryza sativa (japonica
  misc_feature (1)..(721): Homolog of NCBI NO: 18396193 NR Description: subtilisin-like serine protease, putative
  misc_feature (1)..(721): Homolog of NCBI NO: 22331076 NR Description: subtilisin-like serine protease, putative
  misc_feature (1)..(721): Homolog of NCBI NO: 18423316 NR Description: subtilisin-like serine protease [Arabidopsis
  misc_feature (1)..(721): Homolog of NCBI NO: 7435656 NR Description: subtilisin-like proteinase (EC 3.4.21.-) 2 -
  misc_feature (167)..(722): Homolog of NCBI NO: 29786399 NR Description: putative serine protease [Populus euramericana]
  misc_feature (1)..(721): Homolog of NCBI NO: 30678198 NR Description: subtilisin-like serine protease, putative
  misc_feature (1)..(719): Homolog of NCBI NO: 30697281 NR Description: subtilisin-like serine protease [Arabidopsis
  misc_feature (1)..(719): Homolog of NCBI NO: 30697281 NR Description: subtilisin-like serine protease [Arabidopsis
  misc_feature (30)..(720): Homolog of NCBI NO: 24414066 NR Description: OJ1136_A10.14 [Oryza sativa (japonica
  misc_feature (1)..(722): Homolog of NCBI NO: 7435657 NR Description: subtilisin-like proteinase (EC 3.4.21.-) 1 -
  misc_feature (1)..(722): Homolog of NCBI NO: 14488360 NR Description: putative serine protease [Oryza sativa (japonica
  misc_feature (1)..(721): Homolog of NCBI NO: 18396193 NR Description: subtilisin-like serine protease, putative
  misc_feature (1)..(721): Homolog of NCBI NO: 22331076 NR Description: subtilisin-like serine protease, putative
  misc_feature (1)..(721): Homolog of NCBI NO: 18423316 NR Description: subtilisin-like serine protease [Arabidopsis
  misc_feature (1)..(721): Homolog of NCBI NO: 7435656 NR Description: subtilisin-like proteinase (EC 3.4.21.-) 2 -
  misc_feature (167)..(722): Homolog of NCBI NO: 29786399 NR Description: putative serine protease [Populus euramericana]
  misc_feature (1)..(719): Homolog of NCBI NO: 30697281 NR Description: subtilisin-like serine protease [Arabidopsis
  misc_feature (1)..(721): Homolog of NCBI NO: 18423316 NR Description: subtilisin-like serine protease [Arabidopsis
  misc_feature (1)..(721): Homolog of NCBI NO: 22331076 NR Description: subtilisin-like serine protease, putative
  misc_feature (1)..(721): Homolog of NCBI NO: 18396193 NR Description: subtilisin-like serine protease, putative
  misc_feature (1)..(722): Homolog of NCBI NO: 14488360 NR Description: putative serine protease [Oryza sativa (japonica
  misc_feature (1)..(722): Homolog of NCBI NO: 7435657 NR Description: subtilisin-like proteinase (EC 3.4.21.-) 1 -

SEQ ID NO: 48690 - DNA, 1512 bp, Arabidopsis thaliana; identical to SEQ ID NO: 30958
  misc_feature (1)..(1512): Ceres Seq. ID no. 13591994
  misc_feature: MA Experiment ID: 108461 Result: Up-regulated in Transcription
  misc_feature: MA Experiment 108461 PARAMETER Experiment Name: At_Germinating_Seeds_cDNA_P Parameter: Age (day) Value: 1 vs. 0
  misc_feature: MA Experiment 108461 PARAMETER Experiment Name: At_Germinating_Seeds_cDNA_P Parameter: Tissue Value: Germinating Seeds
  misc_feature: MA Experiment ID: 20000173 Result: Down-regulated in Transcription
  misc_feature: MA Experiment 20000173 PARAMETER Experiment Name: At_42deg_Heat_P Parameter: Age (day) Value: 14
  misc_feature: MA Experiment 20000173 PARAMETER Experiment Name: At_42deg_Heat_P Parameter: Organism Value: A. thaliana
  misc_feature: MA Experiment 20000173 PARAMETER Experiment Name: At_42deg_Heat_P Parameter: Plant Line Value: WS
  misc_feature: MA Experiment 20000173 PARAMETER Experiment Name: At_42deg_Heat_P Parameter: Temperature (deg C) Value: 42 vs. 22
  misc_feature: MA Experiment 20000173 PARAMETER Experiment Name: At_42deg_Heat_P Parameter: Timepoint (hr) Value: 6
  misc_feature: MA Experiment 20000173 PARAMETER Experiment Name: At_42deg_Heat_P Parameter: Tissue Value: Aerial
  misc_feature: MA Experiment ID: 20000180 Result: Up-regulated in Transcription
  misc_feature: MA Experiment 20000180 PARAMETER Experiment Name: At_Germinating_Seeds_P Parameter: Age (hr) Value: 24 vs. 0
  misc_feature: MA Experiment 20000180 PARAMETER Experiment Name: At_Germinating_Seeds_P Parameter: Tissue Value: Germinating Seeds
  misc_feature: MA Experiment ID: 20000185 Result: Down-regulated in Transcription
  misc_feature: MA Experiment 20000185 PARAMETER Experiment Name: At_Roots__P Parameter: Age (day) Value: 7 vs. 21
  misc_feature: MA Experiment 20000185 PARAMETER Experiment Name: At_Roots__P Parameter: Organism Value: A. thaliana
  misc_feature: MA Experiment 20000185 PARAMETER Experiment Name: At_Roots__P Parameter: Tissue Value: Roots vs. Whole Plant
  misc_feature: MA Experiment ID: 20000224 Result: Down-regulated in Transcription
  misc_feature: MA Experiment ID: 20000439 Result: Down-regulated in Transcription
  misc_feature: MA Experiment 20000439 PARAMETER Experiment Name: At_Roots__P Parameter: Age (day) Value: 14 vs. 21
  misc_feature: MA Experiment 20000439 PARAMETER Experiment Name: At_Roots__P Parameter: Organism Value: A. thaliana
  misc_feature: MA Experiment 20000439 PARAMETER Experiment Name: At_Roots__P Parameter: Tissue Value: Roots vs. Whole Plant
  misc_feature: MA Experiment ID: 20000573 Result: Down-regulated in Transcription
  misc_feature: MA Experiment 20000573 PARAMETER Experiment Name: At_100uM_ABA_Mutants__P Parameter: Organism Value: A. thaliana
  misc_feature: MA Experiment 20000573 PARAMETER Experiment Name: At_100uM_ABA_Mutants__P Parameter: Plant Line Value: CS22 vs. Ler wt
  misc_feature: MA Experiment 20000573 PARAMETER Experiment Name: At_100uM_ABA_Mutants__P Parameter: Timepoint (hr) Value: N/A
  misc_feature: MA Experiment 20000573 PARAMETER Experiment Name: At_100uM_ABA_Mutants__P Parameter: Tissue Value: Whole Plant
  misc_feature: MA Experiment 20000573 PARAMETER Experiment Name: At_100uM_ABA_Mutants__P Parameter: Treatment Value: None
  misc_feature: MA Experiment ID: 20000794 Result: Down-regulated in Transcription
  misc_feature: MA Experiment 20000794 PARAMETER Experiment Name: At_Petals_P Parameter: Age (day) Value: 23-25 days
  misc_feature: MA Experiment 20000794 PARAMETER Experiment Name: At_Petals_P Parameter: Plant Line Value: WS
  misc_feature: MA Experiment 20000794 PARAMETER Experiment Name: At_Petals_P Parameter: Tissue Value: Petals vs. Whole plant
  misc_feature: MA Experiment ID: 20001906 Result: Down-regulated in Transcription
  misc_feature: MA Experiment 20001906 PARAMETER Experiment Name: At_Drought_Reproduction_P Parameter: Age (day) Value: 35
  misc_feature: MA Experiment 20001906 PARAMETER Experiment Name: At_Drought_Reproduction_P Parameter: Organism Value: A. thaliana
  misc_feature: MA Experiment 20001906 PARAMETER Experiment Name: At_Drought_Reproduction_P Parameter: Plant Line Value: WS
  misc_feature: MA Experiment 20001906 PARAMETER Experiment Name: At_Drought_Reproduction_P Parameter: Timepoint (day) Value: 5
  misc_feature: MA Experiment 20001906 PARAMETER Experiment Name: At_Drought_Reproduction_P Parameter: Tissue Value: Siliques
  misc_feature: MA Experiment 20001906 PARAMETER Experiment Name: At_Drought_Reproduction_P Parameter: Treatment Value: Drought vs. No Drought
  misc_feature: MA Experiment ID: 20001911 Result: Down-regulated in Transcription
  misc_feature: MA Experiment 20001911 PARAMETER Experiment Name: At_Drought_Reproduction_P Parameter: Age (day) Value: 40
  misc_feature: MA Experiment 20001911 PARAMETER Experiment Name: At_Drought_Reproduction_P Parameter: Organism Value: A. thaliana
  misc_feature: MA Experiment 20001911 PARAMETER Experiment Name: At_Drought_Reproduction_P Parameter: Plant Line Value: WS
  misc_feature: MA Experiment 20001911 PARAMETER Experiment Name: At_Drought_Reproduction_P Parameter: Timepoint (day) Value: 10
  misc_feature: MA Experiment 20001911 PARAMETER Experiment Name: At_Drought_Reproduction_P Parameter: Tissue Value: Flowers
  misc_feature: MA Experiment 20001911 PARAMETER Experiment Name: At_Drought_Reproduction_P Parameter: Treatment Value: Drought vs. No Drought

SEQ ID NO: 48691 - protein, 325 aa, Arabidopsis thaliana; identical to SEQ ID NO: 30959
  peptide (1)..(325): Ceres Seq. ID no. 13591995
  misc_feature (41)..(228): Pfam Name: TCP family transcription factor Pfam Description: TCP family transcription factor
  misc_feature (41)..(228): Pfam Name: TCP family transcription factor Pfam Description: TCP family transcription factor
  misc_feature (26)..(138): Homolog of NCBI NO: 26452377 NR Description: unknown protein [Arabidopsis thaliana]
  misc_feature (26)..(138): Homolog of NCBI NO: 15237274 NR Description: TCP family transcription factor, putative
  misc_feature (52)..(176): Homolog of NCBI NO: 20975251 NR Description: transcription factor PCF3 [Oryza sativa (japonica
  misc_feature (16)..(160): Homolog of NCBI NO: 15217857 NR Description: TCP family transcription factor, putative
  misc_feature (20)..(183): Homolog of NCBI NO: 15218305 NR Description: TCP family transcription factor, putative
  misc_feature (26)..(138): Homolog of NCBI NO: 26452377 NR Description: unknown protein [Arabidopsis thaliana]
  misc_feature (52)..(176): Homolog of NCBI NO: 20975251 NR Description: transcription factor PCF3 [Oryza sativa (japonica
  misc_feature (20)..(183): Homolog of NCBI NO: 15218305 NR Description: TCP family transcription factor, putative
  misc_feature (1)..(325): Homolog of NCBI NO: 18409345 NR Description: TCP family transcription factor, putative
  misc_feature (13)..(175): Homolog of NCBI NO: 5731257 NR Description: auxin-induced basic helix-loop-helix
  misc_feature (7)..(160): Homolog of NCBI NO: 11357581 NR Description: hypothetical protein F1P2.170 - Arabidopsis
  misc_feature (7)..(160): Homolog of NCBI NO: 22331641 NR Description: TCP family transcription factor, putative
  misc_feature (21)..(244): Homolog of NCBI NO: 15219640 NR Description: TCP family transcription factor, putative
  misc_feature (16)..(160): Homolog of NCBI NO: 15217857 NR Description: TCP family transcription factor, putative
  misc_feature (26)..(138): Homolog of NCBI NO: 15237274 NR Description: TCP family transcription factor, putative
  misc_feature (21)..(244): Homolog of NCBI NO: 15219640 NR Description: TCP family transcription factor, putative
  misc_feature (7)..(160): Homolog of NCBI NO: 22331641 NR Description: TCP family transcription factor, putative
  misc_feature (7)..(160): Homolog of NCBI NO: 11357581 NR Description: hypothetical protein F1P2.170 - Arabidopsis
  misc_feature (13)..(175): Homolog of NCBI NO: 5731257 NR Description: auxin-induced basic helix-loop-helix
  misc_feature (1)..(325): Homolog of NCBI NO: 18409345 NR Description: TCP family transcription factor, putative

SEQ ID NO: 48692 - protein, 258 aa, Arabidopsis thaliana; identical to SEQ ID NO: 30960
  peptide (1)..(258): Ceres Seq. ID no. 13591996
  misc_feature (1)..(161): Pfam Name: TCP family transcription factor Pfam Description: TCP family transcription factor
  misc_feature (1)..(161): Pfam Name: TCP family transcription factor Pfam Description: TCP family transcription factor
  misc_feature (1)..(71): Homolog of NCBI NO: 26452377 NR Description: unknown protein [Arabidopsis thaliana]
  misc_feature (1)..(71): Homolog of NCBI NO: 15237274 NR Description: TCP family transcription factor, putative
  misc_feature (1)..(109): Homolog of NCBI NO: 20975251 NR Description: transcription factor PCF3 [Oryza sativa (japonica
  misc_feature (1)..(93): Homolog of NCBI NO: 15217857 NR Description: TCP family transcription factor, putative
  misc_feature (1)..(116): Homolog of NCBI NO: 15218305 NR Description: TCP family transcription factor, putative
  misc_feature (1)..(71): Homolog of NCBI NO: 26452377 NR Description: unknown protein [Arabidopsis thaliana]
  misc_feature (1)..(109): Homolog of NCBI NO: 20975251 NR Description: transcription factor PCF3 [Oryza sativa (japonica
  misc_feature (1)..(116): Homolog of NCBI NO: 15218305 NR Description: TCP family transcription factor, putative
  misc_feature (1)..(258): Homolog of NCBI NO: 18409345 NR Description: TCP family transcription factor, putative
  misc_feature (1)..(108): Homolog of NCBI NO: 5731257 NR Description: auxin-induced basic helix-loop-helix
  misc_feature (1)..(93): Homolog of NCBI NO: 11357581 NR Description: hypothetical protein F1P2.170 - Arabidopsis
  misc_feature (1)..(93): Homolog of NCBI NO: 22331641 NR Description: TCP family transcription factor, putative
  misc_feature (1)..(177): Homolog of NCBI NO: 15219640 NR Description: TCP family transcription factor, putative
  misc_feature (1)..(93): Homolog of NCBI NO: 15217857 NR Description: TCP family transcription factor, putative
  misc_feature (1)..(71): Homolog of NCBI NO: 15237274 NR Description: TCP family transcription factor, putative
  misc_feature (1)..(177): Homolog of NCBI NO: 15219640 NR Description: TCP family transcription factor, putative
  misc_feature (1)..(93): Homolog of NCBI NO: 22331641 NR Description: TCP family transcription factor, putative
  misc_feature (1)..(93): Homolog of NCBI NO: 11357581 NR Description: hypothetical protein F1P2.170 - Arabidopsis
  misc_feature (1)..(108): Homolog of NCBI NO: 5731257 NR Description: auxin-induced basic helix-loop-helix
  misc_feature (1)..(258): Homolog of NCBI NO: 18409345 NR Description: TCP family transcription factor, putative

SEQ ID NO: 48693 - protein, 255 aa, Arabidopsis thaliana; identical to SEQ ID NO: 30961
  peptide (1)..(255): Ceres Seq. ID no. 13591997
  misc_feature (1)..(158): Pfam Name: TCP family transcription factor Pfam Description: TCP family transcription factor
  misc_feature (1)..(158): Pfam Name: TCP family transcription factor Pfam Description: TCP family transcription factor
  misc_feature (1)..(68): Homolog of NCBI NO: 26452377 NR Description: unknown protein [Arabidopsis thaliana]
  misc_feature (1)..(68): Homolog of NCBI NO: 15237274 NR Description: TCP family transcription factor, putative
  misc_feature (1)..(106): Homolog of NCBI NO: 20975251 NR Description: transcription factor PCF3 [Oryza sativa (japonica
  misc_feature (1)..(90): Homolog of NCBI NO: 15217857 NR Description: TCP family transcription factor, putative
  misc_feature (1)..(113): Homolog of NCBI NO: 15218305 NR Description: TCP family transcription factor, putative
  misc_feature (1)..(68): Homolog of NCBI NO: 26452377 NR Description: unknown protein [Arabidopsis thaliana]
  misc_feature (1)..(106): Homolog of NCBI NO: 20975251 NR Description: transcription factor PCF3 [Oryza sativa (japonica
  misc_feature (1)..(113): Homolog of NCBI NO: 15218305 NR Description: TCP family transcription factor, putative
  misc_feature (1)..(255): Homolog of NCBI NO: 18409345 NR Description: TCP family transcription factor, putative
  misc_feature (1)..(105): Homolog of NCBI NO: 5731257 NR Description: auxin-induced basic helix-loop-helix
  misc_feature (1)..(90): Homolog of NCBI NO: 11357581 NR Description: hypothetical protein F1P2.170 - Arabidopsis
  misc_feature (1)..(90): Homolog of NCBI NO: 22331641 NR Description: TCP family transcription factor, putative
  misc_feature (1)..(174): Homolog of NCBI NO: 15219640 NR Description: TCP family transcription factor, putative
  misc_feature (1)..(90): Homolog of NCBI NO: 15217857 NR Description: TCP family transcription factor, putative
  misc_feature (1)..(68): Homolog of NCBI NO: 15237274 NR Description: TCP family transcription factor, putative
  misc_feature (1)..(174): Homolog of NCBI NO: 15219640 NR Description: TCP family transcription factor, putative
  misc_feature (1)..(90): Homolog of NCBI NO: 22331641 NR Description: TCP family transcription factor, putative
  misc_feature (1)..(90): Homolog of NCBI NO: 11357581 NR Description: hypothetical protein F1P2.170 - Arabidopsis
  misc_feature (1)..(105): Homolog of NCBI NO: 5731257 NR Description: auxin-induced basic helix-loop-helix
  misc_feature (1)..(255): Homolog of NCBI NO: 18409345 NR Description: TCP family transcription factor, putative

SEQ ID NO: 48694 - DNA, 3396 bp, Arabidopsis thaliana
  misc_feature (1)..(3396): Ceres Seq. ID no. 15168803
  misc_feature: MA Experiment ID: 20000355 Result: Up-regulated in Transcription
  misc_feature: MA Experiment 20000355 PARAMETER Experiment Name: At_Siliques_Sub_P Parameter: Age (day) Value: 21
  misc_feature: MA Experiment 20000355 PARAMETER Experiment Name: At_Siliques_Sub_P Parameter: Organism Value: A. thaliana
  misc_feature: MA Experiment 20000355 PARAMETER Experiment Name: At_Siliques_Sub_P Parameter: Plant Line Value: WS
  misc_feature: MA Experiment 20000355 PARAMETER Experiment Name: At_Siliques_Sub_P Parameter: Tissue Value: Less Than 5mm Siliques vs. Whole Plant
ggtcgtcttcacttaccttctctctacactcacaccatctcacaaccctaatctctcccacacaagagagatagagagaaacaatgaaactttttcttctccttctttttcttctccacatttctcataccttcaccgcaagccgaccaatctccgagttccgtgctctcctctcactcaaaacctctctcaccggcgccggagatgacaaaaactcgcctctctcttcctggaaagtctcaacaagcttctgtacatggattggtgtcacgtgcgatgtctctcgccgtcacgtgacttctcttgatctctccggtctcaacctctccggtactctttccccagatgtttctcatttacgtcttcttcagaatctatcactcgctgaaaatctaatctccggtccgattccgccggaaatctcgagcctttccggtcttcgtcacttaaatctctcgaacaatgtcttcaacggttcgtttcccgatgagatttcttctggattggtgaatctccgagttcttgatgtctacaacaacaatctaaccggagatttaccggtttccgtcaccaatctgactcagctccggcaccttcacctcggcgttaactacttcgctggaaagatcccgccttcgtacggaagctggccagttattgagtatctagcggtttccggcaacgagcttgtcgggaaaatccctccagagatcggaaacctaacgactctccgggagctttacatcggctactacaacgctttcgaagacggtcttcctccagagatcggaaatctatcggagctagtcagattcgacggagctaattgcggattaaacggtgagattccgccggagattgggaagcttcagaaactcgatacgcttttcttgcaagtgaatgtcttctccggtccattaacttgggagctaggaacgctatcgagtttaaaatcaatggatttgtctaacaacatgttcaccggagagattccagcgagtttcgcagagttgaagaatctcacgcttttgaatctcttccgtaacaaacttcacggcgagataccggagttcatcggagatttgccggagcttgaagtgttacagctttgggagaacaatttcaccggaagcatcccgcagaaattaggagaaaacggtaaactaaatctcgtcgatctctcttccaataagctgaccggaactttaccgccgaacatgtgctccggtaacaagttagaaactttaatcactcttggtaactttctctttggttcaatccctgattctcttggtaaatgtgagtctttgacccggatccgaatgggtgagaatttcctgaacgggtcaatcccaaaaggactattcggattacccaaattaactcaagtggagctccaagataattatctctccggagagttaccagtcgccggaggtgtctctgttaatcttggtcagatcagtttatcaaacaaccagctctcaggtccattacctccggcgatcgggaacttcaccggcgttcagaaacttcttcttgatggaaacaagttccaaggtcctattccttcagaggtagggaagcttcagcagctctcgaagattgatttcagccacaacttgttctacggtcgaatcgcgccggagattagtcgttgcaagctcttaacgtttgttgatctgagcagaaacgagctctccggtgaaatcccaaatgagatcactgctatgaagatattgaattacttgaacctgtcgagaaaccatctggttggatcaatccctggttcaatctcgtcaatgcagagcttaacatctcttgatttctcttacaacaacctctccggtttagttccgggaacaggacaattcagttacttcaactacacatcgttcttgggtaatcctgatctctgtggtccttatcttggtccttgtaaagacggtgttgctaaaggaggtcaccagagtcatagtaaaggacctttatcagcttctatgaagttattgcttgttcttggactacttgtttgttcgattgcgttcgcggtagtagccataatcaaagctagatcattgaaaaaggcgagtgagtcacgggcttggaggttaacagctttccagagactagacttcacgtgtgacgatgtcttggattctctcaaagaagacaacattataggcaaaggaggagctggtattgtctataaaggcgtaatgcctaatggtgatctagtcgcggttaaaagactcgctgcaatgtctcgtggatcttcccatgatcacggcttcaacgcagagattcaaaccttaggaaggataagacacagacacatagtgaggcttctcggattttgctcaaaccacgagacgaatctacttgtctatgagtacatgcctaatggtagtctcggtgaggtgcttcacggtaagaaaggaggacacttgcattgggacacacgttacaagattgctcttgaagctgctaaaggactctgttaccttcatcacgattgttctccattgatcgttcacagagatgtcaaatcaaacaacatcctccttgattcaaactttgaagctcatgttgctgactttggtctcgctaaattccttcaagattccggtacttctgaatgtatgtctgcaatcgctggctcttacggctacatagctccagagtatgcgtatacgttgaaggtagatgagaagagcgatgtgtatagtttcggtgtggttcttttggaactcgtcaccggaagaaaacctgtcggagaatttggagacggtgtcgatatagtgcaatgggttcgtaaaatgactgattcgaacaaggattcggttctgaaagtattggatccgagactttcttcgattccgattcatgaagtgacgcacgtcttctatgtagcgatgctctgtgtagaagaacaagctgttgagaggccgactatgagagaagttgttcagattctcactgagatcccgaagttgccaccgtcgaaggatcagccgatgacggaatcagcgccggagagtgagctttcgccgaagtctggtgttcaaagtccgccggatctactcaatctatgagagttttatgattcacggcggttaatttagggtaccggtataaggggtaaatctgtcttttcataaatgttattagcgatgagatttggttgttaatttactttaatccctcttagtacggtttgtgctttggtccggtttagtagggttttttttgaaagaaggttgtttaaactctttttaagtgtgtttcattttccttttttatgtttttaatcggtattcggctttatttagtttgtaatttgtgttaatgaaaatgtacagttttttttttttgaaggaatttcaaaatatcttg

SEQ ID NO: 48695 - protein, 1003 aa, Arabidopsis thaliana
  peptide (1)..(1003): Ceres Seq. ID no. 15168804
  misc_feature (694)..(896): Pfam Name: Protein kinase domain Pfam Description: Protein kinase domain
  misc_feature (73)..(965): Homolog of NCBI NO: 15528705 NR Description: putative receptor protein kinase
  misc_feature (47)..(595): Homolog of NCBI NO: 38346781 NR Description: OSJNBa0095H06.6 [Oryza sativa (japonica
  misc_feature (69)..(968): Homolog of NCBI NO: 29119651 NR Description: LRR receptor-like kinase 1 [Arabidopsis thaliana]
  misc_feature (737)..(968): Homolog of NCBI NO: 38346781 NR Description: OSJNBa0095H06.6 [Oryza sativa (japonica
  misc_feature (81)..(788): Homolog of NCBI NO: 38346781 NR Description: OSJNBa0095H06.6 [Oryza sativa (japonica
  misc_feature (62)..(968): Homolog of NCBI NO: 12054894 NR Description: receptor protein kinase [Pinus sylvestris]
  misc_feature (74)..(975): Homolog of NCBI NO: 25403209 NR Description: probable Protein kinase [imported] - Arabidopsis
  misc_feature (69)..(968): Homolog of NCBI NO: 15229457 NR Description: leucine-rich repeat transmembrane protein kinase,
  misc_feature (1)..(969): Homolog of NCBI NO: 31540632 NR Description: CLV1-like receptor kinase [Brassica napus]
  misc_feature (5)..(889): Homolog of NCBI NO: 8132685 NR Description: LRK1 protein [Oryza sativa]
MKLFLLLLFLLHISHTFTASRPISEFRALLSLKTSLTGAGDDKNSPLSSWKVSTSFCTWIGVTCDVSRRHVTSLDLSGLNLSGTLSPDVSHLRLLQNLSLAENLISGPIPPEISSLSGLRHLNLSNNVFNGSFPDEISSGLVNLRVLDVYNNNLTGDLPVSVTNLTQLRHLHLGVNYFAGKIPPSYGSWPVIEYLAVSGNELVGKIPPEIGNLTTLRELYIGYYNAFEDGLPPEIGNLSELVRFDGANCGLNGEIPPEIGKLQKLDTLFLQVNVFSGPLTWELGTLSSLKSMDLSNNMFTGEIPASFAELKNLTLLNLFRNKLHGEIPEFIGDLPELEVLQLWENNFTGSIPQKLGENGKLNLVDLSSNKLTGTLPPNMCSGNKLETLITLGNFLFGSIPDSLGKCESLTRIRMGENFLNGSIPKGLFGLPKLTQVELQDNYLSGELPVAGGVSVNLGQISLSNNQLSGPLPPAIGNFTGVQKLLLDGNKFQGPIPSEVGKLQQLSKIDFSHNLFYGRIAPEISRCKLLTFVDLSRNELSGEIPNEITAMKILNYLNLSRNHLVGSIPGSISSMQSLTSLDFSYNNLSGLVPGTGQFSYFNYTSFLGNPDLCGPYLGPCKDGVAKGGHQSHSKGPLSASMKLLLVLGLLVCSIAFAVVAIIKARSLKKASESRAWRLTAFQRLDFTCDDVLDSLKEDNIIGKGGAGIVYKGVMPNGDLVAVKRLAAMSRGSSHDHGFNAEIQTLGRIRHRHIVRLLGFCSNHETNLLVYEYMPNGSLGEVLHGKKGGHLHWDTRYKIALEAAKGLCYLHHDCSPLIVHRDVKSNNILLDSNFEAHVADFGLAKFLQDSGTSECMSAIAGSYGYIAPEYAYTLKVDEKSDVYSFGVVLLELVTGRKPVGEFGDGVDIVQWVRKMTDSNKDSVLKVLDPRLSSIPIHEVTHVFYVAMLCVEEQAVERPTMREVVQILTEIPKLPPSKDQPMTESAPESELSPKSGVQSPPDLLNL

SEQ ID NO: 48696 - protein, 712 aa, Arabidopsis thaliana
  peptide (1)..(712): Ceres Seq. ID no. 15168805
  misc_feature (403)..(605): Pfam Name: Protein kinase domain Pfam Description: Protein kinase domain
  misc_feature (1)..(674): Homolog of NCBI NO: 15528705 NR Description: putative receptor protein kinase
  misc_feature (1)..(304): Homolog of NCBI NO: 38346781 NR Description: OSJNBa0095H06.6 [Oryza sativa (japonica
  misc_feature (1)..(677): Homolog of NCBI NO: 29119651 NR Description: LRR receptor-like kinase 1 [Arabidopsis thaliana]
  misc_feature (446)..(677): Homolog of NCBI NO: 38346781 NR Description: OSJNBa0095H06.6 [Oryza sativa (japonica
  misc_feature (1)..(497): Homolog of NCBI NO: 38346781 NR Description: OSJNBa0095H06.6 [Oryza sativa (japonica
  misc_feature (1)..(677): Homolog of NCBI NO: 12054894 NR Description: receptor protein kinase [Pinus sylvestris]
  misc_feature (1)..(684): Homolog of NCBI NO: 25403209 NR Description: probable Protein kinase [imported] - Arabidopsis
  misc_feature (1)..(677): Homolog of NCBI NO: 15229457 NR Description: leucine-rich repeat transmembrane protein kinase,
  misc_feature (1)..(678): Homolog of NCBI NO: 31540632 NR Description: CLV1-like receptor kinase [Brassica napus]
  misc_feature (1)..(598): Homolog of NCBI NO: 8132685 NR Description: LRK1 protein [Oryza sativa]
MDLSNNMFTGEIPASFAELKNLTLLNLFRNKLHGEIPEFIGDLPELEVLQLWENNFTGSIPQKLGENGKLNLVDLSSNKLTGTLPPNMCSGNKLETLITLGNFLFGSIPDSLGKCESLTRIRMGENFLNGSIPKGLFGLPKLTQVELQDNYLSGELPVAGGVSVNLGQISLSNNQLSGPLPPAIGNFTGVQKLLLDGNKFQGPIPSEVGKLQQLSKIDFSHNLFYGRIAPEISRCKLLTFVDLSRNELSGEIPNEITAMKILNYLNLSRNHLVGSIPGSISSMQSLTSLDFSYNNLSGLVPGTGQFSYFNYTSFLGNPDLCGPYLGPCKDGVAKGGHQSHSKGPLSASMKLLLVLGLLVCSIAFAVVAIIKARSLKKASESRAWRLTAFQRLDFTCDDVLDSLKEDNIIGKGGAGIVYKGVMPNGDLVAVKRLAAMSRGSSHDHGFNAEIQTLGRIRHRHIVRLLGFCSNHETNLLVYEYMPNGSLGEVLHGKKGGHLHWDTRYKIALEAAKGLCYLHHDCSPLIVHRDVKSNNILLDSNFEAHVADFGLAKFLQDSGTSECMSAIAGSYGYIAPEYAYTLKVDEKSDVYSFGVVLLELVTGRKPVGEFGDGVDIVQWVRKMTDSNKDSVLKVLDPRLSSIPIHEVTHVFYVAMLCVEEQAVERPTMREVVQILTEIPKLPPSKDQPMTESAPESELSPKSGVQSPPDLLNL

SEQ ID NO: 48697 - protein, 706 aa, Arabidopsis thaliana
  peptide (1)..(706): Ceres Seq. ID no. 15168806
  misc_feature (397)..(599): Pfam Name: Protein kinase domain Pfam Description: Protein kinase domain
  misc_feature (1)..(668): Homolog of NCBI NO: 15528705 NR Description: putative receptor protein kinase
  misc_feature (1)..(298): Homolog of NCBI NO: 38346781 NR Description: OSJNBa0095H06.6 [Oryza sativa (japonica
  misc_feature (1)..(671): Homolog of NCBI NO: 29119651 NR Description: LRR receptor-like kinase 1 [Arabidopsis thaliana]
  misc_feature (440)..(671): Homolog of NCBI NO: 38346781 NR Description: OSJNBa0095H06.6 [Oryza sativa (japonica
  misc_feature (1)..(491): Homolog of NCBI NO: 38346781 NR Description: OSJNBa0095H06.6 [Oryza sativa (japonica
  misc_feature (1)..(671): Homolog of NCBI NO: 12054894 NR Description: receptor protein kinase [Pinus sylvestris]
  misc_feature (1)..(678): Homolog of NCBI NO: 25403209 NR Description: probable Protein kinase [imported] - Arabidopsis
  misc_feature (1)..(671): Homolog of NCBI NO: 15229457 NR Description: leucine-rich repeat transmembrane protein kinase,
  misc_feature (1)..(672): Homolog of NCBI NO: 31540632 NR Description: CLV1-like receptor kinase [Brassica napus]
  misc_feature (1)..(592): Homolog of NCBI NO: 8132685 NR Description: LRK1 protein [Oryza sativa]
MFTGEIPASFAELKNLTLLNLFRNKLHGEIPEFIGDLPELEVLQLWENNFTGSIPQKLGENGKLNLVDLSSNKLTGTLPPNMCSGNKLETLITLGNFLFGSIPDSLGKCESLTRIRMGENFLNGSIPKGLFGLPKLTQVELQDNYLSGELPVAGGVSVNLGQISLSNNQLSGPLPPAIGNFTGVQKLLLDGNKFQGPIPSEVGKLQQLSKIDFSHNLFYGRIAPEISRCKLLTFVDLSRNELSGEIPNEITAMKILNYLNLSRNHLVGSIPGSISSMQSLTSLDFSYNNLSGLVPGTGQFSYFNYTSFLGNPDLCGPYLGPCKDGVAKGGHQSHSKGPLSASMKLLLVLGLLVCSIAFAVVAIIKARSLKKASESRAWRLTAFQRLDFTCDDVLDSLKEDNIIGKGGAGIVYKGVMPNGDLVAVKRLAAMSRGSSHDHGFNAEIQTLGRIRHRHIVRLLGFCSNHETNLLVYEYMPNGSLGEVLHGKKGGHLHWDTRYKIALEAAKGLCYLHHDCSPLIVHRDVKSNNILLDSNFEAHVADFGLAKFLQDSGTSECMSAIAGSYGYIAPEYAYTLKVDEKSDVYSFGVVLLELVTGRKPVGEFGDGVDIVQWVRKMTDSNKDSVLKVLDPRLSSIPIHEVTHVFYVAMLCVEEQAVERPTMREVVQILTEIPKLPPSKDQPMTESAPESELSPKSGVQSPPDLLNL

SEQ ID NO: 48698 - DNA, 1548 bp, Arabidopsis thaliana
  misc_feature (1)..(1548): Ceres Seq. ID no. 14316132
  misc_feature: MA Experiment ID: 20000171 Result: Down-regulated in Transcription
  misc_feature: MA Experiment 20000171 PARAMETER Experiment Name: At_42deg_Heat_P Parameter: Age (day) Value: 14
  misc_feature: MA Experiment 20000171 PARAMETER Experiment Name: At_42deg_Heat_P Parameter: Organism Value: A. thaliana
  misc_feature: MA Experiment 20000171 PARAMETER Experiment Name: At_42deg_Heat_P Parameter: Plant Line Value: WS
  misc_feature: MA Experiment 20000171 PARAMETER Experiment Name: At_42deg_Heat_P Parameter: Temperature (deg C) Value: 42 vs. 22
  misc_feature: MA Experiment 20000171 PARAMETER Experiment Name: At_42deg_Heat_P Parameter: Timepoint (hr) Value: 1
  misc_feature: MA Experiment 20000171 PARAMETER Experiment Name: At_42deg_Heat_P Parameter: Tissue Value: Aerial
  misc_feature: MA Experiment ID: 20000173 Result: Down-regulated in Transcription
  misc_feature: MA Experiment 20000173 PARAMETER Experiment Name: At_42deg_Heat_P Parameter: Age (day) Value: 14
  misc_feature: MA Experiment 20000173 PARAMETER Experiment Name: At_42deg_Heat_P Parameter: Organism Value: A. thaliana
  misc_feature: MA Experiment 20000173 PARAMETER Experiment Name: At_42deg_Heat_P Parameter: Plant Line Value: WS
  misc_feature: MA Experiment 20000173 PARAMETER Experiment Name: At_42deg_Heat_P Parameter: Temperature (deg C) Value: 42 vs. 22
  misc_feature: MA Experiment 20000173 PARAMETER Experiment Name: At_42deg_Heat_P Parameter: Timepoint (hr) Value: 6
  misc_feature: MA Experiment 20000173 PARAMETER Experiment Name: At_42deg_Heat_P Parameter: Tissue Value: Aerial
  misc_feature: MA Experiment ID: 20000234 Result: Down-regulated in Transcription
  misc_feature: MA Experiment 20000234 PARAMETER Experiment Name: At_Siliques_P Parameter: Age (day) Value: 21
  misc_feature: MA Experiment 20000234 PARAMETER Experiment Name: At_Siliques_P Parameter: Organism Value: A. thaliana
  misc_feature: MA Experiment 20000234 PARAMETER Experiment Name: At_Siliques_P Parameter: Plant Line Value: WS
  misc_feature: MA Experiment 20000234 PARAMETER Experiment Name: At_Siliques_P Parameter: Tissue Value: Less Than 5mm Siliques vs. Whole Plant
  misc_feature: MA Experiment ID: 20000235 Result: Down-regulated in Transcription
  misc_feature: MA Experiment 20000235 PARAMETER Experiment Name: At_Siliques_P Parameter: Age (day) Value: 21
  misc_feature: MA Experiment 20000235 PARAMETER Experiment Name: At_Siliques_P Parameter: Organism Value: A. thaliana
  misc_feature: MA Experiment 20000235 PARAMETER Experiment Name: At_Siliques_P Parameter: Plant Line Value: WS
  misc_feature: MA Experiment 20000235 PARAMETER Experiment Name: At_Siliques_P Parameter: Tissue Value: 5-10mm Siliques vs. Whole Plant
  misc_feature: MA Experiment ID: 20000264 Result: Down-regulated in Transcription
  misc_feature: MA Experiment 20000264 PARAMETER Experiment Name: At_Open_Flower_P Parameter: Age (day) Value: 21
  misc_feature: MA Experiment 20000264 PARAMETER Experiment Name: At_Open_Flower_P Parameter: Plant Line Value: WS
  misc_feature: MA Experiment 20000264 PARAMETER Experiment Name: At_Open_Flower_P Parameter: Tissue Value: Open Flower vs. Whole Plant
  misc_feature: MA Experiment ID: 20000286 Result: Down-regulated in Transcription
  misc_feature: MA Experiment 20000286 PARAMETER Experiment Name: At_Open_Flower_P Parameter: Age (day) Value: 21
  misc_feature: MA Experiment 20000286 PARAMETER Experiment Name: At_Open_Flower_P Parameter: Plant Line Value: WS
  misc_feature: MA Experiment 20000286 PARAMETER Experiment Name: At_Open_Flower_P Parameter: Tissue Value: Half Open vs. Whole Plant
  misc_feature: MA Experiment ID: 20000437 Result: Down-regulated in Transcription
  misc_feature: MA Experiment 20000437 PARAMETER Experiment Name: At_Drought_P Parameter: Age (day) Value: 8
  misc_feature: MA Experiment 20000437 PARAMETER Experiment Name: At_Drought_P Parameter: Organism Value: A. thaliana
  misc_feature: MA Experiment 20000437 PARAMETER Experiment Name: At_Drought_P Parameter: Plant Line Value: WS
  misc_feature: MA Experiment 20000437 PARAMETER Experiment Name: At_Drought_P Parameter: Timepoint (hr) Value: 24
  misc_feature: MA Experiment 20000437 PARAMETER Experiment Name: At_Drought_P Parameter: Tissue Value: Whole Plant
  misc_feature: MA Experiment 20000437 PARAMETER Experiment Name: At_Drought_P Parameter: Treatment Value: Drought vs. No Drought
  misc_feature: MA Experiment ID: 20000495 Result: Up-regulated in Transcription
  misc_feature: MA Experiment 20000495 PARAMETER Experiment Name: At_Guard_Cells_P Parameter: Harvest Date Value: 8/2/2002
  misc_feature: MA Experiment 20000495 PARAMETER Experiment Name: At_Guard_Cells_P Parameter: Organism Value: A. thaliana
  misc_feature: MA Experiment 20000495 PARAMETER Experiment Name: At_Guard_Cells_P Parameter: Tissue Value: Guard Cells vs. Leaves
  misc_feature: MA Experiment ID: 20000794 Result: Down-regulated in Transcription
  misc_feature: MA Experiment 20000794 PARAMETER Experiment Name: At_Petals_P Parameter: Age (day) Value: 23-25 days
  misc_feature: MA Experiment 20000794 PARAMETER Experiment Name: At_Petals_P Parameter: Plant Line Value: WS
  misc_feature: MA Experiment 20000794 PARAMETER Experiment Name: At_Petals_P Parameter: Tissue Value: Petals vs. Whole plant
  misc_feature: MA Experiment ID: 20001248 Result: Down-regulated in Transcription
  misc_feature: MA Experiment 20001248 PARAMETER Experiment Name: At_Far-red-induction_P Parameter: Age (day) Value: 7
  misc_feature: MA Experiment 20001248 PARAMETER Experiment Name: At_Far-red-induction_P Parameter: Light Value: Far-red vs. White
  misc_feature: MA Experiment 20001248 PARAMETER Experiment Name: At_Far-red-induction_P Parameter: Organism Value: A. thaliana
  misc_feature: MA Experiment 20001248 PARAMETER Experiment Name: At_Far-red-induction_P Parameter: Plant Line Value: Columbia
  misc_feature: MA Experiment 20001248 PARAMETER Experiment Name: At_Far-red-induction_P Parameter: Timepoint (hr) Value: 4
  misc_feature: MA Experiment 20001248 PARAMETER Experiment Name: At_Far-red-induction_P Parameter: Tissue Value: Whole Plant
  misc_feature: MA Experiment ID: 20001450 Result: Down-regulated in Transcription
  misc_feature: MA Experiment 20001450 PARAMETER Experiment Name: At_Far-red-induction_P Parameter: Age (day) Value: 7
  misc_feature: MA Experiment 20001450 PARAMETER Experiment Name: At_Far-red-induction_P Parameter: Light Value: Far-red vs. White
  misc_feature: MA Experiment 20001450 PARAMETER Experiment Name: At_Far-red-induction_P Parameter: Organism Value: A. thaliana
  misc_feature: MA Experiment 20001450 PARAMETER Experiment Name: At_Far-red-induction_P Parameter: Plant Line Value: Columbia
  misc_feature: MA Experiment 20001450 PARAMETER Experiment Name: At_Far-red-induction_P Parameter: Timepoint (hr) Value: 8
  misc_feature: MA Experiment 20001450 PARAMETER Experiment Name: At_Far-red-induction_P Parameter: Tissue Value: Whole Plant
  misc_feature: MA Experiment ID: 20001757 Result: Up-regulated in Transcription
  misc_feature: MA Experiment 20001757 PARAMETER Experiment Name: At_50mM_NH4NO3_L-to-H_P Parameter: Timepoint (hr) Value: 6
  misc_feature: MA Experiment 20001757 PARAMETER Experiment Name: At_50mM_NH4NO3_L-to-H_P Parameter: Tissue Value: Leaf
  misc_feature: MA Experiment 20001757 PARAMETER Experiment Name: At_50mM_NH4NO3_L-to-H_P Parameter: Treatment Value: 50mM NH4NO3 vs 100mM Mannitol
  misc_feature: MA Experiment ID: 20001905 Result: Down-regulated in Transcription
  misc_feature: MA Experiment 20001905 PARAMETER Experiment Name: At_Drought_Reproduction_P Parameter: Age (day) Value: 40
  misc_feature: MA Experiment 20001905 PARAMETER Experiment Name: At_Drought_Reproduction_P Parameter: Organism Value: A. thaliana
  misc_feature: MA Experiment 20001905 PARAMETER Experiment Name: At_Drought_Reproduction_P Parameter: Plant Line Value: WS
  misc_feature: MA Experiment 20001905 PARAMETER Experiment Name: At_Drought_Reproduction_P Parameter: Timepoint (day) Value: 10
  misc_feature: MA Experiment 20001905 PARAMETER Experiment Name: At_Drought_Reproduction_P Parameter: Tissue Value: Rosettes
  misc_feature: MA Experiment 20001905 PARAMETER Experiment Name: At_Drought_Reproduction_P Parameter: Treatment Value: Drought vs. No Drought
  misc_feature: MA Experiment ID: 20001911 Result: Down-regulated in Transcription
  misc_feature: MA Experiment 20001911 PARAMETER Experiment Name: At_Drought_Reproduction_P Parameter: Age (day) Value: 40
  misc_feature: MA Experiment 20001911 PARAMETER Experiment Name: At_Drought_Reproduction_P Parameter: Organism Value: A. thaliana
  misc_feature: MA Experiment 20001911 PARAMETER Experiment Name: At_Drought_Reproduction_P Parameter: Plant Line Value: WS
  misc_feature: MA Experiment 20001911 PARAMETER Experiment Name: At_Drought_Reproduction_P Parameter: Timepoint (day) Value: 10
  misc_feature: MA Experiment 20001911 PARAMETER Experiment Name: At_Drought_Reproduction_P Parameter: Tissue Value: Flowers
  misc_feature: MA Experiment 20001911 PARAMETER Experiment Name: At_Drought_Reproduction_P Parameter: Treatment Value: Drought vs. No Drought
ggtaaagttttttttcccaaatagtactttttgttttgtttggccttcttatagaaagaagaactcaaagcacagagagaagatgagcgaagaacaaccacacgccaatctagcggttcccgcgtttaaaactgagaaagatcccgtaacgcaaacgcaaaatggtcaaagtagcgtttggcgtttcggtggaagtgataaggcagcgaaagcatccaccgtaacgcttagaggtgtcatctacatgatcttcgacaactgcagcaaagacgtcaataagaccattttacccctcggccacggtgaccttccgtctacccttgcttccgtacctgtatcgaagctgaagacgccgtcgtcgacgtccttcgctccggcaaaggcaattcttacggtcccggagctgggattctccccgcaagacgagccgttgctgattatatgaaccgagatcttccgcacaagttaacgcctgaagatatttttctgaccgctggatgcaaccaagggatagagatcgtgttcgaatcgttggctcgaccaaacgcaaacatcttgctcccacgtcctggcttccctcattacgacgctcgtgctgcttacagtggtctcgaggttcgcaagtttgatcttcttcccgagaaagaatgggagattgatcttgaaggtatcgaagccattgcagacgagaaaactgtggctatggttgtaattaaccccaacaatccctgtggaaatgtctactctcacgaccatctcaaaaaggttgcagagacggctaggaagctcgggataatggtgatctcagacgaagtatatgaccgaactatattcggagacaatccatttgttccaatggggaagtttgcttcgatagtccctgtattgacactagcaggcatatctaagggatgggttgttcctggatggaaaattggctggatcgccttgaatgatcccgagggcgttttcgagaccaccaaggtgttacaatccatcaaacagaatcttgacgtaactcctgaccctgccacaataattcaggctgcacttccagcgatcctggagaaagcggacaaaaacttctttgcaagaagaacaagatactcaaacataatgttgatttggtgtgtgataggctcaaggacatcccctgtgtcgtctgtcccaagaaacctgagtcttgcacttacttattgacaaagttggagctgtcactgatggataatatcaaggacgatatagatttttgcgtaaaactggccagagaggagaatctcgtgtttctaccaggggatgctctgggtttgaagaactggatgaggataaccatcggagtcgaagctcatatgcttgaggatgcacttgagagactgaagggtttctgtacacgtcatgccaagaagacagagacagaaactgagtcacttcaagctttgaaactgagtgataataatctcgaaatgtaaaacagaagaggatgtgtgtgcccaaaagaatattcttatgatagataattttgattcttgcttttccatttgatttccc

SEQ ID NO: 48699 - protein, 252 aa, Arabidopsis thaliana
  peptide (1)..(252): Ceres Seq. ID no. 14316133
  misc_feature (1)..(221): Pfam Name: Aminotransferase class I and II Pfam Description: Aminotransferase class I and II
  misc_feature (1)..(218): Homolog of NCBI NO: 23397279 NR Description: putatative tyrosine aminotransferase [Arabidopsis
  misc_feature (1)..(220): Homolog of NCBI NO: 27525396 NR Description: tyrosine aminotransferase [Solenostemon
  misc_feature (1)..(218): Homolog of NCBI NO: 15239521 NR Description: aminotransferase, putative [Arabidopsis thaliana]
  misc_feature (1)..(221): Homolog of NCBI NO: 15224631 NR Description: putative tyrosine aminotransferase
  misc_feature (1)..(221): Homolog of NCBI NO: 21553462 NR Description: putative tyrosine aminotransferase [Arabidopsis
  misc_feature (1)..(228): Homolog of NCBI NO: 15235287 NR Description: aminotransferase, putative [Arabidopsis thaliana]
  misc_feature (1)..(221): Homolog of NCBI NO: 15809874 NR Description: At2g20610/F23N11.7 [Arabidopsis thaliana]
  misc_feature (1)..(221): Homolog of NCBI NO: 15225387 NR Description: aminotransferase, putative [Arabidopsis thaliana]
  misc_feature (1)..(221): Homolog of NCBI NO: 11527941 NR Description: ROOTY/SUPERROOT1 [Arabidopsis thaliana]
  misc_feature (1)..(221): Homolog of NCBI NO: 11527943 NR Description: ROOTY/SUPERROOT1 [Arabidopsis thaliana]
MNRDLPHKLTPEDIFLTAGCNQGIEIVFESLARPNANILLPRPGFPHYDARAAYSGLEVRKFDLLPEKEWEIDLEGIEAIADEKTVAMVVINPNNPCGNVYSHDHLKKVAETARKLGIMVISDEVYDRTIFGDNPFVPMGKFASIVPVLTLAGISKGWVVPGWKIGWIALNDPEGVFETTKVLQSIKQNLDVTPDPATIIQAALPAILEKADKNFFARRTRYSNIMLIWCVIGSRTSPVSSVPRNLSLALTY

SEQ ID NO: 48700 - protein, 165 aa, Arabidopsis thaliana
  peptide (1)..(165): Ceres Seq. ID no. 14316134
  misc_feature (1)..(134): Pfam Name: Aminotransferase class I and II Pfam Description: Aminotransferase class I and II
  misc_feature (1)..(131): Homolog of NCBI NO: 23397279 NR Description: putatative tyrosine aminotransferase [Arabidopsis
  misc_feature (1)..(133): Homolog of NCBI NO: 27525396 NR Description: tyrosine aminotransferase [Solenostemon
  misc_feature (1)..(131): Homolog of NCBI NO: 15239521 NR Description: aminotransferase, putative [Arabidopsis thaliana]
  misc_feature (1)..(134): Homolog of NCBI NO: 15224631 NR Description: putative tyrosine aminotransferase
  misc_feature (1)..(134): Homolog of NCBI NO: 21553462 NR Description: putative tyrosine aminotransferase [Arabidopsis
  misc_feature (1)..(141): Homolog of NCBI NO: 15235287 NR Description: aminotransferase, putative [Arabidopsis thaliana]
  misc_feature (1)..(134): Homolog of NCBI NO: 15809874 NR Description: At2g20610/F23N11.7 [Arabidopsis thaliana]
  misc_feature (1)..(134): Homolog of NCBI NO: 15225387 NR Description: aminotransferase, putative [Arabidopsis thaliana]
  misc_feature (1)..(134): Homolog of NCBI NO: 11527941 NR Description: ROOTY/SUPERROOT1 [Arabidopsis thaliana]
  misc_feature (1)..(134): Homolog of NCBI NO: 11527943 NR Description: ROOTY/SUPERROOT1 [Arabidopsis thaliana]
MVVINPNNPCGNVYSHDHLKKVAETARKLGIMVISDEVYDRTIFGDNPFVPMGKFASIVPVLTLAGISKGWVVPGWKIGWIALNDPEGVFETTKVLQSIKQNLDVTPDPATIIQAALPAILEKADKNFFARRTRYSNIMLIWCVIGSRTSPVSSVPRNLSLALTY

SEQ ID NO: 48701 - protein, 147 aa, Arabidopsis thaliana
  peptide (1)..(147): Ceres Seq. ID no. 14316135
  misc_feature (54)..(129): Homolog of NCBI NO: 21553462 NR Description: putative tyrosine aminotransferase [Arabidopsis
  misc_feature (54)..(129): Homolog of NCBI NO: 15224631 NR Description: putative tyrosine aminotransferase
  misc_feature (28)..(147): Homolog of NCBI NO: 15809874 NR Description: At2g20610/F23N11.7 [Arabidopsis thaliana]
  misc_feature (28)..(147): Homolog of NCBI NO: 15225387 NR Description: aminotransferase, putative [Arabidopsis thaliana]
  misc_feature (28)..(147): Homolog of NCBI NO: 11527941 NR Description: ROOTY/SUPERROOT1 [Arabidopsis thaliana]
  misc_feature (28)..(147): Homolog of NCBI NO: 11527943 NR Description: ROOTY/SUPERROOT1 [Arabidopsis thaliana]
  misc_feature (34)..(130): Homolog of NCBI NO: 15235287 NR Description: aminotransferase, putative [Arabidopsis thaliana]
VKFFFPNSTFCFVWPSYRKKNSKHREKMSEEQPHANLAVPAFKTEKDPVTQTQNGQSSVWRFGGSDKAAKASTVTLRGVIYMIFDNCSKDVNKTILPLGHGDLPSTLASVPVSKLKTPSSTSFAPAKAILTVPELGFSPQDEPLLII

SEQ ID NO: 48702 - DNA, 2543 bp, Arabidopsis thaliana; identical to SEQ ID NO: 47501
  misc_feature (1)..(2543): Ceres Seq. ID no. 12601296
  misc_feature: MA Experiment ID: 20000227 Result: Up-regulated in Transcription
  misc_feature: MA Experiment 20000227 PARAMETER Experiment Name: At_Root-Tips-vs-Tops_P Parameter: Tissue Value: Root Tips vs. Root Tops
  misc_feature: MA Experiment ID: 20001451 Result: Down-regulated in Transcription
  misc_feature: MA Experiment 20001451 PARAMETER Experiment Name: At_Far-red-induction_P Parameter: Age (day) Value: 7
  misc_feature: MA Experiment 20001451 PARAMETER Experiment Name: At_Far-red-induction_P Parameter: Light Value: Far-red vs. White
  misc_feature: MA Experiment 20001451 PARAMETER Experiment Name: At_Far-red-induction_P Parameter: Organism Value: A. thaliana
  misc_feature: MA Experiment 20001451 PARAMETER Experiment Name: At_Far-red-induction_P Parameter: Plant Line Value: Columbia
  misc_feature: MA Experiment 20001451 PARAMETER Experiment Name: At_Far-red-induction_P Parameter: Timepoint (hr) Value: 24
  misc_feature: MA Experiment 20001451 PARAMETER Experiment Name: At_Far-red-induction_P Parameter: Tissue Value: Whole Plant
  misc_feature: MA Experiment ID: 20001911 Result: Down-regulated in Transcription
  misc_feature: MA Experiment 20001911 PARAMETER Experiment Name: At_Drought_Reproduction_P Parameter: Age (day) Value: 40
  misc_feature: MA Experiment 20001911 PARAMETER Experiment Name: At_Drought_Reproduction_P Parameter: Organism Value: A. thaliana
  misc_feature: MA Experiment 20001911 PARAMETER Experiment Name: At_Drought_Reproduction_P Parameter: Plant Line Value: WS
  misc_feature: MA Experiment 20001911 PARAMETER Experiment Name: At_Drought_Reproduction_P Parameter: Timepoint (day) Value: 10
  misc_feature: MA Experiment 20001911 PARAMETER Experiment Name: At_Drought_Reproduction_P Parameter: Tissue Value: Flowers
  misc_feature: MA Experiment 20001911 PARAMETER Experiment Name: At_Drought_Reproduction_P Parameter: Treatment Value: Drought vs. No Drought

SEQ ID NO: 48703 - protein, 673 aa, Arabidopsis thaliana; identical to SEQ ID NO: 47502
  peptide (1)..(673): Ceres Seq. ID no. 12601297
  misc_feature (227)..(670): Homolog of NCBI NO: 15230806 NR Description: glycosyl transferase, putative
  misc_feature (208)..(672): Homolog of NCBI NO: 38423965 NR Description: putative glycosyltransferase
  misc_feature (215)..(672): Homolog of NCBI NO: 18422837 NR Description: putative protein
  misc_feature (215)..(672): Homolog of NCBI NO: 10177914 NR Description: emb|CAB71043.1~gene_id:MCA23.10~strong similarity
  misc_feature (161)..(673): Homolog of NCBI NO: 37533460 NR Description: hypothetical protein [Oryza sativa (japonica
  misc_feature (544)..(673): Homolog of NCBI NO: 15227235 NR Description: hypothetical protein; protein id: At2g46480.1
  misc_feature (150)..(558): Homolog of NCBI NO: 15227235 NR Description: hypothetical protein; protein id: At2g46480.1
  misc_feature (90)..(673): Homolog of NCBI NO: 30691875 NR Description: glycosyltransferase family 8 [Arabidopsis
  misc_feature (90)..(673): Homolog of NCBI NO: 7485958 NR Description: hypothetical protein F22I13.40 - Arabidopsis
  misc_feature (86)..(673): Homolog of NCBI NO: 7271113 NR Description: 68 kDa protein [Cicer arietinum]
  misc_feature (227)..(670): Homolog of NCBI NO: 15230806 NR Description: glycosyl transferase, putative
  misc_feature (208)..(672): Homolog of NCBI NO: 38423965 NR Description: putative glycosyltransferase
  misc_feature (215)..(672): Homolog of NCBI NO: 18422837 NR Description: putative protein
  misc_feature (215)..(672): Homolog of NCBI NO: 10177914 NR Description: emb|CAB71043.1~gene_id:MCA23.10~strong similarity
  misc_feature (161)..(673): Homolog of NCBI NO: 37533460 NR Description: hypothetical protein [Oryza sativa (japonica
  misc_feature (544)..(673): Homolog of NCBI NO: 15227235 NR Description: hypothetical protein; protein id: At2g46480.1
  misc_feature (150)..(558): Homolog of NCBI NO: 15227235 NR Description: hypothetical protein; protein id: At2g46480.1
  misc_feature (90)..(673): Homolog of NCBI NO: 30691875 NR Description: glycosyltransferase family 8 [Arabidopsis
  misc_feature (90)..(673): Homolog of NCBI NO: 7485958 NR Description: hypothetical protein F22I13.40 - Arabidopsis
  misc_feature (86)..(673): Homolog of NCBI NO: 7271113 NR Description: 68 kDa protein [Cicer arietinum]

SEQ ID NO: 48704 - protein, 605 aa, Arabidopsis thaliana; identical to SEQ ID NO: 47503
  peptide (1)..(605): Ceres Seq. ID no. 12601298
  misc_feature (159)..(602): Homolog of NCBI NO: 15230806 NR Description: glycosyl transferase, putative
  misc_feature (140)..(604): Homolog of NCBI NO: 38423965 NR Description: putative glycosyltransferase
  misc_feature (147)..(604): Homolog of NCBI NO: 18422837 NR Description: putative protein
  misc_feature (147)..(604): Homolog of NCBI NO: 10177914 NR Description: emb|CAB71043.1~gene_id:MCA23.10~strong similarity
  misc_feature (93)..(605): Homolog of NCBI NO: 37533460 NR Description: hypothetical protein [Oryza sativa (japonica
  misc_feature (476)..(605): Homolog of NCBI NO: 15227235 NR Description: hypothetical protein; protein id: At2g46480.1
  misc_feature (82)..(490): Homolog of NCBI NO: 15227235 NR Description: hypothetical protein; protein id: At2g46480.1
  misc_feature (22)..(605): Homolog of NCBI NO: 30691875 NR Description: glycosyltransferase family 8 [Arabidopsis
  misc_feature (22)..(605): Homolog of NCBI NO: 7485958 NR Description: hypothetical protein F22I13.40 - Arabidopsis
  misc_feature (18)..(605): Homolog of NCBI NO: 7271113 NR Description: 68 kDa protein [Cicer arietinum]
  misc_feature (159)..(602): Homolog of NCBI NO: 15230806 NR Description: glycosyl transferase, putative
  misc_feature (140)..(604): Homolog of NCBI NO: 38423965 NR Description: putative glycosyltransferase
  misc_feature (147)..(604): Homolog of NCBI NO: 18422837 NR Description: putative protein
  misc_feature (147)..(604): Homolog of NCBI NO: 10177914 NR Description: emb|CAB71043.1~gene_id:MCA23.10~strong similarity
  misc_feature (93)..(605): Homolog of NCBI NO: 37533460 NR Description: hypothetical protein [Oryza sativa (japonica
  misc_feature (476)..(605): Homolog of NCBI NO: 15227235 NR Description: hypothetical protein; protein id: At2g46480.1
  misc_feature (82)..(490): Homolog of NCBI NO: 15227235 NR Description: hypothetical protein; protein id: At2g46480.1
  misc_feature (22)..(605): Homolog of NCBI NO: 30691875 NR Description: glycosyltransferase family 8 [Arabidopsis
  misc_feature (22)..(605): Homolog of NCBI NO: 7485958 NR Description: hypothetical protein F22I13.40 - Arabidopsis
  misc_feature (18)..(605): Homolog of NCBI NO: 7271113 NR Description: 68 kDa protein [Cicer arietinum]

SEQ ID NO: 48705 - protein, 507 aa, Arabidopsis thaliana; identical to SEQ ID NO: 47504
  peptide (1)..(507): Ceres Seq. ID no. 12601299
  misc_feature (61)..(504): Homolog of NCBI NO: 15230806 NR Description: glycosyl transferase, putative
  misc_feature (42)..(506): Homolog of NCBI NO: 38423965 NR Description: putative glycosyltransferase
  misc_feature (49)..(506): Homolog of NCBI NO: 18422837 NR Description: putative protein
  misc_feature (49)..(506): Homolog of NCBI NO: 10177914 NR Description: emb|CAB71043.1~gene_id:MCA23.10~strong similarity
  misc_feature (1)..(507): Homolog of NCBI NO: 37533460 NR Description: hypothetical protein [Oryza sativa (japonica
  misc_feature (378)..(507): Homolog of NCBI NO: 15227235 NR Description: hypothetical protein; protein id: At2g46480.1
  misc_feature (1)..(392): Homolog of NCBI NO: 15227235 NR Description: hypothetical protein; protein id: At2g46480.1
  misc_feature (1)..(507): Homolog of NCBI NO: 30691875 NR Description: glycosyltransferase family 8 [Arabidopsis
  misc_feature (1)..(507): Homolog of NCBI NO: 7485958 NR Description: hypothetical protein F22I13.40 - Arabidopsis
  misc_feature (1)..(507): Homolog of NCBI NO: 7271113 NR Description: 68 kDa protein [Cicer arietinum]
  misc_feature (61)..(504): Homolog of NCBI NO: 15230806 NR Description: glycosyl transferase, putative
  misc_feature (42)..(506): Homolog of NCBI NO: 38423965 NR Description: putative glycosyltransferase
  misc_feature (49)..(506): Homolog of NCBI NO: 18422837 NR Description: putative protein
  misc_feature (49)..(506): Homolog of NCBI NO: 10177914 NR Description: emb|CAB71043.1~gene_id:MCA23.10~strong similarity
  misc_feature (1)..(507): Homolog of NCBI NO: 37533460 NR Description: hypothetical protein [Oryza sativa (japonica
  misc_feature (378)..(507): Homolog of NCBI NO: 15227235 NR Description: hypothetical protein; protein id: At2g46480.1
  misc_feature (1)..(392): Homolog of NCBI NO: 15227235 NR Description: hypothetical protein; protein id: At2g46480.1
  misc_feature (1)..(507): Homolog of NCBI NO: 30691875 NR Description: glycosyltransferase family 8 [Arabidopsis
  misc_feature (1)..(507): Homolog of NCBI NO: 7485958 NR Description: hypothetical protein F22I13.40 - Arabidopsis
  misc_feature (1)..(507): Homolog of NCBI NO: 7271113 NR Description: 68 kDa protein [Cicer arietinum]

SEQ ID NO: 48706 - DNA, 2386 bp, Arabidopsis thaliana; identical to SEQ ID NO: 46186
  misc_feature (1)..(2386): Ceres Seq. ID no. 12601233
  misc_feature: MA Experiment ID: 20000286 Result: Down-regulated in Transcription
  misc_feature: MA Experiment 20000286 PARAMETER Experiment Name: At_Open_Flower_P Parameter: Age (day) Value: 21
  misc_feature: MA Experiment 20000286 PARAMETER Experiment Name: At_Open_Flower_P Parameter: Plant Line Value: WS
  misc_feature: MA Experiment 20000286 PARAMETER Experiment Name: At_Open_Flower_P Parameter: Tissue Value: Half Open vs. Whole Plant
  misc_feature: MA Experiment ID: 20000439 Result: Down-regulated in Transcription
  misc_feature: MA Experiment 20000439 PARAMETER Experiment Name: At_Roots__P Parameter: Age (day) Value: 14 vs. 21
  misc_feature: MA Experiment 20000439 PARAMETER Experiment Name: At_Roots__P Parameter: Organism Value: A. thaliana
  misc_feature: MA Experiment 20000439 PARAMETER Experiment Name: At_Roots__P Parameter: Tissue Value: Roots vs. Whole Plant
  misc_feature: MA Experiment ID: 20001451 Result: Up-regulated in Transcription
  misc_feature: MA Experiment 20001451 PARAMETER Experiment Name: At_Far-red-induction_P Parameter: Age (day) Value: 7
  misc_feature: MA Experiment 20001451 PARAMETER Experiment Name: At_Far-red-induction_P Parameter: Light Value: Far-red vs. White
  misc_feature: MA Experiment 20001451 PARAMETER Experiment Name: At_Far-red-induction_P Parameter: Organism Value: A. thaliana
  misc_feature: MA Experiment 20001451 PARAMETER Experiment Name: At_Far-red-induction_P Parameter: Plant Line Value: Columbia
  misc_feature: MA Experiment 20001451 PARAMETER Experiment Name: At_Far-red-induction_P Parameter: Timepoint (hr) Value: 24
  misc_feature: MA Experiment 20001451 PARAMETER Experiment Name: At_Far-red-induction_P Parameter: Tissue Value: Whole Plant
  misc_feature: MA Experiment ID: 20001905 Result: Down-regulated in Transcription
  misc_feature: MA Experiment 20001905 PARAMETER Experiment Name: At_Drought_Reproduction_P Parameter: Age (day) Value: 40
  misc_feature: MA Experiment 20001905 PARAMETER Experiment Name: At_Drought_Reproduction_P Parameter: Organism Value: A. thaliana
  misc_feature: MA Experiment 20001905 PARAMETER Experiment Name: At_Drought_Reproduction_P Parameter: Plant Line Value: WS
  misc_feature: MA Experiment 20001905 PARAMETER Experiment Name: At_Drought_Reproduction_P Parameter: Timepoint (day) Value: 10
  misc_feature: MA Experiment 20001905 PARAMETER Experiment Name: At_Drought_Reproduction_P Parameter: Tissue Value: Rosettes
  misc_feature: MA Experiment 20001905 PARAMETER Experiment Name: At_Drought_Reproduction_P Parameter: Treatment Value: Drought vs. No Drought

SEQ ID NO: 48707 - protein, 619 aa, Arabidopsis thaliana; identical to SEQ ID NO: 46187
  peptide (1)..(619): Ceres Seq. ID no. 12601234
  misc_feature (56)..(544): Homolog of NCBI NO: 21536497 NR Description: F-box protein family, AtFBL4 [Arabidopsis
  misc_feature (56)..(619): Homolog of NCBI NO: 18412567 NR Description: transport inhibitor response 1 (TIR1), AtFBL1
  misc_feature (58)..(619): Homolog of NCBI NO: 18412177 NR Description: F-box protein GRR1-like protein 1, AtFBL18
  misc_feature (58)..(619): Homolog of NCBI NO: 12658970 NR Description: GRR1-like protein 1 [Arabidopsis thaliana]
  misc_feature (50)..(619): Homolog of NCBI NO: 18405102 NR Description: transport inhibitor response 1 (TIR1), putative
  misc_feature (50)..(619): Homolog of NCBI NO: 18391439 NR Description: transport inhibitor response 1 (TIR1), putative
  misc_feature (8)..(619): Homolog of NCBI NO: 34902412 NR Description: Putative F-box containing protein TIR1
  misc_feature (1)..(619): Homolog of NCBI NO: 13249030 NR Description: F-box containing protein TIR1
  misc_feature (8)..(619): Homolog of NCBI NO: 7487322 NR Description: hypothetical protein T22A6.220 - Arabidopsis
  misc_feature (1)..(619): Homolog of NCBI NO: 30686516 NR Description: F-box protein family, AtFBX14 [Arabidopsis
  misc_feature (56)..(544): Homolog of NCBI NO: 21536497 NR Description: F-box protein family, AtFBL4 [Arabidopsis
  misc_feature (56)..(619): Homolog of NCBI NO: 18412567 NR Description: transport inhibitor response 1 (TIR1), AtFBL1
  misc_feature (58)..(619): Homolog of NCBI NO: 18412177 NR Description: F-box protein GRR1-like protein 1, AtFBL18
  misc_feature (58)..(619): Homolog of NCBI NO: 12658970 NR Description: GRR1-like protein 1 [Arabidopsis thaliana]
  misc_feature (50)..(619): Homolog of NCBI NO: 18405102 NR Description: transport inhibitor response 1 (TIR1), putative
  misc_feature (50)..(619): Homolog of NCBI NO: 18391439 NR Description: transport inhibitor response 1 (TIR1), putative
  misc_feature (8)..(619): Homolog of NCBI NO: 34902412 NR Description: Putative F-box containing protein TIR1
  misc_feature (1)..(619): Homolog of NCBI NO: 13249030 NR Description: F-box containing protein TIR1
  misc_feature (8)..(619): Homolog of NCBI NO: 7487322 NR Description: hypothetical protein T22A6.220 - Arabidopsis
  misc_feature (1)..(619): Homolog of NCBI NO: 30686516 NR Description: F-box protein family, AtFBX14 [Arabidopsis

SEQ ID NO: 48708 - protein, 612 aa, Arabidopsis thaliana; identical to SEQ ID NO: 46188
  peptide (1)..(612): Ceres Seq. ID no. 12601235
  misc_feature (49)..(537): Homolog of NCBI NO: 21536497 NR Description: F-box protein family, AtFBL4 [Arabidopsis
  misc_feature (49)..(612): Homolog of NCBI NO: 18412567 NR Description: transport inhibitor response 1 (TIR1), AtFBL1
  misc_feature (51)..(612): Homolog of NCBI NO: 18412177 NR Description: F-box protein GRR1-like protein 1, AtFBL18
  misc_feature (51)..(612): Homolog of NCBI NO: 12658970 NR Description: GRR1-like protein 1 [Arabidopsis thaliana]
  misc_feature (43)..(612): Homolog of NCBI NO: 18405102 NR Description: transport inhibitor response 1 (TIR1), putative
  misc_feature (43)..(612): Homolog of NCBI NO: 18391439 NR Description: transport inhibitor response 1 (TIR1), putative
  misc_feature (1)..(612): Homolog of NCBI NO: 34902412 NR Description: Putative F-box containing protein TIR1
  misc_feature (1)..(612): Homolog of NCBI NO: 13249030 NR Description: F-box containing protein TIR1
  misc_feature (1)..(612): Homolog of NCBI NO: 7487322 NR Description: hypothetical protein T22A6.220 - Arabidopsis
  misc_feature (1)..(612): Homolog of NCBI NO: 30686516 NR Description: F-box protein family, AtFBX14 [Arabidopsis
  misc_feature (49)..(537): Homolog of NCBI NO: 21536497 NR Description: F-box protein family, AtFBL4 [Arabidopsis
  misc_feature (49)..(612): Homolog of NCBI NO: 18412567 NR Description: transport inhibitor response 1 (TIR1), AtFBL1
  misc_feature (51)..(612): Homolog of NCBI NO: 18412177 NR Description: F-box protein GRR1-like protein 1, AtFBL18
  misc_feature (51)..(612): Homolog of NCBI NO: 12658970 NR Description: GRR1-like protein 1 [Arabidopsis thaliana]
  misc_feature (43)..(612): Homolog of NCBI NO: 18405102 NR Description: transport inhibitor response 1 (TIR1), putative
  misc_feature (43)..(612): Homolog of NCBI NO: 18391439 NR Description: transport inhibitor response 1 (TIR1), putative
  misc_feature (1)..(612): Homolog of NCBI NO: 34902412 NR Description: Putative F-box containing protein TIR1
  misc_feature (1)..(612): Homolog of NCBI NO: 13249030 NR Description: F-box containing protein TIR1
  misc_feature (1)..(612): Homolog of NCBI NO: 7487322 NR Description: hypothetical protein T22A6.220 - Arabidopsis
  misc_feature (1)..(612): Homolog of NCBI NO: 30686516 NR Description: F-box protein family, AtFBX14 [Arabidopsis

SEQ ID NO: 48709 - protein, 490 aa, Arabidopsis thaliana; identical to SEQ ID NO: 46189
  peptide (1)..(490): Ceres Seq. ID no. 12601236
  misc_feature (1)..(415): Homolog of NCBI NO: 21536497 NR Description: F-box protein family, AtFBL4 [Arabidopsis
  misc_feature (1)..(490): Homolog of NCBI NO: 18412567 NR Description: transport inhibitor response 1 (TIR1), AtFBL1
  misc_feature (1)..(490): Homolog of NCBI NO: 18412177 NR Description: F-box protein GRR1-like protein 1, AtFBL18
  misc_feature (1)..(490): Homolog of NCBI NO: 12658970 NR Description: GRR1-like protein 1 [Arabidopsis thaliana]
  misc_feature (1)..(490): Homolog of NCBI NO: 18405102 NR Description: transport inhibitor response 1 (TIR1), putative
  misc_feature (1)..(490): Homolog of NCBI NO: 18391439 NR Description: transport inhibitor response 1 (TIR1), putative
  misc_feature (1)..(490): Homolog of NCBI NO: 34902412 NR Description: Putative F-box containing protein TIR1
  misc_feature (1)..(490): Homolog of NCBI NO: 13249030 NR Description: F-box containing protein TIR1
  misc_feature (1)..(490): Homolog of NCBI NO: 7487322 NR Description: hypothetical protein T22A6.220 - Arabidopsis
  misc_feature (1)..(490): Homolog of NCBI NO: 30686516 NR Description: F-box protein family, AtFBX14 [Arabidopsis
  misc_feature (1)..(415): Homolog of NCBI NO: 21536497 NR Description: F-box protein family, AtFBL4 [Arabidopsis
  misc_feature (1)..(490): Homolog of NCBI NO: 18412567 NR Description: transport inhibitor response 1 (TIR1), AtFBL1
  misc_feature (1)..(490): Homolog of NCBI NO: 18412177 NR Description: F-box protein GRR1-like protein 1, AtFBL18
  misc_feature (1)..(490): Homolog of NCBI NO: 12658970 NR Description: GRR1-like protein 1 [Arabidopsis thaliana]
  misc_feature (1)..(490): Homolog of NCBI NO: 18405102 NR Description: transport inhibitor response 1 (TIR1), putative
  misc_feature (1)..(490): Homolog of NCBI NO: 18391439 NR Description: transport inhibitor response 1 (TIR1), putative
  misc_feature (1)..(490): Homolog of NCBI NO: 34902412 NR Description: Putative F-box containing protein TIR1
  misc_feature (1)..(490): Homolog of NCBI NO: 13249030 NR Description: F-box containing protein TIR1
  misc_feature (1)..(490): Homolog of NCBI NO: 7487322 NR Description: hypothetical protein T22A6.220 - Arabidopsis
  misc_feature (1)..(490): Homolog of NCBI NO: 30686516 NR Description: F-box protein family, AtFBX14 [Arabidopsis

SEQ ID NO: 48710 - DNA, 1322 bp, Arabidopsis thaliana
  misc_feature (1)..(1322): Ceres Seq. ID no. 13592047
  misc_feature: MA Experiment ID: 20000234 Result: Up-regulated in Transcription
  misc_feature: MA Experiment 20000234 PARAMETER Experiment Name: At_Siliques_P Parameter: Age (day) Value: 21
  misc_feature: MA Experiment 20000234 PARAMETER Experiment Name: At_Siliques_P Parameter: Organism Value: A. thaliana
  misc_feature: MA Experiment 20000234 PARAMETER Experiment Name: At_Siliques_P Parameter: Plant Line Value: WS
  misc_feature: MA Experiment 20000234 PARAMETER Experiment Name: At_Siliques_P Parameter: Tissue Value: Less Than 5mm Siliques vs. Whole Plant
  misc_feature: MA Experiment ID: 20000264 Result: Up-regulated in Transcription
  misc_feature: MA Experiment 20000264 PARAMETER Experiment Name: At_Open_Flower_P Parameter: Age (day) Value: 21
  misc_feature: MA Experiment 20000264 PARAMETER Experiment Name: At_Open_Flower_P Parameter: Plant Line Value: WS
  misc_feature: MA Experiment 20000264 PARAMETER Experiment Name: At_Open_Flower_P Parameter: Tissue Value: Open Flower vs. Whole Plant
  misc_feature: MA Experiment ID: 20000265 Result: Up-regulated in Transcription
  misc_feature: MA Experiment 20000265 PARAMETER Experiment Name: At_Open_Flower_P Parameter: Age (day) Value: 21
  misc_feature: MA Experiment 20000265 PARAMETER Experiment Name: At_Open_Flower_P Parameter: Plant Line Value: WS
  misc_feature: MA Experiment 20000265 PARAMETER Experiment Name: At_Open_Flower_P Parameter: Tissue Value: Closed Flower vs. Whole Plant
  misc_feature: MA Experiment ID: 20000286 Result: Up-regulated in Transcription
  misc_feature: MA Experiment 20000286 PARAMETER Experiment Name: At_Open_Flower_P Parameter: Age (day) Value: 21
  misc_feature: MA Experiment 20000286 PARAMETER Experiment Name: At_Open_Flower_P Parameter: Plant Line Value: WS
  misc_feature: MA Experiment 20000286 PARAMETER Experiment Name: At_Open_Flower_P Parameter: Tissue Value: Half Open vs. Whole Plant
  misc_feature: MA Experiment ID: 20000443 Result: Down-regulated in Transcription
  misc_feature: MA Experiment 20000443 PARAMETER Experiment Name: At_1uM_BR-BRZ__P Parameter: Tissue Value: Shoot Apices
  misc_feature: MA Experiment 20000443 PARAMETER Experiment Name: At_1uM_BR-BRZ__P Parameter: Treatment Value: 1uM BRZ vs. No Treatment
  misc_feature: MA Experiment ID: 20000495 Result: Up-regulated in Transcription
  misc_feature: MA Experiment 20000495 PARAMETER Experiment Name: At_Guard_Cells_P Parameter: Harvest Date Value: 8/2/2002
  misc_feature: MA Experiment 20000495 PARAMETER Experiment Name: At_Guard_Cells_P Parameter: Organism Value: A. thaliana
  misc_feature: MA Experiment 20000495 PARAMETER Experiment Name: At_Guard_Cells_P Parameter: Tissue Value: Guard Cells vs. Leaves
  misc_feature: MA Experiment ID: 20000794 Result: Up-regulated in Transcription
  misc_feature: MA Experiment 20000794 PARAMETER Experiment Name: At_Petals_P Parameter: Age (day) Value: 23-25 days
  misc_feature: MA Experiment 20000794 PARAMETER Experiment Name: At_Petals_P Parameter: Plant Line Value: WS
  misc_feature: MA Experiment 20000794 PARAMETER Experiment Name: At_Petals_P Parameter: Tissue Value: Petals vs. Whole plant
  misc_feature: MA Experiment ID: 20001911 Result: Down-regulated in Transcription
  misc_feature: MA Experiment 20001911 PARAMETER Experiment Name: At_Drought_Reproduction_P Parameter: Age (day) Value: 40
  misc_feature: MA Experiment 20001911 PARAMETER Experiment Name: At_Drought_Reproduction_P Parameter: Organism Value: A. thaliana
  misc_feature: MA Experiment 20001911 PARAMETER Experiment Name: At_Drought_Reproduction_P Parameter: Plant Line Value: WS
  misc_feature: MA Experiment 20001911 PARAMETER Experiment Name: At_Drought_Reproduction_P Parameter: Timepoint (day) Value: 10
  misc_feature: MA Experiment 20001911 PARAMETER Experiment Name: At_Drought_Reproduction_P Parameter: Tissue Value: Flowers
  misc_feature: MA Experiment 20001911 PARAMETER Experiment Name: At_Drought_Reproduction_P Parameter: Treatment Value: Drought vs. No Drought
ttcgttaagctctttcatactctgttccatctctctctctctttctcactgatctcatttcattccttatctttccaattttaccctcacgttaccttcgaattctccatctcctaccattcaaagcttctctcagatgtctatagtctctaagcttcgttctccggttaaaccaatagatgagtcacgagctatcctctgttcgaccgggaacagatttaaggttacgaaaacagaaatgacgaagaagccacaactgaatccacgagtgacgaaatctccggcgacgaagaagcccgattccaatttctcagtttcgactgatgattcctcttcttcttcttcatcctcggaacgttcgtcagtgaacacgacaaactctgggaaagtaaccactccgtcgaaacggaacggagttgagaagctcaataatgtcgttgcctccgtcgccgtcgttgaagacattagtcctaaaattccgggaccggtcaagagatgccactggatcacacctaattcagacccgatctatgttttgttccacgacgaggaatggggtgttccagttcgtgatgacaagaaactcttcgagctacttgtcttctcacaagctttggctgagtttagctggccttcaatcctacgcagaagagacgactttaggaagctctttgaagagtttgatccttcagctatagcacaattcacagagaagaggttgatgtctcttagagttaatgggtgtctaattctatccgaacagaaactgcgagcaattgtagagaacgcgaaatctgttctcaaggtcaagcaggaatttggatcgttcagtaattattgttggagatttgtgaaccacaagccattaagaaatggctatcgatatggtcgtcaagtaccggttaagtccccaaaggcagagtacattagcaaagatatgatgcagagagggtttcgctgcgttggtcctactgttatgtattccttcttgcaggcctctggcattgttaatgatcatctcacagcttgtttcagataccaagaatgtaatgttgagactgagagagaaacaaaaagccatgagactgaaaccaaactggatctgcattctccattacttgtttgatcagaaacagggattggactattaagaagatgagtgaccagtgtttgtattcgttatggaatgtaccatttgtagctagctgtgttcattgattatgctactatcctagctagctttgtctaactagatatttgatgatgtgttagtgtttgaccaaaagattgattgcagggaaataaagaatttaacattttgt

SEQ ID NO: 48711 - protein, 329 aa, Arabidopsis thaliana
  peptide (1)..(329): Ceres Seq. ID no. 13592048
  misc_feature (123)..(303): Pfam Name: Methyladenine glycosylase Pfam Description: Methyladenine glycosylase
  misc_feature (61)..(310): Homolog of NCBI NO: 25518014 NR Description: F21F23.7 protein - Arabidopsis thaliana
  misc_feature (119)..(304): Homolog of NCBI NO: 15241554 NR Description: expressed protein [Arabidopsis thaliana]
  misc_feature (47)..(306): Homolog of NCBI NO: 21536975 NR Description: unknown [Arabidopsis thaliana]
  misc_feature (47)..(306): Homolog of NCBI NO: 18399721 NR Description: expressed protein [Arabidopsis thaliana]
  misc_feature (31)..(312): Homolog of NCBI NO: 15218379 NR Description: expressed protein [Arabidopsis thaliana]
  misc_feature (64)..(322): Homolog of NCBI NO: 38345034 NR Description: OSJNBa0029H02.18 [Oryza sativa (japonica
  misc_feature (12)..(309): Homolog of NCBI NO: 15220860 NR Description: DNA-3-methyladenine glycosidase -related
  misc_feature (31)..(310): Homolog of NCBI NO: 15242914 NR Description: expressed protein [Arabidopsis thaliana]
  misc_feature (124)..(329): Homolog of NCBI NO: 25406407 NR Description: hypothetical protein F9E10.6 [imported] -
  misc_feature (1)..(329): Homolog of NCBI NO: 18410766 NR Description: DNA-3-methyladenine glycosylase I -related
MSIVSKLRSPVKPIDESRAILCSTGNRFKVTKTEMTKKPQLNPRVTKSPATKKPDSNFSVSTDDSSSSSSSSERSSVNTTNSGKVTTPSKRNGVEKLNNVVASVAVVEDISPKIPGPVKRCHWITPNSDPIYVLFHDEEWGVPVRDDKKLFELLVFSQALAEFSWPSILRRRDDFRKLFEEFDPSAIAQFTEKRLMSLRVNGCLILSEQKLRAIVENAKSVLKVKQEFGSFSNYCWRFVNHKPLRNGYRYGRQVPVKSPKAEYISKDMMQRGFRCVGPTVMYSFLQASGIVNDHLTACFRYQECNVETERETKSHETETKLDLHSPLLV

SEQ ID NO: 48712 - protein, 295 aa, Arabidopsis thaliana
  peptide (1)..(295): Ceres Seq. ID no. 13592049
  misc_feature (89)..(269): Pfam Name: Methyladenine glycosylase Pfam Description: Methyladenine glycosylase
  misc_feature (27)..(276): Homolog of NCBI NO: 25518014 NR Description: F21F23.7 protein - Arabidopsis thaliana
  misc_feature (85)..(270): Homolog of NCBI NO: 15241554 NR Description: expressed protein [Arabidopsis thaliana]
  misc_feature (13)..(272): Homolog of NCBI NO: 21536975 NR Description: unknown [Arabidopsis thaliana]
  misc_feature (13)..(272): Homolog of NCBI NO: 18399721 NR Description: expressed protein [Arabidopsis thaliana]
  misc_feature (1)..(278): Homolog of NCBI NO: 15218379 NR Description: expressed protein [Arabidopsis thaliana]
  misc_feature (30)..(288): Homolog of NCBI NO: 38345034 NR Description: OSJNBa0029H02.18 [Oryza sativa (japonica
  misc_feature (1)..(275): Homolog of NCBI NO: 15220860 NR Description: DNA-3-methyladenine glycosidase -related
  misc_feature (1)..(276): Homolog of NCBI NO: 15242914 NR Description: expressed protein [Arabidopsis thaliana]
  misc_feature (90)..(295): Homolog of NCBI NO: 25406407 NR Description: hypothetical protein F9E10.6 [imported] -
  misc_feature (1)..(295): Homolog of NCBI NO: 18410766 NR Description: DNA-3-methyladenine glycosylase I -related
MTKKPQLNPRVTKSPATKKPDSNFSVSTDDSSSSSSSSERSSVNTTNSGKVTTPSKRNGVEKLNNVVASVAVVEDISPKIPGPVKRCHWITPNSDPIYVLFHDEEWGVPVRDDKKLFELLVFSQALAEFSWPSILRRRDDFRKLFEEFDPSAIAQFTEKRLMSLRVNGCLILSEQKLRAIVENAKSVLKVKQEFGSFSNYCWRFVNHKPLRNGYRYGRQVPVKSPKAEYISKDMMQRGFRCVGPTVMYSFLQASGIVNDHLTACFRYQECNVETERETKSHETETKLDLHSPLLV

SEQ ID NO: 48713 - DNA, 1855 bp, Arabidopsis thaliana
  misc_feature (1)..(1855): Ceres Seq. ID no. 15175604
tgtctctctctctctctctcggttctcttcttcactgagctcaaagcgattacctcccatgggaaaaatctctgaagtgattatttagcactactttttctttgtctccttctgaatccattttttatggatcttggagttcgtgtttctggtcatgaaaccgtttcttctccgggtcaaactgaactcggatctggtttcagtaacaagcaagaaagatccggtttcgatggtgaagattgctggagaagttcaaagctctcacgaacatcaactgatggattctcttcttcccctgcctctgctaaaacgctgtcgtttcatcaaggcatccctttactgagatctaccactaatgatcctcgtaaaggacaagaacacatgcttagcttctcttctgcttcagacaaatcagatgtctcaccttatcttcagtactgtagaaactcaggatatggtttaggaggaatgatgaacacaagcaacatgcatggaaacttgttgacaggagtaaaaggacctttttcattgactcagtgggcagagctagagcaacaggcgttgatctataagtatatcacagccaatgtccctgttccatctagtttacttctctctctcaagaaatcttttttcccttatggttccttgcctcctaattcttttggatggggctcttttcatctgggcttttccggtggtaacatggatcccgagccagggagatgtcgccggacagatggaaagaaatggcggtgctcgagggacgctgttcccgatcaaaagtactgtgaacgacatattaacagaggccgccatcgttcaagaaagcctgtggaaggccaaaatggccacaatactaatgctgccgccgctgcttctgctgctgccgcttctaccgctgctgctgtgtccaaagcggcagcggggacttcagctgttgcgatgcgtggatcagataataacaatagccttgccgctgctgttggaacacaacatcataccaataatcaatctacagattctttggctaacagagttcaaaattctcgaggggcttcggtttttcctgccacgatgaacttacagtcgaaggaaactcatccgaaacaaagcaataatccctttgaattcggactcatctcctctgattcgttacttaatccgtcgcataaacaagcctcgtatgcaacctcttccaaaggctttggatcgtatcttgacttcggcaaccaagccaagcacgcggggaatcacaacaatgtcgattcttggcccgaagagctgaaatcggattggactcagctctcaatgtcaatccctatggctccatcttcccctgttcaagataaacttgcactctcacctttaaggttatcgcgtgagtttgaccccgcgatccacatgggattaggcgtcaacaccgagtttcttgaccccgggaaaaagacgaataactggataccaatctcctggggtaataacaactccatgggaggtccactcggcgaggtactaaacagcacgaccaatagtcccaagtttggttcctctccaacaggcgtcttgcaaaagtcgacatttggttctctttctaacagcagctcggcaagcagcaccatcattggcgataacaacaataagaacggtgatggaaaagatccgcttggcccgaccacgctgatgaatacttctgctactgctccttctctgtgaaactgaaaaaaaaaaaactaaggacaattgcgaaaacaaaaacactctgtttttctctgtttctggtttttcttacttgatgcattgttgtttctgttgctgttttctttctatataaagcaagaagaaactaaaggag

SEQ ID NO: 48714 - protein, 529 aa, Arabidopsis thaliana
  peptide (1)..(529): Ceres Seq. ID no. 15175605
  misc_feature (115)..(389): Homolog of NCBI NO: 30682907 NR Description: transcription activator (GRL5) [Arabidopsis
  misc_feature (115)..(389): Homolog of NCBI NO: 11994367 NR Description: gb|AAF17567.1~gene_id:MDC16.8~similar to unknown
  misc_feature (115)..(273): Homolog of NCBI NO: 6573149 NR Description: growth-regulating factor 1 [Oryza sativa]
  misc_feature (88)..(347): Homolog of NCBI NO: 12039285 NR Description: unknown protein [Oryza sativa]
  misc_feature (111)..(528): Homolog of NCBI NO: 28273382 NR Description: putative transcription activator
  misc_feature (1)..(102): Homolog of NCBI NO: 7487502 NR Description: hypothetical protein T28I19.20 - Arabidopsis
  misc_feature (51)..(509): Homolog of NCBI NO: 7487502 NR Description: hypothetical protein T28I19.20 - Arabidopsis
  misc_feature (1)..(102): Homolog of NCBI NO: 30691328 NR Description: transcription activator (GRL2) [Arabidopsis
  misc_feature (90)..(509): Homolog of NCBI NO: 30691328 NR Description: transcription activator (GRL2) [Arabidopsis
  misc_feature (1)..(529): Homolog of NCBI NO: 15227758 NR Description: transcription activator (GRL1) [Arabidopsis
MDLGVRVSGHETVSSPGQTELGSGFSNKQERSGFDGEDCWRSSKLSRTSTDGFSSSPASAKTLSFHQGIPLLRSTTNDPRKGQEHMLSFSSASDKSDVSPYLQYCRNSGYGLGGMMNTSNMHGNLLTGVKGPFSLTQWAELEQQALIYKYITANVPVPSSLLLSLKKSFFPYGSLPPNSFGWGSFHLGFSGGNMDPEPGRCRRTDGKKWRCSRDAVPDQKYCERHINRGRHRSRKPVEGQNGHNTNAAAAASAAAASTAAAVSKAAAGTSAVAMRGSDNNNSLAAAVGTQHHTNNQSTDSLANRVQNSRGASVFPATMNLQSKETHPKQSNNPFEFGLISSDSLLNPSHKQASYATSSKGFGSYLDFGNQAKHAGNHNNVDSWPEELKSDWTQLSMSIPMAPSSPVQDKLALSPLRLSREFDPAIHMGLGVNTEFLDPGKKTNNWIPISWGNNNSMGGPLGEVLNSTTNSPKFGSSPTGVLQKSTFGSLSNSSSASSTIIGDNNNKNGDGKDPLGPTTLMNTSATAPSL

SEQ ID NO: 48715 - protein, 444 aa, Arabidopsis thaliana
  peptide (1)..(444): Ceres Seq. ID no. 15175606
  misc_feature (30)..(304): Homolog of NCBI NO: 30682907 NR Description: transcription activator (GRL5) [Arabidopsis
  misc_feature (30)..(304): Homolog of NCBI NO: 11994367 NR Description: gb|AAF17567.1~gene_id:MDC16.8~similar to unknown
  misc_feature (30)..(188): Homolog of NCBI NO: 6573149 NR Description: growth-regulating factor 1 [Oryza sativa]
  misc_feature (3)..(262): Homolog of NCBI NO: 12039285 NR Description: unknown protein [Oryza sativa]
  misc_feature (26)..(443): Homolog of NCBI NO: 28273382 NR Description: putative transcription activator
  misc_feature (1)..(17): Homolog of NCBI NO: 7487502 NR Description: hypothetical protein T28I19.20 - Arabidopsis
  misc_feature (1)..(424): Homolog of NCBI NO: 7487502 NR Description: hypothetical protein T28I19.20 - Arabidopsis
  misc_feature (1)..(17): Homolog of NCBI NO: 30691328 NR Description: transcription activator (GRL2) [Arabidopsis
  misc_feature (5)..(424): Homolog of NCBI NO: 30691328 NR Description: transcription activator (GRL2) [Arabidopsis
  misc_feature (1)..(444): Homolog of NCBI NO: 15227758 NR Description: transcription activator (GRL1) [Arabidopsis
MLSFSSASDKSDVSPYLQYCRNSGYGLGGMMNTSNMHGNLLTGVKGPFSLTQWAELEQQALIYKYITANVPVPSSLLLSLKKSFFPYGSLPPNSFGWGSFHLGFSGGNMDPEPGRCRRTDGKKWRCSRDAVPDQKYCERHINRGRHRSRKPVEGQNGHNTNAAAAASAAAASTAAAVSKAAAGTSAVAMRGSDNNNSLAAAVGTQHHTNNQSTDSLANRVQNSRGASVFPATMNLQSKETHPKQSNNPFEFGLISSDSLLNPSHKQASYATSSKGFGSYLDFGNQAKHAGNHNNVDSWPEELKSDWTQLSMSIPMAPSSPVQDKLALSPLRLSREFDPAIHMGLGVNTEFLDPGKKTNNWIPISWGNNNSMGGPLGEVLNSTTNSPKFGSSPTGVLQKSTFGSLSNSSSASSTIIGDNNNKNGDGKDPLGPTTLMNTSATAPSL

SEQ ID NO: 48716 - protein, 415 aa, Arabidopsis thaliana; identical to SEQ ID NO: 45498
  peptide (1)..(415): Ceres Seq. ID no. 15175607
  misc_feature (14)..(157): Homolog of NCBI NO: 32470646 NR Description: putative growth-regulating factor [Solanum
  misc_feature (1)..(186): Homolog of NCBI NO: 38345778 NR Description: OSJNBa0083N12.16 [Oryza sativa (japonica
  misc_feature (1)..(275): Homolog of NCBI NO: 30682907 NR Description: transcription activator (GRL5) [Arabidopsis
  misc_feature (1)..(275): Homolog of NCBI NO: 11994367 NR Description: gb|AAF17567.1~gene_id:MDC16.8~similar to unknown
  misc_feature (1)..(159): Homolog of NCBI NO: 6573149 NR Description: growth-regulating factor 1 [Oryza sativa]
  misc_feature (1)..(233): Homolog of NCBI NO: 12039285 NR Description: unknown protein [Oryza sativa]
  misc_feature (1)..(414): Homolog of NCBI NO: 28273382 NR Description: putative transcription activator
  misc_feature (1)..(395): Homolog of NCBI NO: 7487502 NR Description: hypothetical protein T28I19.20 - Arabidopsis
  misc_feature (1)..(395): Homolog of NCBI NO: 30691328 NR Description: transcription activator (GRL2) [Arabidopsis
  misc_feature (1)..(415): Homolog of NCBI NO: 15227758 NR Description: transcription activator (GRL1) [Arabidopsis

SEQ ID NO: 48717 - DNA, 1877 bp, Arabidopsis thaliana
  misc_feature (1)..(1877): Ceres Seq. ID no. 13592013
  misc_feature: MA Experiment ID: 20000184 Result: Down-regulated in Transcription
  misc_feature: MA Experiment 20000184 PARAMETER Experiment Name: At_Shoots__P Parameter: Age (day) Value: 7
  misc_feature: MA Experiment 20000184 PARAMETER Experiment Name: At_Shoots__P Parameter: Tissue Value: Shoots vs. Whole Plant
  misc_feature: MA Experiment ID: 20000496 Result: Down-regulated in Transcription
  misc_feature: MA Experiment 20000496 PARAMETER Experiment Name: At_Guard_Cells_P Parameter: Harvest Date Value: 7/19/2002
  misc_feature: MA Experiment 20000496 PARAMETER Experiment Name: At_Guard_Cells_P Parameter: Organism Value: Canola
  misc_feature: MA Experiment 20000496 PARAMETER Experiment Name: At_Guard_Cells_P Parameter: Tissue Value: Guard Cells vs. Leaves
gacgtaagattcttctccttttgaactgtaaaattcactcttttttaatttcttaatctttcttatcattactttctctattttattttgncattttctcttaaaccttcttcttcttcttcctttgatcagtaaaaaaagtcaccgccttcttcttctctttcctctttcccctaattgatcaatcatgcttcttcatttctagttctctcttcctgactcatttccctcattagatcttcttctccactaaacccataattgaaagaagctctttttttgcttacattgaagttaaaaaatcatcacttgttttgtttttgaagaaacacacataaagtttgtctttttacttctcaaatttggttgttttcactcaatttcaatcttgctttctgattcagattctgggttttcttcagaattcccagagaagttgttggaattgaatttttcacttttttgttcataaaagttctagtctttttagatgaacatggacaaggaaacagagcaaaccctaaattacttacctttgggtcagagcgatccctttggcaatggcaatgaaggaacaattggagatttccttggaagatactgcaacaaccctcaggagatttcaccgttaactctacaatccttctctctgaattctcagatctccgagaatttcccaatctctggtggaatcagattccctccatatccaggtcaatttggatccgatcgtgaatttgggtcacaaccaacaacgcaggagagtaacaagagctctttgttggatccagattcagtttcggatcgagttcacaccacgaaatctaactctagaaagaggaagtcgattcctagtggtaatggcaaggagtctccagcttcatcgtctcttacagcttccaattcaaaggtttcaggagagaatggtggatctaaaggtgggaagagaagcaagcaagatgtagctgggagtagtaaaaacggagtagagaagtgcgatagtaaaggcgacaataaggacgatgctaagcctcctgaggcgcctaaagattatattcatgtcagagctagaaggggtcaagcaactgatagccatagtcttgctgaaagagcaagaagagaaaagattagtgagagaatgacgttgcttcaggatctggttcctggttgcaaccggattacagggaaagcagtcatgcttgatgaaattataaattatgtgcagtccttgcagagacaagttgagttcttgtccatgaagctggctaccgtaaatccaaggatggagtttaatgctaatgcttctttatccacagagatgattcaaccgggggagtcgttaacgcagtctctttacgcaatggcttgctcagagcaaagacttccatcagcatactattcacttggcaagaacatgccaagattctcagacacacaattcccctcaaacgatggatttgttcacactgagacaccaggattctgggaaaataatgacctgcaaagcattgttcagatgggttttggagatatcctccagcaacagagcaacaacaacaacaacaactgttctgagccaacgcttcagatgaagcttgaaccatagtccatagctatgattattatctctgttgtacatacagaaaaccaagtagtgatgagtaacggagtgaatcatattggaattttaatgtttacaatcgttgcttctttgcttgtgtctctgttgatttcttctcaaccttaaacaaaaaaaaaacaagaaaacttcagattaagtatgtaaaaatatgacaagaacttttctctgtactgttttacaatcgttatgtattatgattgctctaagcttgtaagaaacaggaataaatttgttc

SEQ ID NO: 48718 - protein, 371 aa, Arabidopsis thaliana
  peptide (1)..(371): Ceres Seq. ID no. 13592014
  misc_feature (198)..(248): Pfam Name: Helix-loop-helix DNA-binding domain Pfam Description: Helix-loop-helix DNA-binding domain
  misc_feature (25)..(309): Homolog of NCBI NO: 20127064 NR Description: putative bHLH transcription factor [Arabidopsis
  misc_feature (25)..(309): Homolog of NCBI NO: 15231450 NR Description: bHLH protein family [Arabidopsis thaliana]
  misc_feature (21)..(294): Homolog of NCBI NO: 29647487 NR Description: OJ1191_A10.7 [Oryza sativa (japonica
  misc_feature (110)..(371): Homolog of NCBI NO: 15221563 NR Description: DNA-binding protein -related [Arabidopsis
  misc_feature (110)..(371): Homolog of NCBI NO: 20127044 NR Description: putative bHLH transcription factor [Arabidopsis
  misc_feature (110)..(371): Homolog of NCBI NO: 30697769 NR Description: DNA-binding protein -related [Arabidopsis
  misc_feature (74)..(331): Homolog of NCBI NO: 34906952 NR Description: DNA-binding protein-like protein
  misc_feature (51)..(283): Homolog of NCBI NO: 20127085 NR Description: putative bHLH transcription factor [Arabidopsis
  misc_feature (51)..(283): Homolog of NCBI NO: 15239013 NR Description: bHLH protein family [Arabidopsis thaliana]
  misc_feature (1)..(371): Homolog of NCBI NO: 22331295 NR Description: bHLH protein [Arabidopsis thaliana]
MNMDKETEQTLNYLPLGQSDPFGNGNEGTIGDFLGRYCNNPQEISPLTLQSFSLNSQISENFPISGGIRFPPYPGQFGSDREFGSQPTTQESNKSSLLDPDSVSDRVHTTKSNSRKRKSIPSGNGKESPASSSLTASNSKVSGENGGSKGGKRSKQDVAGSSKNGVEKCDSKGDNKDDAKPPEAPKDYIHVRARRGQATDSHSLAERARREKISERMTLLQDLVPGCNRITGKAVMLDEIINYVQSLQRQVEFLSMKLATVNPRMEFNANASLSTEMIQPGESLTQSLYAMACSEQRLPSAYYSLGKNMPRFSDTQFPSNDGFVHTETPGFWENNDLQSIVQMGFGDILQQQSNNNNNNCSEPTLQMKLEP

SEQ ID NO: 48719 - protein, 369 aa, Arabidopsis thaliana
  peptide (1)..(369): Ceres Seq. ID no. 13592015
  misc_feature (196)..(246): Pfam Name: Helix-loop-helix DNA-binding domain Pfam Description: Helix-loop-helix DNA-binding domain
  misc_feature (23)..(307): Homolog of NCBI NO: 20127064 NR Description: putative bHLH transcription factor [Arabidopsis
  misc_feature (23)..(307): Homolog of NCBI NO: 15231450 NR Description: bHLH protein family [Arabidopsis thaliana]
  misc_feature (19)..(292): Homolog of NCBI NO: 29647487 NR Description: OJ1191_A10.7 [Oryza sativa (japonica
  misc_feature (108)..(369): Homolog of NCBI NO: 15221563 NR Description: DNA-binding protein -related [Arabidopsis
  misc_feature (108)..(369): Homolog of NCBI NO: 20127044 NR Description: putative bHLH transcription factor [Arabidopsis
  misc_feature (108)..(369): Homolog of NCBI NO: 30697769 NR Description: DNA-binding protein -related [Arabidopsis
  misc_feature (72)..(329): Homolog of NCBI NO: 34906952 NR Description: DNA-binding protein-like protein
  misc_feature (49)..(281): Homolog of NCBI NO: 20127085 NR Description: putative bHLH transcription factor [Arabidopsis
  misc_feature (49)..(281): Homolog of NCBI NO: 15239013 NR Description: bHLH protein family [Arabidopsis thaliana]
  misc_feature (1)..(369): Homolog of NCBI NO: 22331295 NR Description: bHLH protein [Arabidopsis thaliana]
MDKETEQTLNYLPLGQSDPFGNGNEGTIGDFLGRYCNNPQEISPLTLQSFSLNSQISENFPISGGIRFPPYPGQFGSDREFGSQPTTQESNKSSLLDPDSVSDRVHTTKSNSRKRKSIPSGNGKESPASSSLTASNSKVSGENGGSKGGKRSKQDVAGSSKNGVEKCDSKGDNKDDAKPPEAPKDYIHVRARRGQATDSHSLAERARREKISERMTLLQDLVPGCNRITGKAVMLDEIINYVQSLQRQVEFLSMKLATVNPRMEFNANASLSTEMIQPGESLTQSLYAMACSEQRLPSAYYSLGKNMPRFSDTQFPSNDGFVHTETPGFWENNDLQSIVQMGFGDILQQQSNNNNNNCSEPTLQMKLEP

SEQ ID NO: 48720 - DNA, 1186 bp, Arabidopsis thaliana
  misc_feature (1)..(1186): Ceres Seq. ID no. 15168776
  misc_feature: MA Experiment ID: 20001911 Result: Up-regulated in Transcription
  misc_feature: MA Experiment 20001911 PARAMETER Experiment Name: At_Drought_Reproduction_P Parameter: Age (day) Value: 40
  misc_feature: MA Experiment 20001911 PARAMETER Experiment Name: At_Drought_Reproduction_P Parameter: Organism Value: A. thaliana
  misc_feature: MA Experiment 20001911 PARAMETER Experiment Name: At_Drought_Reproduction_P Parameter: Plant Line Value: WS
  misc_feature: MA Experiment 20001911 PARAMETER Experiment Name: At_Drought_Reproduction_P Parameter: Timepoint (day) Value: 10
  misc_feature: MA Experiment 20001911 PARAMETER Experiment Name: At_Drought_Reproduction_P Parameter: Tissue Value: Flowers
  misc_feature: MA Experiment 20001911 PARAMETER Experiment Name: At_Drought_Reproduction_P Parameter: Treatment Value: Drought vs. No Drought
gggctcacggtttagtacatgcacacaaagcaaaaacgctggtttgtctttttttttaaaaagaacttcgtttctcttcaattccgttaccgtcactgtcaccgttcacctccgtttatctcatcctcaccgttcatcttcttcgatctaactcgccgtcgttcaccttataatggacaccgtcaacgattccttttcgccgggatcttcccgaccttcgccggcgacgctttctcgtgaagattgctggagcgaggaagcgaccttcacgctcatccaagcctggggtaatcgctacgtcgacctcagccgaggtaatctccgtcagaaacactggcaagaggtggctaacgccgttaacgaccgtcactacaacaccggtcgaaacgtttccgccgccaaatcgcagccgtatcgcaccgacgttcagtgtaaaaaccggatcgatactctgaagaagaagtacaaagtcgagaaggctagggtttcggaatccaatcccggtgcctacatcagcccttggcctttcttctccgctctcgatgaccttctccgggaaagctttccgacgtctagtaatcctgattcaactgataacatcccgcaccagaggctaacacttccgatgtccattaatccagttccggtcgctccacgatcggcgatccccagacgtccggcgacatcgccggcgattatacctcacgccggtgacgatttactcggatttcgcgggaatctcaacgcattcgcggcagccgcagcggcggcggcgtgtccggcgtctgaagatgactcggaaggttcaaggtctagatcgagcggtcgtagcgggagtaacaagaagcgggagaggaaaattgagaagaagcaaggctacaaggaagttgccgacgcaattgagaggcttggacagatatacgagagagtcgaggagaagaagaggaaggaaatggttgaattggagaagcagagaatgagattcgctaaggaattggaatgccataggatgcaactgttcacggagatgcaggtacgccttcataagctccggcgtacctctggctccaaaggaccgacttcctccgcctccgccggtgagacctgaatcctttctctcgccgtatttcgtaatctgttcagaattctatgtctttctccattgtttagctgtgtaacagtgact

SEQ ID NO: 48721 - protein, 311 aa, Arabidopsis thaliana
  peptide (1)..(311): Ceres Seq. ID no. 15168777
  misc_feature (186)..(301): Homolog of NCBI NO: 18414919 NR Description: expressed protein [Arabidopsis thaliana]
  misc_feature (3)..(127): Homolog of NCBI NO: 18414919 NR Description: expressed protein [Arabidopsis thaliana]
  misc_feature (186)..(305): Homolog of NCBI NO: 10178132 NR Description: gb|AAF01512.1~gene_id:MOP10.9~similar to unknown
  misc_feature (3)..(127): Homolog of NCBI NO: 10178132 NR Description: gb|AAF01512.1~gene_id:MOP10.9~similar to unknown
  misc_feature (205)..(305): Homolog of NCBI NO: 15231799 NR Description: expressed protein [Arabidopsis thaliana]
  misc_feature (12)..(192): Homolog of NCBI NO: 15231799 NR Description: expressed protein [Arabidopsis thaliana]
  misc_feature (7)..(274): Homolog of NCBI NO: 18149189 NR Description: 6b-interacting protein 1 [Nicotiana tabacum]
  misc_feature (77)..(310): Homolog of NCBI NO: 18149189 NR Description: 6b-interacting protein 1 [Nicotiana tabacum]
  misc_feature (1)..(308): Homolog of NCBI NO: 30694843 NR Description: expressed protein [Arabidopsis thaliana]
  misc_feature (1)..(311): Homolog of NCBI NO: 11357442 NR Description: hypothetical protein F14P22.220 - Arabidopsis
MDTVNDSFSPGSSRPSPATLSREDCWSEEATFTLIQAWGNRYVDLSRGNLRQKHWQEVANAVNDRHYNTGRNVSAAKSQPYRTDVQCKNRIDTLKKKYKVEKARVSESNPGAYISPWPFFSALDDLLRESFPTSSNPDSTDNIPHQRLTLPMSINPVPVAPRSAIPRRPATSPAIIPHAGDDLLGFRGNLNAFAAAAAAAACPASEDDSEGSRSRSSGRSGSNKKRERKIEKKQGYKEVADAIERLGQIYERVEEKKRKEMVELEKQRMRFAKELECHRMQLFTEMQVRLHKLRRTSGSKGPTSSASAGET

SEQ ID NO: 48722 - protein, 160 aa, Arabidopsis thaliana
  peptide (1)..(160): Ceres Seq. ID no. 15168778
  misc_feature (38)..(160): Homolog of NCBI NO: 12321891 NR Description: hypothetical protein; 14486-13072 [Arabidopsis
  misc_feature (35)..(141): Homolog of NCBI NO: 30680994 NR Description: expressed protein [Arabidopsis thaliana]
  misc_feature (35)..(150): Homolog of NCBI NO: 18414919 NR Description: expressed protein [Arabidopsis thaliana]
  misc_feature (35)..(154): Homolog of NCBI NO: 10178132 NR Description: gb|AAF01512.1~gene_id:MOP10.9~similar to unknown
  misc_feature (54)..(154): Homolog of NCBI NO: 15231799 NR Description: expressed protein [Arabidopsis thaliana]
  misc_feature (1)..(41): Homolog of NCBI NO: 15231799 NR Description: expressed protein [Arabidopsis thaliana]
  misc_feature (1)..(123): Homolog of NCBI NO: 18149189 NR Description: 6b-interacting protein 1 [Nicotiana tabacum]
  misc_feature (1)..(159): Homolog of NCBI NO: 18149189 NR Description: 6b-interacting protein 1 [Nicotiana tabacum]
  misc_feature (1)..(157): Homolog of NCBI NO: 30694843 NR Description: expressed protein [Arabidopsis thaliana]
  misc_feature (1)..(160): Homolog of NCBI NO: 11357442 NR Description: hypothetical protein F14P22.220 - Arabidopsis
MSINPVPVAPRSAIPRRPATSPAIIPHAGDDLLGFRGNLNAFAAAAAAAACPASEDDSEGSRSRSSGRSGSNKKRERKIEKKQGYKEVADAIERLGQIYERVEEKKRKEMVELEKQRMRFAKELECHRMQLFTEMQVRLHKLRRTSGSKGPTSSASAGET

SEQ ID NO: 48723 - DNA, 2185 bp, Arabidopsis thaliana; identical to SEQ ID NO: 30616
  misc_feature (1)..(2185): Ceres Seq. ID no. 13591907
  misc_feature: MA Experiment ID: 108434 Result: Up-regulated in Transcription
  misc_feature: MA Experiment 108434 PARAMETER Experiment Name: At_Root_Tips_cDNA_P Parameter: Tissue Value: Root Tips

SEQ ID NO: 48724 - protein, 446 aa, Arabidopsis thaliana; identical to SEQ ID NO: 30617
  peptide (1)..(446): Ceres Seq. ID no. 13591908
  misc_feature (68)..(311): Pfam Name: PET112 family, N terminal region Pfam Description: PET112 family, N terminal region
  misc_feature (68)..(311): Pfam Name: PET112 family, N terminal region Pfam Description: PET112 family, N terminal region
  misc_feature (69)..(446): Homolog of NCBI NO: 33239504 NR Description: Asp-tRNAAsn/Glu-tRNAGln amidotransferase B
  misc_feature (6)..(214): Homolog of NCBI NO: 8778692 NR Description: T1N15.14 [Arabidopsis thaliana]
  misc_feature (139)..(438): Homolog of NCBI NO: 8778692 NR Description: T1N15.14 [Arabidopsis thaliana]
  misc_feature (69)..(438): Homolog of NCBI NO: 24418853 NR Description: Aspartyl/glutamyl-tRNA(Asn/Gln) amidotransferase
  misc_feature (69)..(438): Homolog of NCBI NO: 16330901 NR Description: PET112 protein [Synechocystis sp. PCC 6803]
  misc_feature (69)..(446): Homolog of NCBI NO: 33239504 NR Description: Asp-tRNAAsn/Glu-tRNAGln amidotransferase B
  misc_feature (139)..(438): Homolog of NCBI NO: 8778692 NR Description: T1N15.14 [Arabidopsis thaliana]
  misc_feature (69)..(438): Homolog of NCBI NO: 16330901 NR Description: PET112 protein [Synechocystis sp. PCC 6803]
  misc_feature (1)..(438): Homolog of NCBI NO: 18402234 NR Description: Glu-tRNA(Gln) amidotransferase subunit B
  misc_feature (69)..(446): Homolog of NCBI NO: 23123952 NR Description: hypothetical protein [Nostoc punctiforme]
  misc_feature (70)..(438): Homolog of NCBI NO: 23042361 NR Description: hypothetical protein [Trichodesmium erythraeum
  misc_feature (70)..(446): Homolog of NCBI NO: 22299937 NR Description: Glu-tRNA(Gln) amidotransferase subunit B
  misc_feature (69)..(446): Homolog of NCBI NO: 17228891 NR Description: glutamyl-tRNA (Gln) amidotransferase subunit B
  misc_feature (69)..(438): Homolog of NCBI NO: 24418853 NR Description: Aspartyl/glutamyl-tRNA(Asn/Gln) amidotransferase
  misc_feature (6)..(214): Homolog of NCBI NO: 8778692 NR Description: T1N15.14 [Arabidopsis thaliana]
  misc_feature (69)..(446): Homolog of NCBI NO: 17228891 NR Description: glutamyl-tRNA (Gln) amidotransferase subunit B
  misc_feature (70)..(446): Homolog of NCBI NO: 22299937 NR Description: Glu-tRNA(Gln) amidotransferase subunit B
  misc_feature (70)..(438): Homolog of NCBI NO: 23042361 NR Description: hypothetical protein [Trichodesmium erythraeum
  misc_feature (69)..(446): Homolog of NCBI NO: 23123952 NR Description: hypothetical protein [Nostoc punctiforme]
  misc_feature (1)..(438): Homolog of NCBI NO: 18402234 NR Description: Glu-tRNA(Gln) amidotransferase subunit B

SEQ ID NO: 48725 - protein, 338 aa, Arabidopsis thaliana; identical to SEQ ID NO: 30618
  peptide (1)..(338): Ceres Seq. ID no. 13591909
  misc_feature (1)..(203): Pfam Name: PET112 family, N terminal region Pfam Description: PET112 family, N terminal region
  misc_feature (1)..(203): Pfam Name: PET112 family, N terminal region Pfam Description: PET112 family, N terminal region
  misc_feature (1)..(338): Homolog of NCBI NO: 33239504 NR Description: Asp-tRNAAsn/Glu-tRNAGln amidotransferase B
  misc_feature (1)..(106): Homolog of NCBI NO: 8778692 NR Description: T1N15.14 [Arabidopsis thaliana]
  misc_feature (31)..(330): Homolog of NCBI NO: 8778692 NR Description: T1N15.14 [Arabidopsis thaliana]
  misc_feature (1)..(330): Homolog of NCBI NO: 24418853 NR Description: Aspartyl/glutamyl-tRNA(Asn/Gln) amidotransferase
  misc_feature (1)..(330): Homolog of NCBI NO: 16330901 NR Description: PET112 protein [Synechocystis sp. PCC 6803]
  misc_feature (1)..(338): Homolog of NCBI NO: 33239504 NR Description: Asp-tRNAAsn/Glu-tRNAGln amidotransferase B
  misc_feature (31)..(330): Homolog of NCBI NO: 8778692 NR Description: T1N15.14 [Arabidopsis thaliana]
  misc_feature (1)..(330): Homolog of NCBI NO: 16330901 NR Description: PET112 protein [Synechocystis sp. PCC 6803]
  misc_feature (1)..(330): Homolog of NCBI NO: 18402234 NR Description: Glu-tRNA(Gln) amidotransferase subunit B
  misc_feature (1)..(338): Homolog of NCBI NO: 23123952 NR Description: hypothetical protein [Nostoc punctiforme]
  misc_feature (1)..(330): Homolog of NCBI NO: 23042361 NR Description: hypothetical protein [Trichodesmium erythraeum
  misc_feature (1)..(338): Homolog of NCBI NO: 22299937 NR Description: Glu-tRNA(Gln) amidotransferase subunit B
  misc_feature (1)..(338): Homolog of NCBI NO: 17228891 NR Description: glutamyl-tRNA (Gln) amidotransferase subunit B
  misc_feature (1)..(330): Homolog of NCBI NO: 24418853 NR Description: Aspartyl/glutamyl-tRNA(Asn/Gln) amidotransferase
  misc_feature (1)..(106): Homolog of NCBI NO: 8778692 NR Description: T1N15.14 [Arabidopsis thaliana]
  misc_feature (1)..(338): Homolog of NCBI NO: 17228891 NR Description: glutamyl-tRNA (Gln) amidotransferase subunit B
  misc_feature (1)..(338): Homolog of NCBI NO: 22299937 NR Description: Glu-tRNA(Gln) amidotransferase subunit B
  misc_feature (1)..(330): Homolog of NCBI NO: 23042361 NR Description: hypothetical protein [Trichodesmium erythraeum
  misc_feature (1)..(338): Homolog of NCBI NO: 23123952 NR Description: hypothetical protein [Nostoc punctiforme]
  misc_feature (1)..(330): Homolog of NCBI NO: 18402234 NR Description: Glu-tRNA(Gln) amidotransferase subunit B

SEQ ID NO: 48726 - protein, 253 aa, Arabidopsis thaliana; identical to SEQ ID NO: 30619
  peptide (1)..(253): Ceres Seq. ID no. 13591910
  misc_feature (1)..(118): Pfam Name: PET112 family, N terminal region Pfam Description: PET112 family, N terminal region
  misc_feature (1)..(118): Pfam Name: PET112 family, N terminal region Pfam Description: PET112 family, N terminal region
  misc_feature (1)..(253): Homolog of NCBI NO: 33239504 NR Description: Asp-tRNAAsn/Glu-tRNAGln amidotransferase B
  misc_feature (1)..(21): Homolog of NCBI NO: 8778692 NR Description: T1N15.14 [Arabidopsis thaliana]
  misc_feature (1)..(245): Homolog of NCBI NO: 8778692 NR Description: T1N15.14 [Arabidopsis thaliana]
  misc_feature (1)..(245): Homolog of NCBI NO: 24418853 NR Description: Aspartyl/glutamyl-tRNA(Asn/Gln) amidotransferase
  misc_feature (1)..(245): Homolog of NCBI NO: 16330901 NR Description: PET112 protein [Synechocystis sp. PCC 6803]
  misc_feature (1)..(253): Homolog of NCBI NO: 33239504 NR Description: Asp-tRNAAsn/Glu-tRNAGln amidotransferase B
  misc_feature (1)..(245): Homolog of NCBI NO: 8778692 NR Description: T1N15.14 [Arabidopsis thaliana]
  misc_feature (1)..(245): Homolog of NCBI NO: 16330901 NR Description: PET112 protein [Synechocystis sp. PCC 6803]
  misc_feature (1)..(245): Homolog of NCBI NO: 18402234 NR Description: Glu-tRNA(Gln) amidotransferase subunit B
  misc_feature (1)..(253): Homolog of NCBI NO: 23123952 NR Description: hypothetical protein [Nostoc punctiforme]
  misc_feature (1)..(245): Homolog of NCBI NO: 23042361 NR Description: hypothetical protein [Trichodesmium erythraeum
  misc_feature (1)..(253): Homolog of NCBI NO: 22299937 NR Description: Glu-tRNA(Gln) amidotransferase subunit B
  misc_feature (1)..(253): Homolog of NCBI NO: 17228891 NR Description: glutamyl-tRNA (Gln) amidotransferase subunit B
  misc_feature (1)..(245): Homolog of NCBI NO: 24418853 NR Description: Aspartyl/glutamyl-tRNA(Asn/Gln) amidotransferase
  misc_feature (1)..(21): Homolog of NCBI NO: 8778692 NR Description: T1N15.14 [Arabidopsis thaliana]
  misc_feature (1)..(253): Homolog of NCBI NO: 17228891 NR Description: glutamyl-tRNA (Gln) amidotransferase subunit B
  misc_feature (1)..(253): Homolog of NCBI NO: 22299937 NR Description: Glu-tRNA(Gln) amidotransferase subunit B
  misc_feature (1)..(245): Homolog of NCBI NO: 23042361 NR Description: hypothetical protein [Trichodesmium erythraeum
  misc_feature (1)..(253): Homolog of NCBI NO: 23123952 NR Description: hypothetical protein [Nostoc punctiforme]
  misc_feature (1)..(245): Homolog of NCBI NO: 18402234 NR Description: Glu-tRNA(Gln) amidotransferase subunit B

SEQ ID NO: 48727 - DNA, 1704 bp, Arabidopsis thaliana
  misc_feature (1)..(1704): Ceres Seq. ID no. 15175797
  misc_feature: MA Experiment ID: 108462 Result: Up-regulated in Transcription
  misc_feature: MA Experiment 108462 PARAMETER Experiment Name: At_Germinating_Seeds_cDNA_P Parameter: Age (day) Value: 2 vs. 0
  misc_feature: MA Experiment 108462 PARAMETER Experiment Name: At_Germinating_Seeds_cDNA_P Parameter: Tissue Value: Germinating Seeds
  misc_feature: MA Experiment ID: 108463 Result: Up-regulated in Transcription
  misc_feature: MA Experiment 108463 PARAMETER Experiment Name: At_Germinating_Seeds_cDNA_P Parameter: Age (day) Value: 3 vs. 0
  misc_feature: MA Experiment 108463 PARAMETER Experiment Name: At_Germinating_Seeds_cDNA_P Parameter: Tissue Value: Germinating Seeds
  misc_feature: MA Experiment ID: 108464 Result: Up-regulated in Transcription
  misc_feature: MA Experiment 108464 PARAMETER Experiment Name: At_Germinating_Seeds_cDNA_P Parameter: Age (day) Value: 4 vs. 0
  misc_feature: MA Experiment 108464 PARAMETER Experiment Name: At_Germinating_Seeds_cDNA_P Parameter: Tissue Value: Germinating Seeds
  misc_feature: MA Experiment ID: 108577 Result: Down-regulated in Transcription
  misc_feature: MA Experiment 108577 PARAMETER Experiment Name: At_42deg_Heat_cDNA_P Parameter: Temperature (deg C) Value: 42 vs. 22
  misc_feature: MA Experiment 108577 PARAMETER Experiment Name: At_42deg_Heat_cDNA_P Parameter: Timepoint (hr) Value: 6
  misc_feature: MA Experiment 108577 PARAMETER Experiment Name: At_42deg_Heat_cDNA_P Parameter: Tissue Value: Aerial
  misc_feature: MA Experiment ID: 108595 Result: Up-regulated in Transcription
  misc_feature: MA Experiment 108595 PARAMETER Experiment Name: At_Ler-pi_Ovule_cDNA_P Parameter: Plant Line Value: null
  misc_feature: MA Experiment ID: 108667 Result: Up-regulated in Transcription
  misc_feature: MA Experiment 108667 PARAMETER Experiment Name: At_2mM_SA_cDNA_P Parameter: Plant Line Value: WS
  misc_feature: MA Experiment 108667 PARAMETER Experiment Name: At_2mM_SA_cDNA_P Parameter: Timepoint (hr) Value: 1
  misc_feature: MA Experiment 108667 PARAMETER Experiment Name: At_2mM_SA_cDNA_P Parameter: Treatment Value: 2mM SA vs. No Treatment
  misc_feature: MA Experiment ID: 108668 Result: Up-regulated in Transcription
  misc_feature: MA Experiment 108668 PARAMETER Experiment Name: At_2mM_SA_cDNA_P Parameter: Plant Line Value: WS
  misc_feature: MA Experiment 108668 PARAMETER Experiment Name: At_2mM_SA_cDNA_P Parameter: Timepoint (hr) Value: 6
  misc_feature: MA Experiment 108668 PARAMETER Experiment Name: At_2mM_SA_cDNA_P Parameter: Treatment Value: 2mM SA vs. No Treatment
  misc_feature: MA Experiment ID: 20000224 Result: Down-regulated in Transcription
  misc_feature: MA Experiment ID: 20000227 Result: Down-regulated in Transcription
  misc_feature: MA Experiment 20000227 PARAMETER Experiment Name: At_Root-Tips-vs-Tops_P Parameter: Tissue Value: Root Tips vs. Root Tops
  misc_feature: MA Experiment ID: 20000234 Result: Down-regulated in Transcription
  misc_feature: MA Experiment 20000234 PARAMETER Experiment Name: At_Siliques_P Parameter: Age (day) Value: 21
  misc_feature: MA Experiment 20000234 PARAMETER Experiment Name: At_Siliques_P Parameter: Organism Value: A. thaliana
  misc_feature: MA Experiment 20000234 PARAMETER Experiment Name: At_Siliques_P Parameter: Plant Line Value: WS
  misc_feature: MA Experiment 20000234 PARAMETER Experiment Name: At_Siliques_P Parameter: Tissue Value: Less Than 5mm Siliques vs. Whole Plant
  misc_feature: MA Experiment ID: 20000235 Result: Down-regulated in Transcription
  misc_feature: MA Experiment 20000235 PARAMETER Experiment Name: At_Siliques_P Parameter: Age (day) Value: 21
  misc_feature: MA Experiment 20000235 PARAMETER Experiment Name: At_Siliques_P Parameter: Organism Value: A. thaliana
  misc_feature: MA Experiment 20000235 PARAMETER Experiment Name: At_Siliques_P Parameter: Plant Line Value: WS
  misc_feature: MA Experiment 20000235 PARAMETER Experiment Name: At_Siliques_P Parameter: Tissue Value: 5-10mm Siliques vs. Whole Plant
  misc_feature: MA Experiment ID: 20000264 Result: Down-regulated in Transcription
  misc_feature: MA Experiment 20000264 PARAMETER Experiment Name: At_Open_Flower_P Parameter: Age (day) Value: 21
  misc_feature: MA Experiment 20000264 PARAMETER Experiment Name: At_Open_Flower_P Parameter: Plant Line Value: WS
  misc_feature: MA Experiment 20000264 PARAMETER Experiment Name: At_Open_Flower_P Parameter: Tissue Value: Open Flower vs. Whole Plant
  misc_feature: MA Experiment ID: 20000265 Result: Down-regulated in Transcription
  misc_feature: MA Experiment 20000265 PARAMETER Experiment Name: At_Open_Flower_P Parameter: Age (day) Value: 21
  misc_feature: MA Experiment 20000265 PARAMETER Experiment Name: At_Open_Flower_P Parameter: Plant Line Value: WS
  misc_feature: MA Experiment 20000265 PARAMETER Experiment Name: At_Open_Flower_P Parameter: Tissue Value: Closed Flower vs. Whole Plant
  misc_feature: MA Experiment ID: 20000286 Result: Down-regulated in Transcription
  misc_feature: MA Experiment 20000286 PARAMETER Experiment Name: At_Open_Flower_P Parameter: Age (day) Value: 21
  misc_feature: MA Experiment 20000286 PARAMETER Experiment Name: At_Open_Flower_P Parameter: Plant Line Value: WS
  misc_feature: MA Experiment 20000286 PARAMETER Experiment Name: At_Open_Flower_P Parameter: Tissue Value: Half Open vs. Whole Plant
  misc_feature: MA Experiment ID: 20000438 Result: Down-regulated in Transcription
  misc_feature: MA Experiment 20000438 PARAMETER Experiment Name: At_Shoots__P Parameter: Age (day) Value: 14
  misc_feature: MA Experiment 20000438 PARAMETER Experiment Name: At_Shoots__P Parameter: Tissue Value: Shoots vs. Whole Plant
  misc_feature: MA Experiment ID: 20000460 Result: Up-regulated in Transcription
  misc_feature: MA Experiment 20000460 PARAMETER Experiment Name: At_10percent_PEG_P Parameter: Age (day) Value: 12
  misc_feature: MA Experiment 20000460 PARAMETER Experiment Name: At_10percent_PEG_P Parameter: Organism Value: A. thaliana
  misc_feature: MA Experiment 20000460 PARAMETER Experiment Name: At_10percent_PEG_P Parameter: Plant Line Value: WS
  misc_feature: MA Experiment 20000460 PARAMETER Experiment Name: At_10percent_PEG_P Parameter: Timepoint (day) Value: 12
  misc_feature: MA Experiment 20000460 PARAMETER Experiment Name: At_10percent_PEG_P Parameter: Tissue Value: Whole Plant
  misc_feature: MA Experiment 20000460 PARAMETER Experiment Name: At_10percent_PEG_P Parameter: Treatment Value: 10percent PEG vs. No Treatment
  misc_feature: MA Experiment ID: 20000527 Result: Up-regulated in Transcription
  misc_feature: MA Experiment 20000527 PARAMETER Experiment Name: At_10percent_PEG_P Parameter: Age (day) Value: 20
  misc_feature: MA Experiment 20000527 PARAMETER Experiment Name: At_10percent_PEG_P Parameter: Organism Value: A. thaliana
  misc_feature: MA Experiment 20000527 PARAMETER Experiment Name: At_10percent_PEG_P Parameter: Plant Line Value: WS
  misc_feature: MA Experiment 20000527 PARAMETER Experiment Name: At_10percent_PEG_P Parameter: Timepoint (day) Value: 20
  misc_feature: MA Experiment 20000527 PARAMETER Experiment Name: At_10percent_PEG_P Parameter: Tissue Value: Whole Plant
  misc_feature: MA Experiment 20000527 PARAMETER Experiment Name: At_10percent_PEG_P Parameter: Treatment Value: 10percent PEG vs. No Treatment
  misc_feature: MA Experiment ID: 20000794 Result: Down-regulated in Transcription
  misc_feature: MA Experiment 20000794 PARAMETER Experiment Name: At_Petals_P Parameter: Age (day) Value: 23-25 days
  misc_feature: MA Experiment 20000794 PARAMETER Experiment Name: At_Petals_P Parameter: Plant Line Value: WS
  misc_feature: MA Experiment 20000794 PARAMETER Experiment Name: At_Petals_P Parameter: Tissue Value: Petals vs. Whole plant
  misc_feature: MA Experiment ID: 20001247 Result: Up-regulated in Transcription
  misc_feature: MA Experiment 20001247 PARAMETER Experiment Name: At_Far-red-induction_P Parameter: Age (day) Value: 7
  misc_feature: MA Experiment 20001247 PARAMETER Experiment Name: At_Far-red-induction_P Parameter: Light Value: Far-red vs. White
  misc_feature: MA Experiment 20001247 PARAMETER Experiment Name: At_Far-red-induction_P Parameter: Organism Value: A. thaliana
  misc_feature: MA Experiment 20001247 PARAMETER Experiment Name: At_Far-red-induction_P Parameter: Plant Line Value: Columbia
  misc_feature: MA Experiment 20001247 PARAMETER Experiment Name: At_Far-red-induction_P Parameter: Timepoint (hr) Value: 1
  misc_feature: MA Experiment 20001247 PARAMETER Experiment Name: At_Far-red-induction_P Parameter: Tissue Value: Whole Plant
  misc_feature: MA Experiment ID: 20001905 Result: Up-regulated in Transcription
  misc_feature: MA Experiment 20001905 PARAMETER Experiment Name: At_Drought_Reproduction_P Parameter: Age (day) Value: 40
  misc_feature: MA Experiment 20001905 PARAMETER Experiment Name: At_Drought_Reproduction_P Parameter: Organism Value: A. thaliana
  misc_feature: MA Experiment 20001905 PARAMETER Experiment Name: At_Drought_Reproduction_P Parameter: Plant Line Value: WS
  misc_feature: MA Experiment 20001905 PARAMETER Experiment Name: At_Drought_Reproduction_P Parameter: Timepoint (day) Value: 10
  misc_feature: MA Experiment 20001905 PARAMETER Experiment Name: At_Drought_Reproduction_P Parameter: Tissue Value: Rosettes
  misc_feature: MA Experiment 20001905 PARAMETER Experiment Name: At_Drought_Reproduction_P Parameter: Treatment Value: Drought vs. No Drought
aaaacaaaactcgcaagtttaacaacgcgtcttctacctcctcctcatcggactatttatctatagtcttcgttagatcaattcctctgttttactcctaagtttcgagatccacatttctttttaacctcatctcatctcttagtcgagatcttcactttctgatgacaatagggtcgtttttctcttctctcttattctggcgcaattctcaggtaacctcaatcgactattctctgttctactccttttttctttatcattttaaaaatcctaacattgaaaataaagtagttaaatagagtcaacgaaaacattgttaatgaaacagtggtgtgcttagcataacgaatcagacagacaaaaagtgtctggatccgtagagcaaagtgttgtcgtgtctttgacaaagttctttgtttgcctaaaccaatttgttcatccgatagaatgaattgcattccgttgttactatcatccaaaccggagatgtcaagccctaaccctcaagtagtatttcttagagagccatgaattgtttgtttagatccaattagaagaaggtttagttgactgtgatgattgtttgtgtttttggtggcaggaccaggaggcgcagagagggaggatgcaggagatagatcttagtgttcacactataaagtcccatggaggaagagtcgcttctaaacacaagcacgattggatcatactcgtcatcttgattgccatcgagataggcttgaacctcatctctcctttctaccgctacgtgggaaaagacatgatgactgacctcaagtaccctttcaaggacaacaccgtacctatctggtctgtccctgtgtacgctgtgcttgttcccatcatagtgttcgtctgcttctacctgaagaggacatgtgtgtacgatctgcaccacagcatcctcgggctgctcttcgccgtcttgataactggtgtcatcactgactccatcaaggtagccaccggacgccctcgtcctaacttctactggcgctgcttccccgacggcaaagagctgtatgatgcgttgggaggtgtggtatgccacggcaaggcagctgaggtcaaggaaggccacaagagcttcccgagcggacacacttcctggtcctttgcggggcttacattcctttccctttacctctctggcaaaatcgaggcctttaacaatgaaggacatgtggctaaactctgcctcgtgatcttccctctgcttgccgcttgtcttgtggggatatctcgtgtggatgactactggcaccactggcaagatgtcttcgcaggagctctcattggcacccttgtagccgccttctgctaccgtcagttctaccccaacccttaccacgaagaaggatggggtccctacgcctatttcaaggcagctcaagaacgaggagtccctgtgacctcctcccaaaacggagatgccttgagggctatgtctctgcagatggattcaacatctctcgaaaacatggaatctggcacttccaccggtcccagatgatcctcctctcttattatttgattcattatttggtttttcattttgatttggccgtcgtcgtgagattgtgaatggtgtagctacatactgtatgtgtattcaaaactctacttgtaccattacatttttgtaaatccactcttcatgaaattgacgtttttctggtg

SEQ ID NO: 48728 - protein, 302 aa, Arabidopsis thaliana
  peptide (1)..(302): Ceres Seq. ID no. 15175798
  misc_feature (108)..(248): Pfam Name: PAP2 superfamily Pfam Description: PAP2 superfamily
  misc_feature (1)..(275): Homolog of NCBI NO: 9279656 NR Description: phosphatidic acid phosphatase-like protein
  misc_feature (1)..(290): Homolog of NCBI NO: 10673973 NR Description: phosphatidic acid phosphatase beta [Vigna
  misc_feature (1)..(287): Homolog of NCBI NO: 15218051 NR Description: phosphatidic acid phosphatase (PAP2) family
  misc_feature (1)..(275): Homolog of NCBI NO: 6957723 NR Description: putative phosphatidate phosphohydrolase
  misc_feature (1)..(275): Homolog of NCBI NO: 18396250 NR Description: phosphatidic acid phosphatase (PAP2) family
  misc_feature (1)..(264): Homolog of NCBI NO: 9621903 NR Description: phosphatidic acid phosphatase alpha [Vigna
  misc_feature (1)..(302): Homolog of NCBI NO: 25353094 NR Description: probable phosphatidic acid phosphatase
  misc_feature (1)..(302): Homolog of NCBI NO: 15724220 NR Description: At2g01180/F10A8.6 [Arabidopsis thaliana]
  misc_feature (1)..(302): Homolog of NCBI NO: 18379166 NR Description: phosphatidic acid phosphatase (PAP2) family
  misc_feature (1)..(302): Homolog of NCBI NO: 21554001 NR Description: putative phosphatidic acid phosphatase
MQEIDLSVHTIKSHGGRVASKHKHDWIILVILIAIEIGLNLISPFYRYVGKDMMTDLKYPFKDNTVPIWSVPVYAVLVPIIVFVCFYLKRTCVYDLHHSILGLLFAVLITGVITDSIKVATGRPRPNFYWRCFPDGKELYDALGGVVCHGKAAEVKEGHKSFPSGHTSWSFAGLTFLSLYLSGKIEAFNNEGHVAKLCLVIFPLLAACLVGISRVDDYWHHWQDVFAGALIGTLVAAFCYRQFYPNPYHEEGWGPYAYFKAAQERGVPVTSSQNGDALRAMSLQMDSTSLENMESGTSTGPR

SEQ ID NO: 48729 - protein, 250 aa, Arabidopsis thaliana
  peptide (1)..(250): Ceres Seq. ID no. 15175799
  misc_feature (56)..(196): Pfam Name: PAP2 superfamily Pfam Description: PAP2 superfamily
  misc_feature (1)..(223): Homolog of NCBI NO: 9279656 NR Description: phosphatidic acid phosphatase-like protein
  misc_feature (1)..(238): Homolog of NCBI NO: 10673973 NR Description: phosphatidic acid phosphatase beta [Vigna
  misc_feature (1)..(235): Homolog of NCBI NO: 15218051 NR Description: phosphatidic acid phosphatase (PAP2) family
  misc_feature (1)..(223): Homolog of NCBI NO: 6957723 NR Description: putative phosphatidate phosphohydrolase
  misc_feature (1)..(223): Homolog of NCBI NO: 18396250 NR Description: phosphatidic acid phosphatase (PAP2) family
  misc_feature (1)..(212): Homolog of NCBI NO: 9621903 NR Description: phosphatidic acid phosphatase alpha [Vigna
  misc_feature (1)..(250): Homolog of NCBI NO: 25353094 NR Description: probable phosphatidic acid phosphatase
  misc_feature (1)..(250): Homolog of NCBI NO: 15724220 NR Description: At2g01180/F10A8.6 [Arabidopsis thaliana]
  misc_feature (1)..(250): Homolog of NCBI NO: 18379166 NR Description: phosphatidic acid phosphatase (PAP2) family
  misc_feature (1)..(250): Homolog of NCBI NO: 21554001 NR Description: putative phosphatidic acid phosphatase
MMTDLKYPFKDNTVPIWSVPVYAVLVPIIVFVCFYLKRTCVYDLHHSILGLLFAVLITGVITDSIKVATGRPRPNFYWRCFPDGKELYDALGGVVCHGKAAEVKEGHKSFPSGHTSWSFAGLTFLSLYLSGKIEAFNNEGHVAKLCLVIFPLLAACLVGISRVDDYWHHWQDVFAGALIGTLVAAFCYRQFYPNPYHEEGWGPYAYFKAAQERGVPVTSSQNGDALRAMSLQMDSTSLENMESGTSTGPR

SEQ ID NO: 48730 - protein, 249 aa, Arabidopsis thaliana
  peptide (1)..(249): Ceres Seq. ID no. 15175800
  misc_feature (55)..(195): Pfam Name: PAP2 superfamily Pfam Description: PAP2 superfamily
  misc_feature (1)..(222): Homolog of NCBI NO: 9279656 NR Description: phosphatidic acid phosphatase-like protein
  misc_feature (1)..(237): Homolog of NCBI NO: 10673973 NR Description: phosphatidic acid phosphatase beta [Vigna
  misc_feature (1)..(234): Homolog of NCBI NO: 15218051 NR Description: phosphatidic acid phosphatase (PAP2) family
  misc_feature (1)..(222): Homolog of NCBI NO: 6957723 NR Description: putative phosphatidate phosphohydrolase
  misc_feature (1)..(222): Homolog of NCBI NO: 18396250 NR Description: phosphatidic acid phosphatase (PAP2) family
  misc_feature (1)..(211): Homolog of NCBI NO: 9621903 NR Description: phosphatidic acid phosphatase alpha [Vigna
  misc_feature (1)..(249): Homolog of NCBI NO: 25353094 NR Description: probable phosphatidic acid phosphatase
  misc_feature (1)..(249): Homolog of NCBI NO: 15724220 NR Description: At2g01180/F10A8.6 [Arabidopsis thaliana]
  misc_feature (1)..(249): Homolog of NCBI NO: 18379166 NR Description: phosphatidic acid phosphatase (PAP2) family
  misc_feature (1)..(249): Homolog of NCBI NO: 21554001 NR Description: putative phosphatidic acid phosphatase
MTDLKYPFKDNTVPIWSVPVYAVLVPIIVFVCFYLKRTCVYDLHHSILGLLFAVLITGVITDSIKVATGRPRPNFYWRCFPDGKELYDALGGVVCHGKAAEVKEGHKSFPSGHTSWSFAGLTFLSLYLSGKIEAFNNEGHVAKLCLVIFPLLAACLVGISRVDDYWHHWQDVFAGALIGTLVAAFCYRQFYPNPYHEEGWGPYAYFKAAQERGVPVTSSQNGDALRAMSLQMDSTSLENMESGTSTGPR

SEQ ID NO: 48731 - DNA, 1300 bp, Arabidopsis thaliana
  misc_feature (1)..(1300): Ceres Seq. ID no. 14310232
  misc_feature: MA Experiment ID: 20001451 Result: Down-regulated in Transcription
  misc_feature: MA Experiment 20001451 PARAMETER Experiment Name: At_Far-red-induction_P Parameter: Age (day) Value: 7
  misc_feature: MA Experiment 20001451 PARAMETER Experiment Name: At_Far-red-induction_P Parameter: Light Value: Far-red vs. White
  misc_feature: MA Experiment 20001451 PARAMETER Experiment Name: At_Far-red-induction_P Parameter: Organism Value: A. thaliana
  misc_feature: MA Experiment 20001451 PARAMETER Experiment Name: At_Far-red-induction_P Parameter: Plant Line Value: Columbia
  misc_feature: MA Experiment 20001451 PARAMETER Experiment Name: At_Far-red-induction_P Parameter: Timepoint (hr) Value: 24
  misc_feature: MA Experiment 20001451 PARAMETER Experiment Name: At_Far-red-induction_P Parameter: Tissue Value: Whole Plant
gatacttgtgtcttgttgtacttgttaaacttgaatcccgtgttcgcgactttgcgatagattctctcaaatccaattccaatggcggatccatcttctcaaaaccctaacctcgccactccccctcctccttcttctccttcaccaacccatcaaattcaatctggaacctcggaattatcgccaccgtctcgaccgccttgctctaccttgtcctttctcaagactgctaaccgaccaaaactccgtgtgacatctgaattcgacagcgatagtctccttttcttaaacaaagtgtcttgtaagctcttcgataaccttgccaagcttaaactctcgtttcagaacaattcccagcgcgagatttcacagcctcaggtctcttttacttccaaacacgtttctgttctctatgatgtcgaagagaagaatactttcattaagagcactctcgatgttcacccgcgtcttcagctccgagctcttcataatgttaaggcacaacaaggagaagttgctatggaggcaaatctgactgaacctggctactctctggagctttcatcacctgtgcctattggttacccaagagcaactcttaaattcccacttggcgaaatttcgttacaagaaaaagatgaggaggaggaggagaagcagaaaagaactttatctgttaatgggatcctcaaacgtcaagttatgaatggtgtttgtaccgctctatacacagatgaagagttgaggctgagatatgcttataaggatgatgcattgtctttcatcccaagtatttcccttccttccaatgctgcatcatttgcattcaaacggcggtttagcccttcagataagttgagctattggtacaactttgattcaaacatgtggagtgctgtgtacaaacgcacatatggtaaagactacaaattaaaagctggctatgattctgatgtacgccttggctgggcatctctctgggttggtgatgaagctggaaaagtgaaaacgacaccaatgaagatgaaagtccagttcatgcttcaagttccacaagatgacatcaaatcatcagtcttgatgttccgagtcaagaaaagatgggacatttgatgaaatctttgaataaatcatctcttagtttcacgttctttaatctctctataaaacccataaaagttgtttgtttctccttatatatcaaatcttttgcaaagtagatacaaaagcttagagtgaataattgcaattgtatttctgtagcttttttttaaatgatctttttcacacgtgtgagact

SEQ ID NO: 48732 - protein, 343 aa, Arabidopsis thaliana; identical to SEQ ID NO: 46843
  peptide (1)..(343): Ceres Seq. ID no. 14310233
  misc_feature (1)..(279): Homolog of NCBI NO: 30689554 NR Description: expressed protein [Arabidopsis thaliana]
  misc_feature (225)..(343): Homolog of NCBI NO: 7486492 NR Description: hypothetical protein At2g43950 [imported] -
  misc_feature (1)..(238): Homolog of NCBI NO: 7486492 NR Description: hypothetical protein At2g43950 [imported] -
  misc_feature (1)..(343): Homolog of NCBI NO: 18406405 NR Description: expressed protein [Arabidopsis thaliana]

SEQ ID NO: 48733 - protein, 197 aa, Arabidopsis thaliana; identical to SEQ ID NO: 46844
  peptide (1)..(197): Ceres Seq. ID no. 14310234
  misc_feature (1)..(133): Homolog of NCBI NO: 30689554 NR Description: expressed protein [Arabidopsis thaliana]
  misc_feature (79)..(197): Homolog of NCBI NO: 7486492 NR Description: hypothetical protein At2g43950 [imported] -
  misc_feature (1)..(92): Homolog of NCBI NO: 7486492 NR Description: hypothetical protein At2g43950 [imported] -
  misc_feature (1)..(197): Homolog of NCBI NO: 18406405 NR Description: expressed protein [Arabidopsis thaliana]

SEQ ID NO: 48734 - DNA, 2745 bp, Arabidopsis thaliana; identical to SEQ ID NO: 45606
  misc_feature (1)..(2745): Ceres Seq. ID no. 13591675
  misc_feature: MA Experiment ID: 20000185 Result: Down-regulated in Transcription
  misc_feature: MA Experiment 20000185 PARAMETER Experiment Name: At_Roots__P Parameter: Age (day) Value: 7 vs. 21
  misc_feature: MA Experiment 20000185 PARAMETER Experiment Name: At_Roots__P Parameter: Organism Value: A. thaliana
  misc_feature: MA Experiment 20000185 PARAMETER Experiment Name: At_Roots__P Parameter: Tissue Value: Roots vs. Whole Plant
  misc_feature: MA Experiment ID: 20000234 Result: Down-regulated in Transcription
  misc_feature: MA Experiment 20000234 PARAMETER Experiment Name: At_Siliques_P Parameter: Age (day) Value: 21
  misc_feature: MA Experiment 20000234 PARAMETER Experiment Name: At_Siliques_P Parameter: Organism Value: A. thaliana
  misc_feature: MA Experiment 20000234 PARAMETER Experiment Name: At_Siliques_P Parameter: Plant Line Value: WS
  misc_feature: MA Experiment 20000234 PARAMETER Experiment Name: At_Siliques_P Parameter: Tissue Value: Less Than 5mm Siliques vs. Whole Plant
  misc_feature: MA Experiment ID: 20000286 Result: Down-regulated in Transcription
  misc_feature: MA Experiment 20000286 PARAMETER Experiment Name: At_Open_Flower_P Parameter: Age (day) Value: 21
  misc_feature: MA Experiment 20000286 PARAMETER Experiment Name: At_Open_Flower_P Parameter: Plant Line Value: WS
  misc_feature: MA Experiment 20000286 PARAMETER Experiment Name: At_Open_Flower_P Parameter: Tissue Value: Half Open vs. Whole Plant
  misc_feature: MA Experiment ID: 20000445 Result: Down-regulated in Transcription
  misc_feature: MA Experiment 20000445 PARAMETER Experiment Name: At_100uM_NAA__P Parameter: Age (day) Value: 14
  misc_feature: MA Experiment 20000445 PARAMETER Experiment Name: At_100uM_NAA__P Parameter: Organism Value: A. thaliana
  misc_feature: MA Experiment 20000445 PARAMETER Experiment Name: At_100uM_NAA__P Parameter: Plant Line Value: WS
  misc_feature: MA Experiment 20000445 PARAMETER Experiment Name: At_100uM_NAA__P Parameter: Timepoint (hr) Value: 6
  misc_feature: MA Experiment 20000445 PARAMETER Experiment Name: At_100uM_NAA__P Parameter: Tissue Value: Aerial
  misc_feature: MA Experiment 20000445 PARAMETER Experiment Name: At_100uM_NAA__P Parameter: Treatment Value: 100uM NAA vs. No Treatment
  misc_feature: MA Experiment ID: 20000496 Result: Up-regulated in Transcription
  misc_feature: MA Experiment 20000496 PARAMETER Experiment Name: At_Guard_Cells_P Parameter: Harvest Date Value: 7/19/2002
  misc_feature: MA Experiment 20000496 PARAMETER Experiment Name: At_Guard_Cells_P Parameter: Organism Value: Canola
  misc_feature: MA Experiment 20000496 PARAMETER Experiment Name: At_Guard_Cells_P Parameter: Tissue Value: Guard Cells vs. Leaves
  misc_feature: MA Experiment ID: 20000709 Result: Down-regulated in Transcription
  misc_feature: MA Experiment 20000709 PARAMETER Experiment Name: At_15mM_NH4NO3_L-to-H_P Parameter: Age (hr) Value: 14
  misc_feature: MA Experiment 20000709 PARAMETER Experiment Name: At_15mM_NH4NO3_L-to-H_P Parameter: Organism Value: A. thaliana
  misc_feature: MA Experiment 20000709 PARAMETER Experiment Name: At_15mM_NH4NO3_L-to-H_P Parameter: Plant Line Value: WS
  misc_feature: MA Experiment 20000709 PARAMETER Experiment Name: At_15mM_NH4NO3_L-to-H_P Parameter: Timepoint (hr) Value: 4
  misc_feature: MA Experiment 20000709 PARAMETER Experiment Name: At_15mM_NH4NO3_L-to-H_P Parameter: Tissue Value: Aerial
  misc_feature: MA Experiment 20000709 PARAMETER Experiment Name: At_15mM_NH4NO3_L-to-H_P Parameter: Treatment Value: 15mM NH4NO3 vs. 30mM Mannitol
  misc_feature: MA Experiment ID: 20001451 Result: Up-regulated in Transcription
  misc_feature: MA Experiment 20001451 PARAMETER Experiment Name: At_Far-red-induction_P Parameter: Age (day) Value: 7
  misc_feature: MA Experiment 20001451 PARAMETER Experiment Name: At_Far-red-induction_P Parameter: Light Value: Far-red vs. White
  misc_feature: MA Experiment 20001451 PARAMETER Experiment Name: At_Far-red-induction_P Parameter: Organism Value: A. thaliana
  misc_feature: MA Experiment 20001451 PARAMETER Experiment Name: At_Far-red-induction_P Parameter: Plant Line Value: Columbia
  misc_feature: MA Experiment 20001451 PARAMETER Experiment Name: At_Far-red-induction_P Parameter: Timepoint (hr) Value: 24
  misc_feature: MA Experiment 20001451 PARAMETER Experiment Name: At_Far-red-induction_P Parameter: Tissue Value: Whole Plant
  misc_feature: MA Experiment ID: 20001557 Result: Up-regulated in Transcription
  misc_feature: MA Experiment 20001557 PARAMETER Experiment Name: At_Drought_Soil_Dry_P Parameter: Age (day) Value: 27
  misc_feature: MA Experiment 20001557 PARAMETER Experiment Name: At_Drought_Soil_Dry_P Parameter: Organism Value: A. thaliana
  misc_feature: MA Experiment 20001557 PARAMETER Experiment Name: At_Drought_Soil_Dry_P Parameter: Plant Line Value: WS
  misc_feature: MA Experiment 20001557 PARAMETER Experiment Name: At_Drought_Soil_Dry_P Parameter: Post Timepoint (hr) Value: 3
  misc_feature: MA Experiment 20001557 PARAMETER Experiment Name: At_Drought_Soil_Dry_P Parameter: Post-Treatment Value: Re-Water vs. No Drought
  misc_feature: MA Experiment 20001557 PARAMETER Experiment Name: At_Drought_Soil_Dry_P Parameter: Timepoint (day) Value: 13
  misc_feature: MA Experiment 20001557 PARAMETER Experiment Name: At_Drought_Soil_Dry_P Parameter: Treatment Value: Drought vs. No Drought
  misc_feature: MA Experiment ID: 20001756 Result: Down-regulated in Transcription
  misc_feature: MA Experiment 20001756 PARAMETER Experiment Name: At_50mM_NH4NO3_L-to-H_P Parameter: Timepoint (hr) Value: 4
  misc_feature: MA Experiment 20001756 PARAMETER Experiment Name: At_50mM_NH4NO3_L-to-H_P Parameter: Tissue Value: Leaf
  misc_feature: MA Experiment 20001756 PARAMETER Experiment Name: At_50mM_NH4NO3_L-to-H_P Parameter: Treatment Value: 50mM NH4NO3 vs 100mM Mannitol
  misc_feature: MA Experiment ID: 20001757 Result: Up-regulated in Transcription
  misc_feature: MA Experiment 20001757 PARAMETER Experiment Name: At_50mM_NH4NO3_L-to-H_P Parameter: Timepoint (hr) Value: 6
  misc_feature: MA Experiment 20001757 PARAMETER Experiment Name: At_50mM_NH4NO3_L-to-H_P Parameter: Tissue Value: Leaf
  misc_feature: MA Experiment 20001757 PARAMETER Experiment Name: At_50mM_NH4NO3_L-to-H_P Parameter: Treatment Value: 50mM NH4NO3 vs 100mM Mannitol
  misc_feature: MA Experiment ID: 20001761 Result: Up-regulated in Transcription
  misc_feature: MA Experiment 20001761 PARAMETER Experiment Name: At_50mM_NH4NO3_L-to-H_P Parameter: Timepoint (hr) Value: 4
  misc_feature: MA Experiment 20001761 PARAMETER Experiment Name: At_50mM_NH4NO3_L-to-H_P Parameter: Tissue Value: Siliques
  misc_feature: MA Experiment 20001761 PARAMETER Experiment Name: At_50mM_NH4NO3_L-to-H_P Parameter: Treatment Value: 50mM NH4NO3 vs 100mM Mannitol

SEQ ID NO: 48735 - protein, 98 aa, Arabidopsis thaliana; identical to SEQ ID NO: 45607
  peptide (1)..(98): Ceres Seq. ID no. 13591676

SEQ ID NO: 48736 - protein, 55 aa, Arabidopsis thaliana; identical to SEQ ID NO: 45608
  peptide (1)..(55): Ceres Seq. ID no. 13591677
  misc_feature (1)..(41): Homolog of NCBI NO: 34876464 NR Description: similar to putative transcription factor [Rattus
  misc_feature (1)..(39): Homolog of NCBI NO: 5531330 NR Description: putative transcription factor [Periplaneta
  misc_feature (1)..(41): Homolog of NCBI NO: 34876464 NR Description: similar to putative transcription factor [Rattus
  misc_feature (1)..(39): Homolog of NCBI NO: 5531330 NR Description: putative transcription factor [Periplaneta
  misc_feature (1)..(41): Homolog of NCBI NO: 34876464 NR Description: similar to putative transcription factor [Rattus
  misc_feature (1)..(39): Homolog of NCBI NO: 5531330 NR Description: putative transcription factor [Periplaneta
  misc_feature (1)..(41): Homolog of NCBI NO: 34876464 NR Description: similar to putative transcription factor [Rattus
  misc_feature (1)..(39): Homolog of NCBI NO: 5531330 NR Description: putative transcription factor [Periplaneta
  misc_feature (1)..(41): Homolog of NCBI NO: 34876464 NR Description: similar to putative transcription factor [Rattus
  misc_feature (1)..(39): Homolog of NCBI NO: 5531330 NR Description: putative transcription factor [Periplaneta

SEQ ID NO: 48737 - DNA, 2232 bp, Arabidopsis thaliana
  misc_feature (1)..(2232): Ceres Seq. ID no. 13646807
  misc_feature: MA Experiment ID: 20000173 Result: Up-regulated in Transcription
  misc_feature: MA Experiment 20000173 PARAMETER Experiment Name: At_42deg_Heat_P Parameter: Age (day) Value: 14
  misc_feature: MA Experiment 20000173 PARAMETER Experiment Name: At_42deg_Heat_P Parameter: Organism Value: A. thaliana
  misc_feature: MA Experiment 20000173 PARAMETER Experiment Name: At_42deg_Heat_P Parameter: Plant Line Value: WS
  misc_feature: MA Experiment 20000173 PARAMETER Experiment Name: At_42deg_Heat_P Parameter: Temperature (deg C) Value: 42 vs. 22
  misc_feature: MA Experiment 20000173 PARAMETER Experiment Name: At_42deg_Heat_P Parameter: Timepoint (hr) Value: 6
  misc_feature: MA Experiment 20000173 PARAMETER Experiment Name: At_42deg_Heat_P Parameter: Tissue Value: Aerial
  misc_feature: MA Experiment ID: 20000180 Result: Up-regulated in Transcription
  misc_feature: MA Experiment 20000180 PARAMETER Experiment Name: At_Germinating_Seeds_P Parameter: Age (hr) Value: 24 vs. 0
  misc_feature: MA Experiment 20000180 PARAMETER Experiment Name: At_Germinating_Seeds_P Parameter: Tissue Value: Germinating Seeds
  misc_feature: MA Experiment ID: 20000436 Result: Up-regulated in Transcription
  misc_feature: MA Experiment 20000436 PARAMETER Experiment Name: At_Drought_P Parameter: Age (day) Value: 7
  misc_feature: MA Experiment 20000436 PARAMETER Experiment Name: At_Drought_P Parameter: Organism Value: A. thaliana
  misc_feature: MA Experiment 20000436 PARAMETER Experiment Name: At_Drought_P Parameter: Plant Line Value: WS
  misc_feature: MA Experiment 20000436 PARAMETER Experiment Name: At_Drought_P Parameter: Timepoint (hr) Value: 12
  misc_feature: MA Experiment 20000436 PARAMETER Experiment Name: At_Drought_P Parameter: Tissue Value: Whole Plant
  misc_feature: MA Experiment 20000436 PARAMETER Experiment Name: At_Drought_P Parameter: Treatment Value: Drought vs. No Drought
  misc_feature: MA Experiment ID: 20000438 Result: Up-regulated in Transcription
  misc_feature: MA Experiment 20000438 PARAMETER Experiment Name: At_Shoots__P Parameter: Age (day) Value: 14
  misc_feature: MA Experiment 20000438 PARAMETER Experiment Name: At_Shoots__P Parameter: Tissue Value: Shoots vs. Whole Plant
  misc_feature: MA Experiment ID: 20000495 Result: Down-regulated in Transcription
  misc_feature: MA Experiment 20000495 PARAMETER Experiment Name: At_Guard_Cells_P Parameter: Harvest Date Value: 8/2/2002
  misc_feature: MA Experiment 20000495 PARAMETER Experiment Name: At_Guard_Cells_P Parameter: Organism Value: A. thaliana
  misc_feature: MA Experiment 20000495 PARAMETER Experiment Name: At_Guard_Cells_P Parameter: Tissue Value: Guard Cells vs. Leaves
  misc_feature: MA Experiment ID: 20000794 Result: Up-regulated in Transcription
  misc_feature: MA Experiment 20000794 PARAMETER Experiment Name: At_Petals_P Parameter: Age (day) Value: 23-25 days
  misc_feature: MA Experiment 20000794 PARAMETER Experiment Name: At_Petals_P Parameter: Plant Line Value: WS
  misc_feature: MA Experiment 20000794 PARAMETER Experiment Name: At_Petals_P Parameter: Tissue Value: Petals vs. Whole plant
  misc_feature: MA Experiment ID: 20001248 Result: Down-regulated in Transcription
  misc_feature: MA Experiment 20001248 PARAMETER Experiment Name: At_Far-red-induction_P Parameter: Age (day) Value: 7
  misc_feature: MA Experiment 20001248 PARAMETER Experiment Name: At_Far-red-induction_P Parameter: Light Value: Far-red vs. White
  misc_feature: MA Experiment 20001248 PARAMETER Experiment Name: At_Far-red-induction_P Parameter: Organism Value: A. thaliana
  misc_feature: MA Experiment 20001248 PARAMETER Experiment Name: At_Far-red-induction_P Parameter: Plant Line Value: Columbia
  misc_feature: MA Experiment 20001248 PARAMETER Experiment Name: At_Far-red-induction_P Parameter: Timepoint (hr) Value: 4
  misc_feature: MA Experiment 20001248 PARAMETER Experiment Name: At_Far-red-induction_P Parameter: Tissue Value: Whole Plant
  misc_feature: MA Experiment ID: 20001905 Result: Up-regulated in Transcription
  misc_feature: MA Experiment 20001905 PARAMETER Experiment Name: At_Drought_Reproduction_P Parameter: Age (day) Value: 40
  misc_feature: MA Experiment 20001905 PARAMETER Experiment Name: At_Drought_Reproduction_P Parameter: Organism Value: A. thaliana
  misc_feature: MA Experiment 20001905 PARAMETER Experiment Name: At_Drought_Reproduction_P Parameter: Plant Line Value: WS
  misc_feature: MA Experiment 20001905 PARAMETER Experiment Name: At_Drought_Reproduction_P Parameter: Timepoint (day) Value: 10
  misc_feature: MA Experiment 20001905 PARAMETER Experiment Name: At_Drought_Reproduction_P Parameter: Tissue Value: Rosettes
  misc_feature: MA Experiment 20001905 PARAMETER Experiment Name: At_Drought_Reproduction_P Parameter: Treatment Value: Drought vs. No Drought
  misc_feature: MA Experiment ID: 20001906 Result: Up-regulated in Transcription
  misc_feature: MA Experiment 20001906 PARAMETER Experiment Name: At_Drought_Reproduction_P Parameter: Age (day) Value: 35
  misc_feature: MA Experiment 20001906 PARAMETER Experiment Name: At_Drought_Reproduction_P Parameter: Organism Value: A. thaliana
  misc_feature: MA Experiment 20001906 PARAMETER Experiment Name: At_Drought_Reproduction_P Parameter: Plant Line Value: WS
  misc_feature: MA Experiment 20001906 PARAMETER Experiment Name: At_Drought_Reproduction_P Parameter: Timepoint (day) Value: 5
  misc_feature: MA Experiment 20001906 PARAMETER Experiment Name: At_Drought_Reproduction_P Parameter: Tissue Value: Siliques
  misc_feature: MA Experiment 20001906 PARAMETER Experiment Name: At_Drought_Reproduction_P Parameter: Treatment Value: Drought vs. No Drought
  misc_feature: MA Experiment ID: 20001911 Result: Up-regulated in Transcription
  misc_feature: MA Experiment 20001911 PARAMETER Experiment Name: At_Drought_Reproduction_P Parameter: Age (day) Value: 40
  misc_feature: MA Experiment 20001911 PARAMETER Experiment Name: At_Drought_Reproduction_P Parameter: Organism Value: A. thaliana
  misc_feature: MA Experiment 20001911 PARAMETER Experiment Name: At_Drought_Reproduction_P Parameter: Plant Line Value: WS
  misc_feature: MA Experiment 20001911 PARAMETER Experiment Name: At_Drought_Reproduction_P Parameter: Timepoint (day) Value: 10
  misc_feature: MA Experiment 20001911 PARAMETER Experiment Name: At_Drought_Reproduction_P Parameter: Tissue Value: Flowers
  misc_feature: MA Experiment 20001911 PARAMETER Experiment Name: At_Drought_Reproduction_P Parameter: Treatment Value: Drought vs. No Drought
agagagagagagagagctcactagtccccccccccccgtctttctcttcttctgccaaattccacagatggctgcttcatcggcttgtcttctcggaaatggattatctgtctacacaaccaaacagaggttccaaaagcttgggcttgataggacatctaaagttacagttgtgaaggcttctttggatgagaagaaacatgaagggagaagaggtttctttaaactcttactaggaaacgctgctgctggagttggtttgcttgcaagtggaaacgctaatgcagacgaacaaggacaaggggtttcttcgtctagaatgtcttattctaggttcctagagtatttagacaagggaagggttgagaaagtagatttgtatgagaatgggactatagctattgtggaggccgtttctcctgagttgggtaaccggattcagcgtgtacgtgtgcagctacctggattgagtcaggagcttctccagaagttgagggctaagaatattgatttcgcagcacataatgctcaggaggaccaaggttctccaatactcaacttgattgggaatcttgcattccctgttattttgattggcggtttgttccttctctcgagaagatcctctggtggaatgggtggccctggtggtcctggcttcccactccaaattggtcagtcgaaagcaaagtttcagatggaaccaaacactggtgtaacttttgatgatgttgctggagtcgatgaagccaagcaagatttcatggaagtggtggagtttctgaagaagcctgagaggttcactgcggttggtgcccggatcccaaaaggtgttcttcttgttggtcctcctggtaccgggaaaaccctgttggcaaaagccattgctggtgaagctggtgtgcccttcttttccatctcgggttctgagtttgttgagatgtttgtcggtgttggtgcatcaagggtccgcgatcttttcaaaaaagccaaagaaaatgctccatgcattgttttcgtggatgaaatagatgctgttggtaggcaaagaggaactggaattggtggaggtaatgatgaaagagaacagacccttaatcagctcctgactgagatggatggttttgagggtaacactggtgttatcgtagttgctgcaaccaacagagcagacattcttgactccgctttgctaagaccagggcgttttgaccggcaggtatctgttgacgttccagacgttaagggaagaacagatatactcaaggttcactcggggaataagaaatttgaaagcggtgtttcacttgaagtaatagccatgagaacacctggatttagcggagctgatcttgcaaacctcttgaacgaggctgccatattggccggccgccgtggaaagactgcaatatcatcaaaagagattgatgactcaattgacagaattgtagctggcatggaaggaacagtcatgacagatgggaagagcaaaagcttggttgcttaccatgaagttggccatgccatatgtggaacattgactccagggcatgatgctgttcaaaaggtcacgttgataccacgaggccaggctagaggtctgacttggttcattccctcagatgacccaactctaatctccaaacagcaactctttgcaagaattgttggtggactcggtggtagagctgccgaagaagtcatctttggtgagtctgaggtgactactggtgcagttagtgacttgcaacagatcaccggtttggctaagcagatggtgacaacatttgggatgtctgaaatcggaccatggtcgctaatggattcatcggagcaaagcgatgtcattatgaggatgatggcaagaaactcaatgtctgagaagcttgcaaatgatattgatacagcggtgaagacattatcagacaaagcgtacgagatagctttgagccagattagaaacaatcgtgaagccatggacaagattgttgaaatacttcttgagaaagagactatgtcaggcgatgaattccgagcaatcctatctgaattcacagaaatcccacctgaaaaccgtgttgcttcttcaacatccacatcaacaccaacaccagcgtctgtctgagtaagagacctttgaatctctgtgtatattatcttgagatacttccccatactgtgtaacagcacatcttaatttccctagttggagtatatatgtatacgaattcg

SEQ ID NO: 48738 - protein, 707 aa, Arabidopsis thaliana
  peptide (1)..(707): Ceres Seq. ID no. 13646808
  misc_feature (470)..(680): Pfam Name: Peptidase family M41 Pfam Description: Peptidase family M41
  misc_feature (87)..(680): Homolog of NCBI NO: 18422193 NR Description: FtsH protease, putative [Arabidopsis thaliana]
  misc_feature (105)..(680): Homolog of NCBI NO: 18402995 NR Description: chloroplast FtsH protease [Arabidopsis thaliana]
  misc_feature (106)..(686): Homolog of NCBI NO: 16329797 NR Description: cell division protein; FtsH [Synechocystis sp.
  misc_feature (94)..(692): Homolog of NCBI NO: 22298276 NR Description: cell division protein [Thermosynechococcus
  misc_feature (100)..(688): Homolog of NCBI NO: 11467752 NR Description: hypothetical chloroplast RF25 [Guillardia theta]
  misc_feature (99)..(691): Homolog of NCBI NO: 11465793 NR Description: ORF25 [Porphyra purpurea]
  misc_feature (22)..(688): Homolog of NCBI NO: 18417611 NR Description: FtsH protease, putative [Arabidopsis thaliana]
  misc_feature (207)..(707): Homolog of NCBI NO: 21954076 NR Description: putative FtsH protease [Arabidopsis thaliana]
  misc_feature (23)..(707): Homolog of NCBI NO: 3808101 NR Description: chloroplast protease [Capsicum annuum]
  misc_feature (23)..(707): Homolog of NCBI NO: 4325041 NR Description: FtsH-like protein Pftf precursor [Nicotiana
ERERELTSPPPPVFLFFCQIPQMAASSACLLGNGLSVYTTKQRFQKLGLDRTSKVTVVKASLDEKKHEGRRGFFKLLLGNAAAGVGLLASGNANADEQGQGVSSSRMSYSRFLEYLDKGRVEKVDLYENGTIAIVEAVSPELGNRIQRVRVQLPGLSQELLQKLRAKNIDFAAHNAQEDQGSPILNLIGNLAFPVILIGGLFLLSRRSSGGMGGPGGPGFPLQIGQSKAKFQMEPNTGVTFDDVAGVDEAKQDFMEVVEFLKKPERFTAVGARIPKGVLLVGPPGTGKTLLAKAIAGEAGVPFFSISGSEFVEMFVGVGASRVRDLFKKAKENAPCIVFVDEIDAVGRQRGTGIGGGNDEREQTLNQLLTEMDGFEGNTGVIVVAATNRADILDSALLRPGRFDRQVSVDVPDVKGRTDILKVHSGNKKFESGVSLEVIAMRTPGFSGADLANLLNEAAILAGRRGKTAISSKEIDDSIDRIVAGMEGTVMTDGKSKSLVAYHEVGHAICGTLTPGHDAVQKVTLIPRGQARGLTWFIPSDDPTLISKQQLFARIVGGLGGRAAEEVIFGESEVTTGAVSDLQQITGLAKQMVTTFGMSEIGPWSLMDSSEQSDVIMRMMARNSMSEKLANDIDTAVKTLSDKAYEIALSQIRNNREAMDKIVEILLEKETMSGDEFRAILSEFTEIPPENRVASSTSTSTPTPASV

SEQ ID NO: 48739 - protein, 685 aa, Arabidopsis thaliana; identical to SEQ ID NO: 45832
  peptide (1)..(685): Ceres Seq. ID no. 13646809
  misc_feature (448)..(658): Pfam Name: Peptidase family M41 Pfam Description: Peptidase family M41
  misc_feature (65)..(658): Homolog of NCBI NO: 18422193 NR Description: FtsH protease, putative [Arabidopsis thaliana]
  misc_feature (83)..(658): Homolog of NCBI NO: 18402995 NR Description: chloroplast FtsH protease [Arabidopsis thaliana]
  misc_feature (84)..(664): Homolog of NCBI NO: 16329797 NR Description: cell division protein; FtsH [Synechocystis sp.
  misc_feature (72)..(670): Homolog of NCBI NO: 22298276 NR Description: cell division protein [Thermosynechococcus
  misc_feature (78)..(666): Homolog of NCBI NO: 11467752 NR Description: hypothetical chloroplast RF25 [Guillardia theta]
  misc_feature (77)..(669): Homolog of NCBI NO: 11465793 NR Description: ORF25 [Porphyra purpurea]
  misc_feature (1)..(666): Homolog of NCBI NO: 18417611 NR Description: FtsH protease, putative [Arabidopsis thaliana]
  misc_feature (185)..(685): Homolog of NCBI NO: 21954076 NR Description: putative FtsH protease [Arabidopsis thaliana]
  misc_feature (1)..(685): Homolog of NCBI NO: 3808101 NR Description: chloroplast protease [Capsicum annuum]
  misc_feature (1)..(685): Homolog of NCBI NO: 4325041 NR Description: FtsH-like protein Pftf precursor [Nicotiana

SEQ ID NO: 48740 - protein, 601 aa, Arabidopsis thaliana; identical to SEQ ID NO: 45833
  peptide (1)..(601): Ceres Seq. ID no. 13646810
  misc_feature (364)..(574): Pfam Name: Peptidase family M41 Pfam Description: Peptidase family M41
  misc_feature (1)..(574): Homolog of NCBI NO: 18422193 NR Description: FtsH protease, putative [Arabidopsis thaliana]
  misc_feature (1)..(574): Homolog of NCBI NO: 18402995 NR Description: chloroplast FtsH protease [Arabidopsis thaliana]
  misc_feature (1)..(580): Homolog of NCBI NO: 16329797 NR Description: cell division protein; FtsH [Synechocystis sp.
  misc_feature (1)..(586): Homolog of NCBI NO: 22298276 NR Description: cell division protein [Thermosynechococcus
  misc_feature (1)..(582): Homolog of NCBI NO: 11467752 NR Description: hypothetical chloroplast RF25 [Guillardia theta]
  misc_feature (1)..(585): Homolog of NCBI NO: 11465793 NR Description: ORF25 [Porphyra purpurea]
  misc_feature (1)..(582): Homolog of NCBI NO: 18417611 NR Description: FtsH protease, putative [Arabidopsis thaliana]
  misc_feature (101)..(601): Homolog of NCBI NO: 21954076 NR Description: putative FtsH protease [Arabidopsis thaliana]
  misc_feature (1)..(601): Homolog of NCBI NO: 3808101 NR Description: chloroplast protease [Capsicum annuum]
  misc_feature (1)..(601): Homolog of NCBI NO: 4325041 NR Description: FtsH-like protein Pftf precursor [Nicotiana

SEQ ID NO: 48741 - DNA, 2687 bp, Arabidopsis thaliana
  misc_feature (1)..(2687): Ceres Seq. ID no. 14310214
  misc_feature: MA Experiment ID: 20000184 Result: Down-regulated in Transcription
  misc_feature: MA Experiment 20000184 PARAMETER Experiment Name: At_Shoots__P Parameter: Age (day) Value: 7
  misc_feature: MA Experiment 20000184 PARAMETER Experiment Name: At_Shoots__P Parameter: Tissue Value: Shoots vs. Whole Plant
agcttctctgattcgtctttctcctctgtctctgactcttcgcgaaaaccctaattagctttgtggtcttgttgttttcgccatggaagacgacggcaagagcagccccaagttaccgatccctggaaagagaaatatactaatcaccagtgctttgccttacgtcaacaacgttcctcatctcggaaacatcatcggatgtgttttgagcgctgatgtgtatgctagatactgtcgtctccgtggctataatgcgatttacatatgtggaaccgatgaatatgggactgcaactgagaccaaagctttggaggagaattgcacccacaaggaaatctgtgacaagtaccatgccattcataaagaagtttatgactggtttggtataagttttgacaagtttgggcgaacttcaactccagaacagactgaggtgtgccaagcaattttcaacaagttgtgggaaaacaagtggctttcagagaacaccatgcagcagctttactgcgatacatgcaagaagttcttagcggaccggcttgttgagggttcttgtccgttcgaaggatgtaattatgattctgctcgtggagatcagtgcgaaaaatgtggaaagctcctgaatcctactgaacttaaagatccgaagtgcaaggtctgtcaaaacacaccccgaattcgcgacacagaccacctgtttattgagcttccgttactgaaagataggttggaagcgtatattaaaaagacctctgttactggatcttggagtcaaaatgctattcaaacgacaaatgcatggcttagggatgggcttagacagagatgcattacgagggatcttaagtggggagtgcctgtcccacatgagaaatacaaggacaaagtcttctatgtttggtttgatgctcctattggatacgtctcaataacgtcttgctatacatctgaatgggagaagtggtggaagaatcctgagaatgtggagctttatcagtttatggggaaagacaatgtgccatttcacactgtgatgtttccctctacccagcttggaactgaggaaaattggacactcatgaagacaatcagtgtgactgaatatttaaactatgaagacggaaagttctccaagagtaaaggtgttggagtgtttggtaatgatgtaaaagatacaaatatacctgtcgaagtgtggagatactacttgctgaccaacaggcctgaggtgtctgacacatcgttttcatggactgatttgcaagcaaaactgaatggcgagttgctgagcaacctaggcaactttgttaatcgagttctgagttttatagcaaagcctgataatgcaggttacgggtctgtcattcctgatgctcatgatgctgaatctcattctttaacaaaatcactggcggaaaaggttgaaaagtttgtggcagagtatgttgaagccatggaaaaggttaagctcaagcagggactgaaaactgctatgctgatttcaagcgaagggaactattacttgcaggcaagccaattttggaaactttacaaggaagataaacctttgtgtgcagttgttataagaactgctgctggtttagtacaccttcttgctcaattgttagaccctttcatgccatccttttcttctgaggtatttaaacagttaaatttgcctccacaattttctctctccgacgagaggggagaggtattactagcaagtagaccatgggatattctgcctcctagccacaggataggcacccctcaacctttgttcaaggagttggaaaacgacgaagtggcacggtacagagaaaagtttgctggaagtcagtgtgatagacgtgctagggatgaagcagcaaatttggcggatcaacttaataaaacaaaactttcagatgccaagaaacaaaaggcatcatcaaaaggcggaggaaaacccaaacctcaaccagctgctgatcgtgaaataactatggcaagacttgatatccgagttggtaaaattgtgaaggctgagaaacatcccaaggcagatgcattgtatgtagaagaaattgatgttgggggtggtgaaattcgcactgttgtcagtggactggtcaaatatatacctcttgaggaaatgcagaatcgtatggtttgtgttctttgcaacttgaaaccggcgaaaatgagggatattgtgtcacaagcaatggttcttgcagcttccagtagtgatggaagcaaggtggagttagttgagccccctaaaactgctaatattggagagcgagttacatttcccgggtttgaaggcgagccagacgatgtcttaaacccaaagaagaaagtatgggagacgcttttggttgatctaaacacaaaagagaatctagttgcttgctacaaagatgtgcccttcactacatctgcaggtgtatgcaaagtttcatccatcagcaatggcacgatccggtaaaagcttacttgagccataagcaaactaatattctccatttctatctttctctgtaagagaaacgaaattcggagattttcatttgaaaatttgattctaattacaaacatgttcttgtaaacttaaagcttggtacaattgtggttattgattgatgttgtgagaaacattcagcttttttaaattgggcccagacgcaaagcaaccacac

SEQ ID NO: 48742 - protein, 797 aa, Arabidopsis thaliana
  peptide (1)..(797): Ceres Seq. ID no. 14310215
  misc_feature (9)..(389): Pfam Name: tRNA synthetases class I (I, L, M and V) Pfam Description: tRNA synthetases class I (I, L, M and V)
  misc_feature (11)..(737): Homolog of NCBI NO: 24655311 NR Description: CG15100-PA [Drosophila melanogaster]
  misc_feature (11)..(586): Homolog of NCBI NO: 19112378 NR Description: putative methionyl-tRNA synthetase, mitochondrial
  misc_feature (11)..(586): Homolog of NCBI NO: 2257528 NR Description: methionyl-tRNA synthetase [Schizosaccharomyces
  misc_feature (1)..(587): Homolog of NCBI NO: 34785759 NR Description: Unknown (protein for MGC:66122) [Danio rerio]
  misc_feature (6)..(655): Homolog of NCBI NO: 2135628 NR Description: methionine-tRNA ligase (EC 6.1.1.10) - human
  misc_feature (6)..(655): Homolog of NCBI NO: 15929104 NR Description: methionine-tRNA synthetase [Homo sapiens]
  misc_feature (6)..(655): Homolog of NCBI NO: 14043022 NR Description: methionine-tRNA synthetase
  misc_feature (609)..(778): Homolog of NCBI NO: 17540794 NR Description: methionyl tRNA Synthetase (101.7 kD) (mrs-1)
  misc_feature (6)..(619): Homolog of NCBI NO: 17540794 NR Description: methionyl tRNA Synthetase (101.7 kD) (mrs-1)
  misc_feature (11)..(608): Homolog of NCBI NO: 37534108 NR Description: putative methionyl-tRNA synthetase
MEDDGKSSPKLPIPGKRNILITSALPYVNNVPHLGNIIGCVLSADVYARYCRLRGYNAIYICGTDEYGTATETKALEENCTHKEICDKYHAIHKEVYDWFGISFDKFGRTSTPEQTEVCQAIFNKLWENKWLSENTMQQLYCDTCKKFLADRLVEGSCPFEGCNYDSARGDQCEKCGKLLNPTELKDPKCKVCQNTPRIRDTDHLFIELPLLKDRLEAYIKKTSVTGSWSQNAIQTTNAWLRDGLRQRCITRDLKWGVPVPHEKYKDKVFYVWFDAPIGYVSITSCYTSEWEKWWKNPENVELYQFMGKDNVPFHTVMFPSTQLGTEENWTLMKTISVTEYLNYEDGKFSKSKGVGVFGNDVKDTNIPVEVWRYYLLTNRPEVSDTSFSWTDLQAKLNGELLSNLGNFVNRVLSFIAKPDNAGYGSVIPDAHDAESHSLTKSLAEKVEKFVAEYVEAMEKVKLKQGLKTAMLISSEGNYYLQASQFWKLYKEDKPLCAVVIRTAAGLVHLLAQLLDPFMPSFSSEVFKQLNLPPQFSLSDERGEVLLASRPWDILPPSHRIGTPQPLFKELENDEVARYREKFAGSQCDRRARDEAANLADQLNKTKLSDAKKQKASSKGGGKPKPQPAADREITMARLDIRVGKIVKAEKHPKADALYVEEIDVGGGEIRTVVSGLVKYIPLEEMQNRMVCVLCNLKPAKMRDIVSQAMVLAASSSDGSKVELVEPPKTANIGERVTFPGFEGEPDDVLNPKKKVWETLLVDLNTKENLVACYKDVPFTTSAGVCKVSSISNGTIR

SEQ ID NO: 48743 - protein, 661 aa, Arabidopsis thaliana
  peptide (1)..(661): Ceres Seq. ID no. 14310216
  misc_feature (1)..(253): Pfam Name: tRNA synthetases class I (I, L, M and V) Pfam Description: tRNA synthetases class I (I, L, M and V)
  misc_feature (1)..(601): Homolog of NCBI NO: 24655311 NR Description: CG15100-PA [Drosophila melanogaster]
  misc_feature (1)..(450): Homolog of NCBI NO: 19112378 NR Description: putative methionyl-tRNA synthetase, mitochondrial
  misc_feature (1)..(450): Homolog of NCBI NO: 2257528 NR Description: methionyl-tRNA synthetase [Schizosaccharomyces
  misc_feature (1)..(451): Homolog of NCBI NO: 34785759 NR Description: Unknown (protein for MGC:66122) [Danio rerio]
  misc_feature (1)..(519): Homolog of NCBI NO: 2135628 NR Description: methionine-tRNA ligase (EC 6.1.1.10) - human
  misc_feature (1)..(519): Homolog of NCBI NO: 15929104 NR Description: methionine-tRNA synthetase [Homo sapiens]
  misc_feature (1)..(519): Homolog of NCBI NO: 14043022 NR Description: methionine-tRNA synthetase
  misc_feature (473)..(642): Homolog of NCBI NO: 17540794 NR Description: methionyl tRNA Synthetase (101.7 kD) (mrs-1)
  misc_feature (1)..(483): Homolog of NCBI NO: 17540794 NR Description: methionyl tRNA Synthetase (101.7 kD) (mrs-1)
  misc_feature (1)..(472): Homolog of NCBI NO: 37534108 NR Description: putative methionyl-tRNA synthetase
MQQLYCDTCKKFLADRLVEGSCPFEGCNYDSARGDQCEKCGKLLNPTELKDPKCKVCQNTPRIRDTDHLFIELPLLKDRLEAYIKKTSVTGSWSQNAIQTTNAWLRDGLRQRCITRDLKWGVPVPHEKYKDKVFYVWFDAPIGYVSITSCYTSEWEKWWKNPENVELYQFMGKDNVPFHTVMFPSTQLGTEENWTLMKTISVTEYLNYEDGKFSKSKGVGVFGNDVKDTNIPVEVWRYYLLTNRPEVSDTSFSWTDLQAKLNGELLSNLGNFVNRVLSFIAKPDNAGYGSVIPDAHDAESHSLTKSLAEKVEKFVAEYVEAMEKVKLKQGLKTAMLISSEGNYYLQASQFWKLYKEDKPLCAVVIRTAAGLVHLLAQLLDPFMPSFSSEVFKQLNLPPQFSLSDERGEVLLASRPWDILPPSHRIGTPQPLFKELENDEVARYREKFAGSQCDRRARDEAANLADQLNKTKLSDAKKQKASSKGGGKPKPQPAADREITMARLDIRVGKIVKAEKHPKADALYVEEIDVGGGEIRTVVSGLVKYIPLEEMQNRMVCVLCNLKPAKMRDIVSQAMVLAASSSDGSKVELVEPPKTANIGERVTFPGFEGEPDDVLNPKKKVWETLLVDLNTKENLVACYKDVPFTTSAGVCKVSSISNGTIR

SEQ ID NO: 48744 - protein, 491 aa, Arabidopsis thaliana
  peptide (1)..(491): Ceres Seq. ID no. 14310217
  misc_feature (1)..(83): Pfam Name: tRNA synthetases class I (I, L, M and V) Pfam Description: tRNA synthetases class I (I, L, M and V)
  misc_feature (1)..(431): Homolog of NCBI NO: 24655311 NR Description: CG15100-PA [Drosophila melanogaster]
  misc_feature (1)..(280): Homolog of NCBI NO: 19112378 NR Description: putative methionyl-tRNA synthetase, mitochondrial
  misc_feature (1)..(280): Homolog of NCBI NO: 2257528 NR Description: methionyl-tRNA synthetase [Schizosaccharomyces
  misc_feature (1)..(281): Homolog of NCBI NO: 34785759 NR Description: Unknown (protein for MGC:66122) [Danio rerio]
  misc_feature (1)..(349): Homolog of NCBI NO: 2135628 NR Description: methionine-tRNA ligase (EC 6.1.1.10) - human
  misc_feature (1)..(349): Homolog of NCBI NO: 15929104 NR Description: methionine-tRNA synthetase [Homo sapiens]
  misc_feature (1)..(349): Homolog of NCBI NO: 14043022 NR Description: methionine-tRNA synthetase
  misc_feature (303)..(472): Homolog of NCBI NO: 17540794 NR Description: methionyl tRNA Synthetase (101.7 kD) (mrs-1)
  misc_feature (1)..(313): Homolog of NCBI NO: 17540794 NR Description: methionyl tRNA Synthetase (101.7 kD) (mrs-1)
  misc_feature (1)..(302): Homolog of NCBI NO: 37534108 NR Description: putative methionyl-tRNA synthetase
MGKDNVPFHTVMFPSTQLGTEENWTLMKTISVTEYLNYEDGKFSKSKGVGVFGNDVKDTNIPVEVWRYYLLTNRPEVSDTSFSWTDLQAKLNGELLSNLGNFVNRVLSFIAKPDNAGYGSVIPDAHDAESHSLTKSLAEKVEKFVAEYVEAMEKVKLKQGLKTAMLISSEGNYYLQASQFWKLYKEDKPLCAVVIRTAAGLVHLLAQLLDPFMPSFSSEVFKQLNLPPQFSLSDERGEVLLASRPWDILPPSHRIGTPQPLFKELENDEVARYREKFAGSQCDRRARDEAANLADQLNKTKLSDAKKQKASSKGGGKPKPQPAADREITMARLDIRVGKIVKAEKHPKADALYVEEIDVGGGEIRTVVSGLVKYIPLEEMQNRMVCVLCNLKPAKMRDIVSQAMVLAASSSDGSKVELVEPPKTANIGERVTFPGFEGEPDDVLNPKKKVWETLLVDLNTKENLVACYKDVPFTTSAGVCKVSSISNGTIR

SEQ ID NO: 48745 - DNA, 1515 bp, Arabidopsis thaliana
  misc_feature (1)..(1515): Ceres Seq. ID no. 13578963
  misc_feature: MA Experiment ID: 20001451 Result: Down-regulated in Transcription
  misc_feature: MA Experiment 20001451 PARAMETER Experiment Name: At_Far-red-induction_P Parameter: Age (day) Value: 7
  misc_feature: MA Experiment 20001451 PARAMETER Experiment Name: At_Far-red-induction_P Parameter: Light Value: Far-red vs. White
  misc_feature: MA Experiment 20001451 PARAMETER Experiment Name: At_Far-red-induction_P Parameter: Organism Value: A. thaliana
  misc_feature: MA Experiment 20001451 PARAMETER Experiment Name: At_Far-red-induction_P Parameter: Plant Line Value: Columbia
  misc_feature: MA Experiment 20001451 PARAMETER Experiment Name: At_Far-red-induction_P Parameter: Timepoint (hr) Value: 24
  misc_feature: MA Experiment 20001451 PARAMETER Experiment Name: At_Far-red-induction_P Parameter: Tissue Value: Whole Plant
gaaaacaggaaaatggaagacctctggttcatcttcttctccttcctcacagctactttaatcttcttcatcaccaagaagttcctgtggagtctaaattctaaattacctccaagccctacgcctctccctatcatcggccatcttcacctcatcaagaagtatcctttaccacaagctctacgtcatctctcttcaaactacggcccggttctgttcctcaaatttggatgccgtaacgttttgactctctcttctccagattccatcgaagaatgcttcaccaatcacgacgtaaccctcgcgaatcgtcccaagaccatcacctccgatcacttcagctacggctataaaaactttggatttgctccttacggtgacctctggcgaactctccgtcgtctctccactctcgaggtcttctcctccgctagcctgcagaagaactcttccatccgaaacgaggaagtctccaacctctgtttgattatcttcagattatcccgtgactctcggatagtggatctcaagtatcaattcactcttctcacggctcatatcatgcttagattagtatctgggaagcgtggggtcaaaaagagcgatcccgaatcagagaagaggttcttggatgattttaaattgaggtttttctcgagcatgtcgatgaatgtctgcgactattttccagtgttgaggtggattgggtacaaaggtttggagaagagagtgattgatatgcagagaatgagagatgagtatcttcagcgactcattgatgatattcgaatgaagaacattgattcctctggttccgtagtagagaaattcttgaagcttcaagaatcagaacctgaattttacgcagatgatgttatcaaaggaatcatagtgctaatgttcaatggcggaacggatacatcacctgtggcaatggaatgggcagtgtcacttttactaaaccatccagataagcttgagaagctcagagaagaaatcaaatctaatgttaaacacaaagggcttatacaagactcggatctctcgagcttaccttatcttcgatgtgtcatctatgagacgcttaggctataccctgcagctccactcttgcttcctcactgctcatccaagagattcaacttaggcaactacgagattccagaaaacataatgttattggtgaatgcttgggctgttcatagggacggtgagctttgggaagaagccaatgttttcaagccggagagatttgaagggtttgttggcgatagagatggttttaggtttctgccatttggagttgggaggcgggcgtgtcctgcagctggacttggaatgagggtagtgtcgcttgctgttggagcattggttcagtgttttgagtgggagaaggtagaagcaggagatatagacatgaggcccgtgtttggtgtggcaatggctaaggctgagccgcttgtcgcattgccgaagccatggtctgaaatggttcctatcttgtctcagctctag

SEQ ID NO: 48746 - protein, 504 aa, Arabidopsis thaliana
  peptide (1)..(504): Ceres Seq. ID no. 13578964
  misc_feature (37)..(490): Pfam Name: Cytochrome P450 Pfam Description: Cytochrome P450
  misc_feature (16)..(488): Homolog of NCBI NO: 30690935 NR Description: cytochrome P450, putative [Arabidopsis thaliana]
  misc_feature (10)..(492): Homolog of NCBI NO: 15228472 NR Description: cytochrome P450 family [Arabidopsis thaliana]
  misc_feature (5)..(492): Homolog of NCBI NO: 15235517 NR Description: cytochrome P450 family [Arabidopsis thaliana]
  misc_feature (5)..(503): Homolog of NCBI NO: 15235534 NR Description: cytochrome P450 family [Arabidopsis thaliana]
  misc_feature (5)..(490): Homolog of NCBI NO: 15235535 NR Description: cytochrome P450 family [Arabidopsis thaliana]
  misc_feature (16)..(504): Homolog of NCBI NO: 7430635 NR Description: cytochrome P450 (EC 1.14.-.-) 81B1c - Jerusalem
  misc_feature (11)..(504): Homolog of NCBI NO: 3059131 NR Description: cytochrome P450 [Helianthus tuberosus]
  misc_feature (5)..(497): Homolog of NCBI NO: 11249389 NR Description: cytochrome P450-like protein - Arabidopsis
  misc_feature (3)..(504): Homolog of NCBI NO: 30683235 NR Description: cytochrome P450 family [Arabidopsis thaliana]
  misc_feature (5)..(504): Homolog of NCBI NO: 15238203 NR Description: cytochrome P450 family [Arabidopsis thaliana]
ENRKMEDLWFIFFSFLTATLIFFITKKFLWSLNSKLPPSPTPLPIIGHLHLIKKYPLPQALRHLSSNYGPVLFLKFGCRNVLTLSSPDSIEECFTNHDVTLANRPKTITSDHFSYGYKNFGFAPYGDLWRTLRRLSTLEVFSSASLQKNSSIRNEEVSNLCLIIFRLSRDSRIVDLKYQFTLLTAHIMLRLVSGKRGVKKSDPESEKRFLDDFKLRFFSSMSMNVCDYFPVLRWIGYKGLEKRVIDMQRMRDEYLQRLIDDIRMKNIDSSGSVVEKFLKLQESEPEFYADDVIKGIIVLMFNGGTDTSPVAMEWAVSLLLNHPDKLEKLREEIKSNVKHKGLIQDSDLSSLPYLRCVIYETLRLYPAAPLLLPHCSSKRFNLGNYEIPENIMLLVNAWAVHRDGELWEEANVFKPERFEGFVGDRDGFRFLPFGVGRRACPAAGLGMRVVSLAVGALVQCFEWEKVEAGDIDMRPVFGVAMAKAEPLVALPKPWSEMVPILSQL

SEQ ID NO: 48747 - protein, 500 aa, Arabidopsis thaliana
  peptide (1)..(500): Ceres Seq. ID no. 13578965
  misc_feature (33)..(486): Pfam Name: Cytochrome P450 Pfam Description: Cytochrome P450
  misc_feature (12)..(484): Homolog of NCBI NO: 30690935 NR Description: cytochrome P450, putative [Arabidopsis thaliana]
  misc_feature (6)..(488): Homolog of NCBI NO: 15228472 NR Description: cytochrome P450 family [Arabidopsis thaliana]
  misc_feature (1)..(488): Homolog of NCBI NO: 15235517 NR Description: cytochrome P450 family [Arabidopsis thaliana]
  misc_feature (1)..(499): Homolog of NCBI NO: 15235534 NR Description: cytochrome P450 family [Arabidopsis thaliana]
  misc_feature (1)..(486): Homolog of NCBI NO: 15235535 NR Description: cytochrome P450 family [Arabidopsis thaliana]
  misc_feature (12)..(500): Homolog of NCBI NO: 7430635 NR Description: cytochrome P450 (EC 1.14.-.-) 81B1c - Jerusalem
  misc_feature (7)..(500): Homolog of NCBI NO: 3059131 NR Description: cytochrome P450 [Helianthus tuberosus]
  misc_feature (1)..(493): Homolog of NCBI NO: 11249389 NR Description: cytochrome P450-like protein - Arabidopsis
  misc_feature (1)..(500): Homolog of NCBI NO: 30683235 NR Description: cytochrome P450 family [Arabidopsis thaliana]
  misc_feature (1)..(500): Homolog of NCBI NO: 15238203 NR Description: cytochrome P450 family [Arabidopsis thaliana]
MEDLWFIFFSFLTATLIFFITKKFLWSLNSKLPPSPTPLPIIGHLHLIKKYPLPQALRHLSSNYGPVLFLKFGCRNVLTLSSPDSIEECFTNHDVTLANRPKTITSDHFSYGYKNFGFAPYGDLWRTLRRLSTLEVFSSASLQKNSSIRNEEVSNLCLIIFRLSRDSRIVDLKYQFTLLTAHIMLRLVSGKRGVKKSDPESEKRFLDDFKLRFFSSMSMNVCDYFPVLRWIGYKGLEKRVIDMQRMRDEYLQRLIDDIRMKNIDSSGSVVEKFLKLQESEPEFYADDVIKGIIVLMFNGGTDTSPVAMEWAVSLLLNHPDKLEKLREEIKSNVKHKGLIQDSDLSSLPYLRCVIYETLRLYPAAPLLLPHCSSKRFNLGNYEIPENIMLLVNAWAVHRDGELWEEANVFKPERFEGFVGDRDGFRFLPFGVGRRACPAAGLGMRVVSLAVGALVQCFEWEKVEAGDIDMRPVFGVAMAKAEPLVALPKPWSEMVPILSQL

SEQ ID NO: 48748 - protein, 317 aa, Arabidopsis thaliana
  peptide (1)..(317): Ceres Seq. ID no. 13578966
  misc_feature (1)..(303): Pfam Name: Cytochrome P450 Pfam Description: Cytochrome P450
  misc_feature (1)..(301): Homolog of NCBI NO: 30690935 NR Description: cytochrome P450, putative [Arabidopsis thaliana]
  misc_feature (1)..(305): Homolog of NCBI NO: 15228472 NR Description: cytochrome P450 family [Arabidopsis thaliana]
  misc_feature (1)..(305): Homolog of NCBI NO: 15235517 NR Description: cytochrome P450 family [Arabidopsis thaliana]
  misc_feature (1)..(316): Homolog of NCBI NO: 15235534 NR Description: cytochrome P450 family [Arabidopsis thaliana]
  misc_feature (1)..(303): Homolog of NCBI NO: 15235535 NR Description: cytochrome P450 family [Arabidopsis thaliana]
  misc_feature (1)..(317): Homolog of NCBI NO: 7430635 NR Description: cytochrome P450 (EC 1.14.-.-) 81B1c - Jerusalem
  misc_feature (1)..(317): Homolog of NCBI NO: 3059131 NR Description: cytochrome P450 [Helianthus tuberosus]
  misc_feature (1)..(310): Homolog of NCBI NO: 11249389 NR Description: cytochrome P450-like protein - Arabidopsis
  misc_feature (1)..(317): Homolog of NCBI NO: 30683235 NR Description: cytochrome P450 family [Arabidopsis thaliana]
  misc_feature (1)..(317): Homolog of NCBI NO: 15238203 NR Description: cytochrome P450 family [Arabidopsis thaliana]
MLRLVSGKRGVKKSDPESEKRFLDDFKLRFFSSMSMNVCDYFPVLRWIGYKGLEKRVIDMQRMRDEYLQRLIDDIRMKNIDSSGSVVEKFLKLQESEPEFYADDVIKGIIVLMFNGGTDTSPVAMEWAVSLLLNHPDKLEKLREEIKSNVKHKGLIQDSDLSSLPYLRCVIYETLRLYPAAPLLLPHCSSKRFNLGNYEIPENIMLLVNAWAVHRDGELWEEANVFKPERFEGFVGDRDGFRFLPFGVGRRACPAAGLGMRVVSLAVGALVQCFEWEKVEAGDIDMRPVFGVAMAKAEPLVALPKPWSEMVPILSQL

SEQ ID NO: 48749 - DNA, 2611 bp, Arabidopsis thaliana; identical to SEQ ID NO: 44956
  misc_feature (1)..(2611): Ceres Seq. ID no. 13591498
  misc_feature: MA Experiment ID: 20000179 Result: Down-regulated in Transcription
  misc_feature: MA Experiment 20000179 PARAMETER Experiment Name: At_Germinating_Seeds_P Parameter: Age (hr) Value: 6 vs. 0
  misc_feature: MA Experiment 20000179 PARAMETER Experiment Name: At_Germinating_Seeds_P Parameter: Tissue Value: Germinating Seeds
  misc_feature: MA Experiment ID: 20000180 Result: Down-regulated in Transcription
  misc_feature: MA Experiment 20000180 PARAMETER Experiment Name: At_Germinating_Seeds_P Parameter: Age (hr) Value: 24 vs. 0
  misc_feature: MA Experiment 20000180 PARAMETER Experiment Name: At_Germinating_Seeds_P Parameter: Tissue Value: Germinating Seeds
  misc_feature: MA Experiment ID: 20000184 Result: Up-regulated in Transcription
  misc_feature: MA Experiment 20000184 PARAMETER Experiment Name: At_Shoots__P Parameter: Age (day) Value: 7
  misc_feature: MA Experiment 20000184 PARAMETER Experiment Name: At_Shoots__P Parameter: Tissue Value: Shoots vs. Whole Plant
  misc_feature: MA Experiment ID: 20000234 Result: Up-regulated in Transcription
  misc_feature: MA Experiment 20000234 PARAMETER Experiment Name: At_Siliques_P Parameter: Age (day) Value: 21
  misc_feature: MA Experiment 20000234 PARAMETER Experiment Name: At_Siliques_P Parameter: Organism Value: A. thaliana
  misc_feature: MA Experiment 20000234 PARAMETER Experiment Name: At_Siliques_P Parameter: Plant Line Value: WS
  misc_feature: MA Experiment 20000234 PARAMETER Experiment Name: At_Siliques_P Parameter: Tissue Value: Less Than 5mm Siliques vs. Whole Plant
  misc_feature: MA Experiment ID: 20000235 Result: Up-regulated in Transcription
  misc_feature: MA Experiment 20000235 PARAMETER Experiment Name: At_Siliques_P Parameter: Age (day) Value: 21
  misc_feature: MA Experiment 20000235 PARAMETER Experiment Name: At_Siliques_P Parameter: Organism Value: A. thaliana
  misc_feature: MA Experiment 20000235 PARAMETER Experiment Name: At_Siliques_P Parameter: Plant Line Value: WS
  misc_feature: MA Experiment 20000235 PARAMETER Experiment Name: At_Siliques_P Parameter: Tissue Value: 5-10mm Siliques vs. Whole Plant
  misc_feature: MA Experiment ID: 20000794 Result: Up-regulated in Transcription
  misc_feature: MA Experiment 20000794 PARAMETER Experiment Name: At_Petals_P Parameter: Age (day) Value: 23-25 days
  misc_feature: MA Experiment 20000794 PARAMETER Experiment Name: At_Petals_P Parameter: Plant Line Value: WS
  misc_feature: MA Experiment 20000794 PARAMETER Experiment Name: At_Petals_P Parameter: Tissue Value: Petals vs. Whole plant
  misc_feature: MA Experiment ID: 20001757 Result: Down-regulated in Transcription
  misc_feature: MA Experiment 20001757 PARAMETER Experiment Name: At_50mM_NH4NO3_L-to-H_P Parameter: Timepoint (hr) Value: 6
  misc_feature: MA Experiment 20001757 PARAMETER Experiment Name: At_50mM_NH4NO3_L-to-H_P Parameter: Tissue Value: Leaf
  misc_feature: MA Experiment 20001757 PARAMETER Experiment Name: At_50mM_NH4NO3_L-to-H_P Parameter: Treatment Value: 50mM NH4NO3 vs 100mM Mannitol

SEQ ID NO: 48750 - protein, 798 aa, Arabidopsis thaliana; identical to SEQ ID NO: 44957
  peptide (1)..(798): Ceres Seq. ID no. 13591499
  misc_feature (403)..(502): Pfam Name: PA domain Pfam Description: PA domain
  misc_feature (403)..(502): Pfam Name: PA domain Pfam Description: PA domain
  misc_feature (403)..(502): Pfam Name: PA domain Pfam Description: PA domain
  misc_feature (403)..(502): Pfam Name: PA domain Pfam Description: PA domain
  misc_feature (403)..(502): Pfam Name: PA domain Pfam Description: PA domain
  misc_feature (106)..(796): Homolog of NCBI NO: 24414066 NR Description: OJ1136_A10.14 [Oryza sativa (japonica
  misc_feature (35)..(795): Homolog of NCBI NO: 30697281 NR Description: subtilisin-like serine protease [Arabidopsis
  misc_feature (46)..(797): Homolog of NCBI NO: 30678198 NR Description: subtilisin-like serine protease, putative
  misc_feature (243)..(798): Homolog of NCBI NO: 29786399 NR Description: putative serine protease [Populus euramericana]
  misc_feature (42)..(797): Homolog of NCBI NO: 7435656 NR Description: subtilisin-like proteinase (EC 3.4.21.-) 2 -
  misc_feature (106)..(796): Homolog of NCBI NO: 24414066 NR Description: OJ1136_A10.14 [Oryza sativa (japonica
  misc_feature (46)..(797): Homolog of NCBI NO: 30678198 NR Description: subtilisin-like serine protease, putative
  misc_feature (42)..(797): Homolog of NCBI NO: 7435656 NR Description: subtilisin-like proteinase (EC 3.4.21.-) 2 -
  misc_feature (243)..(798): Homolog of NCBI NO: 29786399 NR Description: putative serine protease [Populus euramericana]
  misc_feature (46)..(797): Homolog of NCBI NO: 30678198 NR Description: subtilisin-like serine protease, putative
  misc_feature (35)..(795): Homolog of NCBI NO: 30697281 NR Description: subtilisin-like serine protease [Arabidopsis
  misc_feature (106)..(796): Homolog of NCBI NO: 24414066 NR Description: OJ1136_A10.14 [Oryza sativa (japonica
  misc_feature (52)..(798): Homolog of NCBI NO: 7435657 NR Description: subtilisin-like proteinase (EC 3.4.21.-) 1 -
  misc_feature (69)..(798): Homolog of NCBI NO: 14488360 NR Description: putative serine protease [Oryza sativa (japonica
  misc_feature (42)..(797): Homolog of NCBI NO: 18396193 NR Description: subtilisin-like serine protease, putative
  misc_feature (42)..(797): Homolog of NCBI NO: 22331076 NR Description: subtilisin-like serine protease, putative
  misc_feature (68)..(797): Homolog of NCBI NO: 18423316 NR Description: subtilisin-like serine protease [Arabidopsis
  misc_feature (106)..(796): Homolog of NCBI NO: 24414066 NR Description: OJ1136_A10.14 [Oryza sativa (japonica
  misc_feature (52)..(798): Homolog of NCBI NO: 7435657 NR Description: subtilisin-like proteinase (EC 3.4.21.-) 1 -
  misc_feature (69)..(798): Homolog of NCBI NO: 14488360 NR Description: putative serine protease [Oryza sativa (japonica
  misc_feature (42)..(797): Homolog of NCBI NO: 18396193 NR Description: subtilisin-like serine protease, putative
  misc_feature (42)..(797): Homolog of NCBI NO: 22331076 NR Description: subtilisin-like serine protease, putative
  misc_feature (68)..(797): Homolog of NCBI NO: 18423316 NR Description: subtilisin-like serine protease [Arabidopsis
  misc_feature (42)..(797): Homolog of NCBI NO: 7435656 NR Description: subtilisin-like proteinase (EC 3.4.21.-) 2 -
  misc_feature (243)..(798): Homolog of NCBI NO: 29786399 NR Description: putative serine protease [Populus euramericana]
  misc_feature (46)..(797): Homolog of NCBI NO: 30678198 NR Description: subtilisin-like serine protease, putative
  misc_feature (52)..(798): Homolog of NCBI NO: 7435657 NR Description: subtilisin-like proteinase (EC 3.4.21.-) 1 -
  misc_feature (69)..(798): Homolog of NCBI NO: 14488360 NR Description: putative serine protease [Oryza sativa (japonica
  misc_feature (42)..(797): Homolog of NCBI NO: 18396193 NR Description: subtilisin-like serine protease, putative
  misc_feature (42)..(797): Homolog of NCBI NO: 22331076 NR Description: subtilisin-like serine protease, putative
  misc_feature (68)..(797): Homolog of NCBI NO: 18423316 NR Description: subtilisin-like serine protease [Arabidopsis
  misc_feature (42)..(797): Homolog of NCBI NO: 7435656 NR Description: subtilisin-like proteinase (EC 3.4.21.-) 2 -
  misc_feature (243)..(798): Homolog of NCBI NO: 29786399 NR Description: putative serine protease [Populus euramericana]
  misc_feature (46)..(797): Homolog of NCBI NO: 30678198 NR Description: subtilisin-like serine protease, putative
  misc_feature (35)..(795): Homolog of NCBI NO: 30697281 NR Description: subtilisin-like serine protease [Arabidopsis
  misc_feature (35)..(795): Homolog of NCBI NO: 30697281 NR Description: subtilisin-like serine protease [Arabidopsis
  misc_feature (106)..(796): Homolog of NCBI NO: 24414066 NR Description: OJ1136_A10.14 [Oryza sativa (japonica
  misc_feature (52)..(798): Homolog of NCBI NO: 7435657 NR Description: subtilisin-like proteinase (EC 3.4.21.-) 1 -
  misc_feature (69)..(798): Homolog of NCBI NO: 14488360 NR Description: putative serine protease [Oryza sativa (japonica
  misc_feature (42)..(797): Homolog of NCBI NO: 18396193 NR Description: subtilisin-like serine protease, putative
  misc_feature (42)..(797): Homolog of NCBI NO: 22331076 NR Description: subtilisin-like serine protease, putative
  misc_feature (68)..(797): Homolog of NCBI NO: 18423316 NR Description: subtilisin-like serine protease [Arabidopsis
  misc_feature (42)..(797): Homolog of NCBI NO: 7435656 NR Description: subtilisin-like proteinase (EC 3.4.21.-) 2 -
  misc_feature (243)..(798): Homolog of NCBI NO: 29786399 NR Description: putative serine protease [Populus euramericana]
  misc_feature (35)..(795): Homolog of NCBI NO: 30697281 NR Description: subtilisin-like serine protease [Arabidopsis
  misc_feature (68)..(797): Homolog of NCBI NO: 18423316 NR Description: subtilisin-like serine protease [Arabidopsis
  misc_feature (42)..(797): Homolog of NCBI NO: 22331076 NR Description: subtilisin-like serine protease, putative
  misc_feature (42)..(797): Homolog of NCBI NO: 18396193 NR Description: subtilisin-like serine protease, putative
  misc_feature (69)..(798): Homolog of NCBI NO: 14488360 NR Description: putative serine protease [Oryza sativa (japonica
  misc_feature (52)..(798): Homolog of NCBI NO: 7435657 NR Description: subtilisin-like proteinase (EC 3.4.21.-) 1 -

SEQ ID NO: 48751 - protein, 757 aa, Arabidopsis thaliana; identical to SEQ ID NO: 44958
  peptide (1)..(757): Ceres Seq. ID no. 13591500
  misc_feature (362)..(461): Pfam Name: PA domain Pfam Description: PA domain
  misc_feature (362)..(461): Pfam Name: PA domain Pfam Description: PA domain
  misc_feature (362)..(461): Pfam Name: PA domain Pfam Description: PA domain
  misc_feature (362)..(461): Pfam Name: PA domain Pfam Description: PA domain
  misc_feature (362)..(461): Pfam Name: PA domain Pfam Description: PA domain
  misc_feature (65)..(755): Homolog of NCBI NO: 24414066 NR Description: OJ1136_A10.14 [Oryza sativa (japonica
  misc_feature (1)..(754): Homolog of NCBI NO: 30697281 NR Description: subtilisin-like serine protease [Arabidopsis
  misc_feature (5)..(756): Homolog of NCBI NO: 30678198 NR Description: subtilisin-like serine protease, putative
  misc_feature (202)..(757): Homolog of NCBI NO: 29786399 NR Description: putative serine protease [Populus euramericana]
  misc_feature (1)..(756): Homolog of NCBI NO: 7435656 NR Description: subtilisin-like proteinase (EC 3.4.21.-) 2 -
  misc_feature (65)..(755): Homolog of NCBI NO: 24414066 NR Description: OJ1136_A10.14 [Oryza sativa (japonica
  misc_feature (5)..(756): Homolog of NCBI NO: 30678198 NR Description: subtilisin-like serine protease, putative
  misc_feature (1)..(756): Homolog of NCBI NO: 7435656 NR Description: subtilisin-like proteinase (EC 3.4.21.-) 2 -
  misc_feature (202)..(757): Homolog of NCBI NO: 29786399 NR Description: putative serine protease [Populus euramericana]
  misc_feature (5)..(756): Homolog of NCBI NO: 30678198 NR Description: subtilisin-like serine protease, putative
  misc_feature (1)..(754): Homolog of NCBI NO: 30697281 NR Description: subtilisin-like serine protease [Arabidopsis
  misc_feature (65)..(755): Homolog of NCBI NO: 24414066 NR Description: OJ1136_A10.14 [Oryza sativa (japonica
  misc_feature (11)..(757): Homolog of NCBI NO: 7435657 NR Description: subtilisin-like proteinase (EC 3.4.21.-) 1 -
  misc_feature (28)..(757): Homolog of NCBI NO: 14488360 NR Description: putative serine protease [Oryza sativa (japonica
  misc_feature (1)..(756): Homolog of NCBI NO: 18396193 NR Description: subtilisin-like serine protease, putative
  misc_feature (1)..(756): Homolog of NCBI NO: 22331076 NR Description: subtilisin-like serine protease, putative
  misc_feature (27)..(756): Homolog of NCBI NO: 18423316 NR Description: subtilisin-like serine protease [Arabidopsis
  misc_feature (65)..(755): Homolog of NCBI NO: 24414066 NR Description: OJ1136_A10.14 [Oryza sativa (japonica
  misc_feature (11)..(757): Homolog of NCBI NO: 7435657 NR Description: subtilisin-like proteinase (EC 3.4.21.-) 1 -
  misc_feature (28)..(757): Homolog of NCBI NO: 14488360 NR Description: putative serine protease [Oryza sativa (japonica
  misc_feature (1)..(756): Homolog of NCBI NO: 18396193 NR Description: subtilisin-like serine protease, putative
  misc_feature (1)..(756): Homolog of NCBI NO: 22331076 NR Description: subtilisin-like serine protease, putative
  misc_feature (27)..(756): Homolog of NCBI NO: 18423316 NR Description: subtilisin-like serine protease [Arabidopsis
  misc_feature (1)..(756): Homolog of NCBI NO: 7435656 NR Description: subtilisin-like proteinase (EC 3.4.21.-) 2 -
  misc_feature (202)..(757): Homolog of NCBI NO: 29786399 NR Description: putative serine protease [Populus euramericana]
  misc_feature (5)..(756): Homolog of NCBI NO: 30678198 NR Description: subtilisin-like serine protease, putative
  misc_feature (11)..(757): Homolog of NCBI NO: 7435657 NR Description: subtilisin-like proteinase (EC 3.4.21.-) 1 -
  misc_feature (28)..(757): Homolog of NCBI NO: 14488360 NR Description: putative serine protease [Oryza sativa (japonica
  misc_feature (1)..(756): Homolog of NCBI NO: 18396193 NR Description: subtilisin-like serine protease, putative
  misc_feature (1)..(756): Homolog of NCBI NO: 22331076 NR Description: subtilisin-like serine protease, putative
  misc_feature (27)..(756): Homolog of NCBI NO: 18423316 NR Description: subtilisin-like serine protease [Arabidopsis
  misc_feature (1)..(756): Homolog of NCBI NO: 7435656 NR Description: subtilisin-like proteinase (EC 3.4.21.-) 2 -
  misc_feature (202)..(757): Homolog of NCBI NO: 29786399 NR Description: putative serine protease [Populus euramericana]
  misc_feature (5)..(756): Homolog of NCBI NO: 30678198 NR Description: subtilisin-like serine protease, putative
  misc_feature (1)..(754): Homolog of NCBI NO: 30697281 NR Description: subtilisin-like serine protease [Arabidopsis
  misc_feature (1)..(754): Homolog of NCBI NO: 30697281 NR Description: subtilisin-like serine protease [Arabidopsis
  misc_feature (65)..(755): Homolog of NCBI NO: 24414066 NR Description: OJ1136_A10.14 [Oryza sativa (japonica
  misc_feature (11)..(757): Homolog of NCBI NO: 7435657 NR Description: subtilisin-like proteinase (EC 3.4.21.-) 1 -
  misc_feature (28)..(757): Homolog of NCBI NO: 14488360 NR Description: putative serine protease [Oryza sativa (japonica
  misc_feature (1)..(756): Homolog of NCBI NO: 18396193 NR Description: subtilisin-like serine protease, putative
  misc_feature (1)..(756): Homolog of NCBI NO: 22331076 NR Description: subtilisin-like serine protease, putative
  misc_feature (27)..(756): Homolog of NCBI NO: 18423316 NR Description: subtilisin-like serine protease [Arabidopsis
  misc_feature (1)..(756): Homolog of NCBI NO: 7435656 NR Description: subtilisin-like proteinase (EC 3.4.21.-) 2 -
  misc_feature (202)..(757): Homolog of NCBI NO: 29786399 NR Description: putative serine protease [Populus euramericana]
  misc_feature (1)..(754): Homolog of NCBI NO: 30697281 NR Description: subtilisin-like serine protease [Arabidopsis
  misc_feature (27)..(756): Homolog of NCBI NO: 18423316 NR Description: subtilisin-like serine protease [Arabidopsis
  misc_feature (1)..(756): Homolog of NCBI NO: 22331076 NR Description: subtilisin-like serine protease, putative
  misc_feature (1)..(756): Homolog of NCBI NO: 18396193 NR Description: subtilisin-like serine protease, putative
  misc_feature (28)..(757): Homolog of NCBI NO: 14488360 NR Description: putative serine protease [Oryza sativa (japonica
  misc_feature (11)..(757): Homolog of NCBI NO: 7435657 NR Description: subtilisin-like proteinase (EC 3.4.21.-) 1 -

SEQ ID NO: 48752 - protein, 722 aa, Arabidopsis thaliana; identical to SEQ ID NO: 44959
  peptide (1)..(722): Ceres Seq. ID no. 13591501
  misc_feature (327)..(426): Pfam Name: PA domain Pfam Description: PA domain
  misc_feature (327)..(426): Pfam Name: PA domain Pfam Description: PA domain
  misc_feature (327)..(426): Pfam Name: PA domain Pfam Description: PA domain
  misc_feature (327)..(426): Pfam Name: PA domain Pfam Description: PA domain
  misc_feature (327)..(426): Pfam Name: PA domain Pfam Description: PA domain
  misc_feature (30)..(720): Homolog of NCBI NO: 24414066 NR Description: OJ1136_A10.14 [Oryza sativa (japonica
  misc_feature (1)..(719): Homolog of NCBI NO: 30697281 NR Description: subtilisin-like serine protease [Arabidopsis
  misc_feature (1)..(721): Homolog of NCBI NO: 30678198 NR Description: subtilisin-like serine protease, putative
  misc_feature (167)..(722): Homolog of NCBI NO: 29786399 NR Description: putative serine protease [Populus euramericana]
  misc_feature (1)..(721): Homolog of NCBI NO: 7435656 NR Description: subtilisin-like proteinase (EC 3.4.21.-) 2 -
  misc_feature (30)..(720): Homolog of NCBI NO: 24414066 NR Description: OJ1136_A10.14 [Oryza sativa (japonica
  misc_feature (1)..(721): Homolog of NCBI NO: 30678198 NR Description: subtilisin-like serine protease, putative
  misc_feature (1)..(721): Homolog of NCBI NO: 7435656 NR Description: subtilisin-like proteinase (EC 3.4.21.-) 2 -
  misc_feature (167)..(722): Homolog of NCBI NO: 29786399 NR Description: putative serine protease [Populus euramericana]
  misc_feature (1)..(721): Homolog of NCBI NO: 30678198 NR Description: subtilisin-like serine protease, putative
  misc_feature (1)..(719): Homolog of NCBI NO: 30697281 NR Description: subtilisin-like serine protease [Arabidopsis
  misc_feature (30)..(720): Homolog of NCBI NO: 24414066 NR Description: OJ1136_A10.14 [Oryza sativa (japonica
  misc_feature (1)..(722): Homolog of NCBI NO: 7435657 NR Description: subtilisin-like proteinase (EC 3.4.21.-) 1 -
  misc_feature (1)..(722): Homolog of NCBI NO: 14488360 NR Description: putative serine protease [Oryza sativa (japonica
  misc_feature (1)..(721): Homolog of NCBI NO: 18396193 NR Description: subtilisin-like serine protease, putative
  misc_feature (1)..(721): Homolog of NCBI NO: 22331076 NR Description: subtilisin-like serine protease, putative
  misc_feature (1)..(721): Homolog of NCBI NO: 18423316 NR Description: subtilisin-like serine protease [Arabidopsis
  misc_feature (30)..(720): Homolog of NCBI NO: 24414066 NR Description: OJ1136_A10.14 [Oryza sativa (japonica
  misc_feature (1)..(722): Homolog of NCBI NO: 7435657 NR Description: subtilisin-like proteinase (EC 3.4.21.-) 1 -
  misc_feature (1)..(722): Homolog of NCBI NO: 14488360 NR Description: putative serine protease [Oryza sativa (japonica
  misc_feature (1)..(721): Homolog of NCBI NO: 18396193 NR Description: subtilisin-like serine protease, putative
  misc_feature (1)..(721): Homolog of NCBI NO: 22331076 NR Description: subtilisin-like serine protease, putative
  misc_feature (1)..(721): Homolog of NCBI NO: 18423316 NR Description: subtilisin-like serine protease [Arabidopsis
  misc_feature (1)..(721): Homolog of NCBI NO: 7435656 NR Description: subtilisin-like proteinase (EC 3.4.21.-) 2 -
  misc_feature (167)..(722): Homolog of NCBI NO: 29786399 NR Description: putative serine protease [Populus euramericana]
  misc_feature (1)..(721): Homolog of NCBI NO: 30678198 NR Description: subtilisin-like serine protease, putative
  misc_feature (1)..(722): Homolog of NCBI NO: 7435657 NR Description: subtilisin-like proteinase (EC 3.4.21.-) 1 -
  misc_feature (1)..(722): Homolog of NCBI NO: 14488360 NR Description: putative serine protease [Oryza sativa (japonica
  misc_feature (1)..(721): Homolog of NCBI NO: 18396193 NR Description: subtilisin-like serine protease, putative
  misc_feature (1)..(721): Homolog of NCBI NO: 22331076 NR Description: subtilisin-like serine protease, putative
  misc_feature (1)..(721): Homolog of NCBI NO: 18423316 NR Description: subtilisin-like serine protease [Arabidopsis
  misc_feature (1)..(721): Homolog of NCBI NO: 7435656 NR Description: subtilisin-like proteinase (EC 3.4.21.-) 2 -
  misc_feature (167)..(722): Homolog of NCBI NO: 29786399 NR Description: putative serine protease [Populus euramericana]
  misc_feature (1)..(721): Homolog of NCBI NO: 30678198 NR Description: subtilisin-like serine protease, putative
  misc_feature (1)..(719): Homolog of NCBI NO: 30697281 NR Description: subtilisin-like serine protease [Arabidopsis
  misc_feature (1)..(719): Homolog of NCBI NO: 30697281 NR Description: subtilisin-like serine protease [Arabidopsis
  misc_feature (30)..(720): Homolog of NCBI NO: 24414066 NR Description: OJ1136_A10.14 [Oryza sativa (japonica
  misc_feature (1)..(722): Homolog of NCBI NO: 7435657 NR Description: subtilisin-like proteinase (EC 3.4.21.-) 1 -
  misc_feature (1)..(722): Homolog of NCBI NO: 14488360 NR Description: putative serine protease [Oryza sativa (japonica
  misc_feature (1)..(721): Homolog of NCBI NO: 18396193 NR Description: subtilisin-like serine protease, putative
  misc_feature (1)..(721): Homolog of NCBI NO: 22331076 NR Description: subtilisin-like serine protease, putative
  misc_feature (1)..(721): Homolog of NCBI NO: 18423316 NR Description: subtilisin-like serine protease [Arabidopsis
  misc_feature (1)..(721): Homolog of NCBI NO: 7435656 NR Description: subtilisin-like proteinase (EC 3.4.21.-) 2 -
  misc_feature (167)..(722): Homolog of NCBI NO: 29786399 NR Description: putative serine protease [Populus euramericana]
  misc_feature (1)..(719): Homolog of NCBI NO: 30697281 NR Description: subtilisin-like serine protease [Arabidopsis
  misc_feature (1)..(721): Homolog of NCBI NO: 18423316 NR Description: subtilisin-like serine protease [Arabidopsis
  misc_feature (1)..(721): Homolog of NCBI NO: 22331076 NR Description: subtilisin-like serine protease, putative
  misc_feature (1)..(721): Homolog of NCBI NO: 18396193 NR Description: subtilisin-like serine protease, putative
  misc_feature (1)..(722): Homolog of NCBI NO: 14488360 NR Description: putative serine protease [Oryza sativa (japonica
  misc_feature (1)..(722): Homolog of NCBI NO: 7435657 NR Description: subtilisin-like proteinase (EC 3.4.21.-) 1 -

SEQ ID NO: 48753 - DNA, 1815 bp, Arabidopsis thaliana
  misc_feature (1)..(1815): Ceres Seq. ID no. 12600973
  misc_feature: MA Experiment ID: 20000173 Result: Down-regulated in Transcription
  misc_feature: MA Experiment 20000173 PARAMETER Experiment Name: At_42deg_Heat_P Parameter: Age (day) Value: 14
  misc_feature: MA Experiment 20000173 PARAMETER Experiment Name: At_42deg_Heat_P Parameter: Organism Value: A. thaliana
  misc_feature: MA Experiment 20000173 PARAMETER Experiment Name: At_42deg_Heat_P Parameter: Plant Line Value: WS
  misc_feature: MA Experiment 20000173 PARAMETER Experiment Name: At_42deg_Heat_P Parameter: Temperature (deg C) Value: 42 vs. 22
  misc_feature: MA Experiment 20000173 PARAMETER Experiment Name: At_42deg_Heat_P Parameter: Timepoint (hr) Value: 6
  misc_feature: MA Experiment 20000173 PARAMETER Experiment Name: At_42deg_Heat_P Parameter: Tissue Value: Aerial
  misc_feature: MA Experiment ID: 20000179 Result: Up-regulated in Transcription
  misc_feature: MA Experiment 20000179 PARAMETER Experiment Name: At_Germinating_Seeds_P Parameter: Age (hr) Value: 6 vs. 0
  misc_feature: MA Experiment 20000179 PARAMETER Experiment Name: At_Germinating_Seeds_P Parameter: Tissue Value: Germinating Seeds
  misc_feature: MA Experiment ID: 20000180 Result: Up-regulated in Transcription
  misc_feature: MA Experiment 20000180 PARAMETER Experiment Name: At_Germinating_Seeds_P Parameter: Age (hr) Value: 24 vs. 0
  misc_feature: MA Experiment 20000180 PARAMETER Experiment Name: At_Germinating_Seeds_P Parameter: Tissue Value: Germinating Seeds
  misc_feature: MA Experiment ID: 20000185 Result: Down-regulated in Transcription
  misc_feature: MA Experiment 20000185 PARAMETER Experiment Name: At_Roots__P Parameter: Age (day) Value: 7 vs. 21
  misc_feature: MA Experiment 20000185 PARAMETER Experiment Name: At_Roots__P Parameter: Organism Value: A. thaliana
  misc_feature: MA Experiment 20000185 PARAMETER Experiment Name: At_Roots__P Parameter: Tissue Value: Roots vs. Whole Plant
  misc_feature: MA Experiment ID: 20000234 Result: Down-regulated in Transcription
  misc_feature: MA Experiment 20000234 PARAMETER Experiment Name: At_Siliques_P Parameter: Age (day) Value: 21
  misc_feature: MA Experiment 20000234 PARAMETER Experiment Name: At_Siliques_P Parameter: Organism Value: A. thaliana
  misc_feature: MA Experiment 20000234 PARAMETER Experiment Name: At_Siliques_P Parameter: Plant Line Value: WS
  misc_feature: MA Experiment 20000234 PARAMETER Experiment Name: At_Siliques_P Parameter: Tissue Value: Less Than 5mm Siliques vs. Whole Plant
  misc_feature: MA Experiment ID: 20000265 Result: Down-regulated in Transcription
  misc_feature: MA Experiment 20000265 PARAMETER Experiment Name: At_Open_Flower_P Parameter: Age (day) Value: 21
  misc_feature: MA Experiment 20000265 PARAMETER Experiment Name: At_Open_Flower_P Parameter: Plant Line Value: WS
  misc_feature: MA Experiment 20000265 PARAMETER Experiment Name: At_Open_Flower_P Parameter: Tissue Value: Closed Flower vs. Whole Plant
  misc_feature: MA Experiment ID: 20000286 Result: Down-regulated in Transcription
  misc_feature: MA Experiment 20000286 PARAMETER Experiment Name: At_Open_Flower_P Parameter: Age (day) Value: 21
  misc_feature: MA Experiment 20000286 PARAMETER Experiment Name: At_Open_Flower_P Parameter: Plant Line Value: WS
  misc_feature: MA Experiment 20000286 PARAMETER Experiment Name: At_Open_Flower_P Parameter: Tissue Value: Half Open vs. Whole Plant
  misc_feature: MA Experiment ID: 20000308 Result: Down-regulated in Transcription
  misc_feature: MA Experiment 20000308 PARAMETER Experiment Name: At_100mM_NaCl__P Parameter: Age (day) Value: 17
  misc_feature: MA Experiment 20000308 PARAMETER Experiment Name: At_100mM_NaCl__P Parameter: Organism Value: A. thaliana
  misc_feature: MA Experiment 20000308 PARAMETER Experiment Name: At_100mM_NaCl__P Parameter: Plant Line Value: WS
  misc_feature: MA Experiment 20000308 PARAMETER Experiment Name: At_100mM_NaCl__P Parameter: Timepoint (hr) Value: 72
  misc_feature: MA Experiment 20000308 PARAMETER Experiment Name: At_100mM_NaCl__P Parameter: Tissue Value: Whole Plant
  misc_feature: MA Experiment 20000308 PARAMETER Experiment Name: At_100mM_NaCl__P Parameter: Treatment Value: 100mM NaCl vs. No Treatment
  misc_feature: MA Experiment ID: 20000438 Result: Up-regulated in Transcription
  misc_feature: MA Experiment 20000438 PARAMETER Experiment Name: At_Shoots__P Parameter: Age (day) Value: 14
  misc_feature: MA Experiment 20000438 PARAMETER Experiment Name: At_Shoots__P Parameter: Tissue Value: Shoots vs. Whole Plant
  misc_feature: MA Experiment ID: 20000439 Result: Down-regulated in Transcription
  misc_feature: MA Experiment 20000439 PARAMETER Experiment Name: At_Roots__P Parameter: Age (day) Value: 14 vs. 21
  misc_feature: MA Experiment 20000439 PARAMETER Experiment Name: At_Roots__P Parameter: Organism Value: A. thaliana
  misc_feature: MA Experiment 20000439 PARAMETER Experiment Name: At_Roots__P Parameter: Tissue Value: Roots vs. Whole Plant
  misc_feature: MA Experiment ID: 20000441 Result: Up-regulated in Transcription
  misc_feature: MA Experiment 20000441 PARAMETER Experiment Name: At_1uM_BR-BRZ__P Parameter: Tissue Value: Shoot Apices
  misc_feature: MA Experiment 20000441 PARAMETER Experiment Name: At_1uM_BR-BRZ__P Parameter: Treatment Value: 1uM BR vs. No Treatment
  misc_feature: MA Experiment ID: 20000443 Result: Up-regulated in Transcription
  misc_feature: MA Experiment 20000443 PARAMETER Experiment Name: At_1uM_BR-BRZ__P Parameter: Tissue Value: Shoot Apices
  misc_feature: MA Experiment 20000443 PARAMETER Experiment Name: At_1uM_BR-BRZ__P Parameter: Treatment Value: 1uM BRZ vs. No Treatment
  misc_feature: MA Experiment ID: 20000578 Result: Down-regulated in Transcription
  misc_feature: MA Experiment 20000578 PARAMETER Experiment Name: At_CS3726__P Parameter: Organism Value: A. thaliana
  misc_feature: MA Experiment 20000578 PARAMETER Experiment Name: At_CS3726__P Parameter: Plant Line Value: CS3726
  misc_feature: MA Experiment 20000578 PARAMETER Experiment Name: At_CS3726__P Parameter: Tissue Value: Whole Plant
  misc_feature: MA Experiment ID: 20001247 Result: Up-regulated in Transcription
  misc_feature: MA Experiment 20001247 PARAMETER Experiment Name: At_Far-red-induction_P Parameter: Age (day) Value: 7
  misc_feature: MA Experiment 20001247 PARAMETER Experiment Name: At_Far-red-induction_P Parameter: Light Value: Far-red vs. White
  misc_feature: MA Experiment 20001247 PARAMETER Experiment Name: At_Far-red-induction_P Parameter: Organism Value: A. thaliana
  misc_feature: MA Experiment 20001247 PARAMETER Experiment Name: At_Far-red-induction_P Parameter: Plant Line Value: Columbia
  misc_feature: MA Experiment 20001247 PARAMETER Experiment Name: At_Far-red-induction_P Parameter: Timepoint (hr) Value: 1
  misc_feature: MA Experiment 20001247 PARAMETER Experiment Name: At_Far-red-induction_P Parameter: Tissue Value: Whole Plant
  misc_feature: MA Experiment ID: 20001450 Result: Up-regulated in Transcription
  misc_feature: MA Experiment 20001450 PARAMETER Experiment Name: At_Far-red-induction_P Parameter: Age (day) Value: 7
  misc_feature: MA Experiment 20001450 PARAMETER Experiment Name: At_Far-red-induction_P Parameter: Light Value: Far-red vs. White
  misc_feature: MA Experiment 20001450 PARAMETER Experiment Name: At_Far-red-induction_P Parameter: Organism Value: A. thaliana
  misc_feature: MA Experiment 20001450 PARAMETER Experiment Name: At_Far-red-induction_P Parameter: Plant Line Value: Columbia
  misc_feature: MA Experiment 20001450 PARAMETER Experiment Name: At_Far-red-induction_P Parameter: Timepoint (hr) Value: 8
  misc_feature: MA Experiment 20001450 PARAMETER Experiment Name: At_Far-red-induction_P Parameter: Tissue Value: Whole Plant
  misc_feature: MA Experiment ID: 20001560 Result: Down-regulated in Transcription
  misc_feature: MA Experiment 20001560 PARAMETER Experiment Name: At_Drought_Soil_Dry_P Parameter: Age (day) Value: 28
  misc_feature: MA Experiment 20001560 PARAMETER Experiment Name: At_Drought_Soil_Dry_P Parameter: Organism Value: A. thaliana
  misc_feature: MA Experiment 20001560 PARAMETER Experiment Name: At_Drought_Soil_Dry_P Parameter: Plant Line Value: WS
  misc_feature: MA Experiment 20001560 PARAMETER Experiment Name: At_Drought_Soil_Dry_P Parameter: Post Timepoint (hr) Value: None
  misc_feature: MA Experiment 20001560 PARAMETER Experiment Name: At_Drought_Soil_Dry_P Parameter: Post-Treatment Value: None
  misc_feature: MA Experiment 20001560 PARAMETER Experiment Name: At_Drought_Soil_Dry_P Parameter: Timepoint (day) Value: 14
  misc_feature: MA Experiment 20001560 PARAMETER Experiment Name: At_Drought_Soil_Dry_P Parameter: Treatment Value: Drought vs. No Drought
  misc_feature: MA Experiment ID: 20001757 Result: Up-regulated in Transcription
  misc_feature: MA Experiment 20001757 PARAMETER Experiment Name: At_50mM_NH4NO3_L-to-H_P Parameter: Timepoint (hr) Value: 6
  misc_feature: MA Experiment 20001757 PARAMETER Experiment Name: At_50mM_NH4NO3_L-to-H_P Parameter: Tissue Value: Leaf
  misc_feature: MA Experiment 20001757 PARAMETER Experiment Name: At_50mM_NH4NO3_L-to-H_P Parameter: Treatment Value: 50mM NH4NO3 vs 100mM Mannitol
  misc_feature: MA Experiment ID: 20001771 Result: Up-regulated in Transcription
  misc_feature: MA Experiment 20001771 PARAMETER Experiment Name: At_Far-red-enriched-adult_P Parameter: Age (day) Value: 28
  misc_feature: MA Experiment 20001771 PARAMETER Experiment Name: At_Far-red-enriched-adult_P Parameter: Light Value: Far-red enriched vs. White
  misc_feature: MA Experiment 20001771 PARAMETER Experiment Name: At_Far-red-enriched-adult_P Parameter: Organism Value: A. thaliana
  misc_feature: MA Experiment 20001771 PARAMETER Experiment Name: At_Far-red-enriched-adult_P Parameter: Plant Line Value: Columbia
  misc_feature: MA Experiment 20001771 PARAMETER Experiment Name: At_Far-red-enriched-adult_P Parameter: Timepoint (hr) Value: 16
  misc_feature: MA Experiment 20001771 PARAMETER Experiment Name: At_Far-red-enriched-adult_P Parameter: Tissue Value: Aerial
  misc_feature: MA Experiment ID: 20001904 Result: Down-regulated in Transcription
  misc_feature: MA Experiment 20001904 PARAMETER Experiment Name: At_Drought_Reproduction_P Parameter: Age (day) Value: 37
  misc_feature: MA Experiment 20001904 PARAMETER Experiment Name: At_Drought_Reproduction_P Parameter: Organism Value: A. thaliana
  misc_feature: MA Experiment 20001904 PARAMETER Experiment Name: At_Drought_Reproduction_P Parameter: Plant Line Value: WS
  misc_feature: MA Experiment 20001904 PARAMETER Experiment Name: At_Drought_Reproduction_P Parameter: Timepoint (day) Value: 7
  misc_feature: MA Experiment 20001904 PARAMETER Experiment Name: At_Drought_Reproduction_P Parameter: Tissue Value: Rosettes
  misc_feature: MA Experiment 20001904 PARAMETER Experiment Name: At_Drought_Reproduction_P Parameter: Treatment Value: Drought vs. No Drought
  misc_feature: MA Experiment ID: 20001905 Result: Down-regulated in Transcription
  misc_feature: MA Experiment 20001905 PARAMETER Experiment Name: At_Drought_Reproduction_P Parameter: Age (day) Value: 40
  misc_feature: MA Experiment 20001905 PARAMETER Experiment Name: At_Drought_Reproduction_P Parameter: Organism Value: A. thaliana
  misc_feature: MA Experiment 20001905 PARAMETER Experiment Name: At_Drought_Reproduction_P Parameter: Plant Line Value: WS
  misc_feature: MA Experiment 20001905 PARAMETER Experiment Name: At_Drought_Reproduction_P Parameter: Timepoint (day) Value: 10
  misc_feature: MA Experiment 20001905 PARAMETER Experiment Name: At_Drought_Reproduction_P Parameter: Tissue Value: Rosettes
  misc_feature: MA Experiment 20001905 PARAMETER Experiment Name: At_Drought_Reproduction_P Parameter: Treatment Value: Drought vs. No Drought
gaataatctctctgcttccctcctctagctcttgtccctttctgtctgaacctggcaagaagaaccttagcctatctttcttctttctctctctctgtgttctctgttctgtttcaactttactccctcagtttctgtacaatttccctatctagaagagagataaaaccgagaaggttttggagatagaatcttttgttcttcttttgtccctgcttgctcgatttttgttacgtgtgaagcaataaaaaaacggatatagctaaatcttccatccattcagaggcttctaaatctgatctgacatggaacaagtgtttgctgattggaattttgaagataattttcacatgtccactaataaaagatcaatcagaccagaagatgaattagtggagctattgtggagagatggtcaagtggttttacaaagccaagctcgtagagaaccgtcagtccaagtccaaacccacaaacaagaaaccctaagaaaacccaacaatatttttcttgacaaccaagaaacagtacaaaagcctaactacgctgctctagatgatcaagaaaccgtctcctggatacaataccctccggatgacgtcatcgaccctttcgaatccgagttctcctctcatttcttctcttcgatcgatcacctcggaggtcctgagaagccacgaacgatcgaagagacagttaagcatgaggctcaagccatggctcctcctaagtttagatcctcggttataacagtcggaccgagtcattgcggcagcaaccagtcaacaaatattcatcaggccactacacttccggtttctatgagtgatagaagcaagaacgtcgaagaaagacttgacacttcgtcaggtggctcctccggttgcagctatggaaggaacaacaaagaaaccgttagtggaacaagtgtaaccattgaccgtaaaagaaaacatgttatggatgctgatcaagaatctgtgtctcaatcagatataggtttgacctcaaccgatgatcaaaccatgggtaacaaatcgagccaacggtcaggatctactcgaagaagccgtgcagctgaagttcataatctctcagaaaggaggaggagagatcggatcaatgaaagaatgaaagctcttcaagaactcatacctcactgcagcagaataaagcttcgatattggatgaagcaattgattacttaaaatcacttcaaatgcaactccaagtgatgtggatgggaagtggaatggcggcggcggcagcagcagcagcaagtccgatgatgtttcccggggtacaatcatctccatacattaatcagatggctatgcaaagtcagatgcaattgtctcaattcccggttatgaaccggtccgctccgcagaaccatcccggtttagtatgtctaaacccggtacagttgcagctccaagcacagaaccaaatcttatcggagcagctcgctaggtacatgggcgggattccccagatgccgccggcgggaaatcagaccgtgcaacaacaaccagcggacatgttgggatttggatctccggcgggaccgcaaagtcaactgtcggcaccggcgaccaccgacagtcttcatatgggtaaaataggctgacttggcatatagttttcctccgaaattattcttcttacagttggtgattgttatttatttttggtcgcctaagcaagcataaaagctaagtcaaatgtattatagagatctaataagttagtctcatacttataacttatttttaaacagttgaattatagtatcaatcaagtgttgggacccgt

SEQ ID NO: 48754 - protein, 300 aa, Arabidopsis thaliana
  peptide (1)..(300): Ceres Seq. ID no. 12600974
  misc_feature (257)..(299): Pfam Name: Helix-loop-helix DNA-binding domain Pfam Description: Helix-loop-helix DNA-binding domain
  misc_feature (110)..(288): Homolog of NCBI NO: 34899612 NR Description: putative phytochrome interacting factor 4
  misc_feature (8)..(266): Homolog of NCBI NO: 13430618 NR Description: unknown protein [Arabidopsis thaliana]
  misc_feature (8)..(266): Homolog of NCBI NO: 20197630 NR Description: expressed protein [Arabidopsis thaliana]
  misc_feature (8)..(288): Homolog of NCBI NO: 30689224 NR Description: transcription factor (BHLH9) -related
  misc_feature (8)..(288): Homolog of NCBI NO: 30689218 NR Description: transcription factor (BHLH9) -related
  misc_feature (8)..(288): Homolog of NCBI NO: 25408828 NR Description: hypothetical protein At2g43010 [imported] -
  misc_feature (1)..(300): Homolog of NCBI NO: 19698849 NR Description: putative protein [Arabidopsis thaliana]
  misc_feature (1)..(288): Homolog of NCBI NO: 30694924 NR Description: bHLH protein family [Arabidopsis thaliana]
  misc_feature (1)..(288): Homolog of NCBI NO: 30694919 NR Description: bHLH protein family [Arabidopsis thaliana]
  misc_feature (1)..(288): Homolog of NCBI NO: 20127070 NR Description: putative bHLH transcription factor [Arabidopsis
MEQVFADWNFEDNFHMSTNKRSIRPEDELVELLWRDGQVVLQSQARREPSVQVQTHKQETLRKPNNIFLDNQETVQKPNYAALDDQETVSWIQYPPDDVIDPFESEFSSHFFSSIDHLGGPEKPRTIEETVKHEAQAMAPPKFRSSVITVGPSHCGSNQSTNIHQATTLPVSMSDRSKNVEERLDTSSGGSSGCSYGRNNKETVSGTSVTIDRKRKHVMDADQESVSQSDIGLTSTDDQTMGNKSSQRSGSTRRSRAAEVHNLSERRRRDRINERMKALQELIPHCSRIKLRYWMKQLIT

SEQ ID NO: 48755 - protein, 285 aa, Arabidopsis thaliana
  peptide (1)..(285): Ceres Seq. ID no. 12600975
  misc_feature (242)..(284): Pfam Name: Helix-loop-helix DNA-binding domain Pfam Description: Helix-loop-helix DNA-binding domain
  misc_feature (95)..(273): Homolog of NCBI NO: 34899612 NR Description: putative phytochrome interacting factor 4
  misc_feature (1)..(251): Homolog of NCBI NO: 13430618 NR Description: unknown protein [Arabidopsis thaliana]
  misc_feature (1)..(251): Homolog of NCBI NO: 20197630 NR Description: expressed protein [Arabidopsis thaliana]
  misc_feature (1)..(273): Homolog of NCBI NO: 30689224 NR Description: transcription factor (BHLH9) -related
  misc_feature (1)..(273): Homolog of NCBI NO: 30689218 NR Description: transcription factor (BHLH9) -related
  misc_feature (1)..(273): Homolog of NCBI NO: 25408828 NR Description: hypothetical protein At2g43010 [imported] -
  misc_feature (1)..(285): Homolog of NCBI NO: 19698849 NR Description: putative protein [Arabidopsis thaliana]
  misc_feature (1)..(273): Homolog of NCBI NO: 30694924 NR Description: bHLH protein family [Arabidopsis thaliana]
  misc_feature (1)..(273): Homolog of NCBI NO: 30694919 NR Description: bHLH protein family [Arabidopsis thaliana]
  misc_feature (1)..(273): Homolog of NCBI NO: 20127070 NR Description: putative bHLH transcription factor [Arabidopsis
MSTNKRSIRPEDELVELLWRDGQVVLQSQARREPSVQVQTHKQETLRKPNNIFLDNQETVQKPNYAALDDQETVSWIQYPPDDVIDPFESEFSSHFFSSIDHLGGPEKPRTIEETVKHEAQAMAPPKFRSSVITVGPSHCGSNQSTNIHQATTLPVSMSDRSKNVEERLDTSSGGSSGCSYGRNNKETVSGTSVTIDRKRKHVMDADQESVSQSDIGLTSTDDQTMGNKSSQRSGSTRRSRAAEVHNLSERRRRDRINERMKALQELIPHCSRIKLRYWMKQLIT

SEQ ID NO: 48756 - protein, 163 aa, Arabidopsis thaliana
  peptide (1)..(163): Ceres Seq. ID no. 12600976
  misc_feature (120)..(162): Pfam Name: Helix-loop-helix DNA-binding domain Pfam Description: Helix-loop-helix DNA-binding domain
  misc_feature (1)..(151): Homolog of NCBI NO: 34899612 NR Description: putative phytochrome interacting factor 4
  misc_feature (1)..(129): Homolog of NCBI NO: 13430618 NR Description: unknown protein [Arabidopsis thaliana]
  misc_feature (1)..(129): Homolog of NCBI NO: 20197630 NR Description: expressed protein [Arabidopsis thaliana]
  misc_feature (1)..(151): Homolog of NCBI NO: 30689224 NR Description: transcription factor (BHLH9) -related
  misc_feature (1)..(151): Homolog of NCBI NO: 30689218 NR Description: transcription factor (BHLH9) -related
  misc_feature (1)..(151): Homolog of NCBI NO: 25408828 NR Description: hypothetical protein At2g43010 [imported] -
  misc_feature (1)..(163): Homolog of NCBI NO: 19698849 NR Description: putative protein [Arabidopsis thaliana]
  misc_feature (1)..(151): Homolog of NCBI NO: 30694924 NR Description: bHLH protein family [Arabidopsis thaliana]
  misc_feature (1)..(151): Homolog of NCBI NO: 30694919 NR Description: bHLH protein family [Arabidopsis thaliana]
  misc_feature (1)..(151): Homolog of NCBI NO: 20127070 NR Description: putative bHLH transcription factor [Arabidopsis
MAPPKFRSSVITVGPSHCGSNQSTNIHQATTLPVSMSDRSKNVEERLDTSSGGSSGCSYGRNNKETVSGTSVTIDRKRKHVMDADQESVSQSDIGLTSTDDQTMGNKSSQRSGSTRRSRAAEVHNLSERRRRDRINERMKALQELIPHCSRIKLRYWMKQLIT

SEQ ID NO: 48757 - DNA, 1779 bp, Arabidopsis thaliana
  misc_feature (1)..(1779): Ceres Seq. ID no. 14310275
  misc_feature: MA Experiment ID: 20000169 Result: Up-regulated in Transcription
  misc_feature: MA Experiment 20000169 PARAMETER Experiment Name: At_100uM_ABA_P Parameter: Age (day) Value: 14
  misc_feature: MA Experiment 20000169 PARAMETER Experiment Name: At_100uM_ABA_P Parameter: Organism Value: A. thaliana
  misc_feature: MA Experiment 20000169 PARAMETER Experiment Name: At_100uM_ABA_P Parameter: Plant Line Value: WS
  misc_feature: MA Experiment 20000169 PARAMETER Experiment Name: At_100uM_ABA_P Parameter: Timepoint (hr) Value: 6
  misc_feature: MA Experiment 20000169 PARAMETER Experiment Name: At_100uM_ABA_P Parameter: Tissue Value: Aerial
  misc_feature: MA Experiment 20000169 PARAMETER Experiment Name: At_100uM_ABA_P Parameter: Treatment Value: 100uM ABA vs. No Treatment
  misc_feature: MA Experiment ID: 20000179 Result: Down-regulated in Transcription
  misc_feature: MA Experiment 20000179 PARAMETER Experiment Name: At_Germinating_Seeds_P Parameter: Age (hr) Value: 6 vs. 0
  misc_feature: MA Experiment 20000179 PARAMETER Experiment Name: At_Germinating_Seeds_P Parameter: Tissue Value: Germinating Seeds
  misc_feature: MA Experiment ID: 20000180 Result: Down-regulated in Transcription
  misc_feature: MA Experiment 20000180 PARAMETER Experiment Name: At_Germinating_Seeds_P Parameter: Age (hr) Value: 24 vs. 0
  misc_feature: MA Experiment 20000180 PARAMETER Experiment Name: At_Germinating_Seeds_P Parameter: Tissue Value: Germinating Seeds
  misc_feature: MA Experiment ID: 20000182 Result: Up-regulated in Transcription
  misc_feature: MA Experiment 20000182 PARAMETER Experiment Name: At_2mM_SA_P Parameter: Age (day) Value: 14
  misc_feature: MA Experiment 20000182 PARAMETER Experiment Name: At_2mM_SA_P Parameter: Organism Value: A. thaliana
  misc_feature: MA Experiment 20000182 PARAMETER Experiment Name: At_2mM_SA_P Parameter: Plant Line Value: WS
  misc_feature: MA Experiment 20000182 PARAMETER Experiment Name: At_2mM_SA_P Parameter: Timepoint (hr) Value: 6
  misc_feature: MA Experiment 20000182 PARAMETER Experiment Name: At_2mM_SA_P Parameter: Tissue Value: Aerial
  misc_feature: MA Experiment 20000182 PARAMETER Experiment Name: At_2mM_SA_P Parameter: Treatment Value: 2mM SA vs. No Treatment
  misc_feature: MA Experiment ID: 20000438 Result: Up-regulated in Transcription
  misc_feature: MA Experiment 20000438 PARAMETER Experiment Name: At_Shoots__P Parameter: Age (day) Value: 14
  misc_feature: MA Experiment 20000438 PARAMETER Experiment Name: At_Shoots__P Parameter: Tissue Value: Shoots vs. Whole Plant
  misc_feature: MA Experiment ID: 20000441 Result: Up-regulated in Transcription
  misc_feature: MA Experiment 20000441 PARAMETER Experiment Name: At_1uM_BR-BRZ__P Parameter: Tissue Value: Shoot Apices
  misc_feature: MA Experiment 20000441 PARAMETER Experiment Name: At_1uM_BR-BRZ__P Parameter: Treatment Value: 1uM BR vs. No Treatment
  misc_feature: MA Experiment ID: 20000443 Result: Up-regulated in Transcription
  misc_feature: MA Experiment 20000443 PARAMETER Experiment Name: At_1uM_BR-BRZ__P Parameter: Tissue Value: Shoot Apices
  misc_feature: MA Experiment 20000443 PARAMETER Experiment Name: At_1uM_BR-BRZ__P Parameter: Treatment Value: 1uM BRZ vs. No Treatment
  misc_feature: MA Experiment ID: 20000445 Result: Up-regulated in Transcription
  misc_feature: MA Experiment 20000445 PARAMETER Experiment Name: At_100uM_NAA__P Parameter: Age (day) Value: 14
  misc_feature: MA Experiment 20000445 PARAMETER Experiment Name: At_100uM_NAA__P Parameter: Organism Value: A. thaliana
  misc_feature: MA Experiment 20000445 PARAMETER Experiment Name: At_100uM_NAA__P Parameter: Plant Line Value: WS
  misc_feature: MA Experiment 20000445 PARAMETER Experiment Name: At_100uM_NAA__P Parameter: Timepoint (hr) Value: 6
  misc_feature: MA Experiment 20000445 PARAMETER Experiment Name: At_100uM_NAA__P Parameter: Tissue Value: Aerial
  misc_feature: MA Experiment 20000445 PARAMETER Experiment Name: At_100uM_NAA__P Parameter: Treatment Value: 100uM NAA vs. No Treatment
  misc_feature: MA Experiment ID: 20000496 Result: Down-regulated in Transcription
  misc_feature: MA Experiment 20000496 PARAMETER Experiment Name: At_Guard_Cells_P Parameter: Harvest Date Value: 7/19/2002
  misc_feature: MA Experiment 20000496 PARAMETER Experiment Name: At_Guard_Cells_P Parameter: Organism Value: Canola
  misc_feature: MA Experiment 20000496 PARAMETER Experiment Name: At_Guard_Cells_P Parameter: Tissue Value: Guard Cells vs. Leaves
  misc_feature: MA Experiment ID: 20000794 Result: Up-regulated in Transcription
  misc_feature: MA Experiment 20000794 PARAMETER Experiment Name: At_Petals_P Parameter: Age (day) Value: 23-25 days
  misc_feature: MA Experiment 20000794 PARAMETER Experiment Name: At_Petals_P Parameter: Plant Line Value: WS
  misc_feature: MA Experiment 20000794 PARAMETER Experiment Name: At_Petals_P Parameter: Tissue Value: Petals vs. Whole plant
  misc_feature: MA Experiment ID: 20001248 Result: Down-regulated in Transcription
  misc_feature: MA Experiment 20001248 PARAMETER Experiment Name: At_Far-red-induction_P Parameter: Age (day) Value: 7
  misc_feature: MA Experiment 20001248 PARAMETER Experiment Name: At_Far-red-induction_P Parameter: Light Value: Far-red vs. White
  misc_feature: MA Experiment 20001248 PARAMETER Experiment Name: At_Far-red-induction_P Parameter: Organism Value: A. thaliana
  misc_feature: MA Experiment 20001248 PARAMETER Experiment Name: At_Far-red-induction_P Parameter: Plant Line Value: Columbia
  misc_feature: MA Experiment 20001248 PARAMETER Experiment Name: At_Far-red-induction_P Parameter: Timepoint (hr) Value: 4
  misc_feature: MA Experiment 20001248 PARAMETER Experiment Name: At_Far-red-induction_P Parameter: Tissue Value: Whole Plant
  misc_feature: MA Experiment ID: 20001458 Result: Down-regulated in Transcription
  misc_feature: MA Experiment 20001458 PARAMETER Experiment Name: At_50mM_NH4NO3_L-to-H_P Parameter: Age (day) Value: Undefined
  misc_feature: MA Experiment 20001458 PARAMETER Experiment Name: At_50mM_NH4NO3_L-to-H_P Parameter: Organism Value: Undefined
  misc_feature: MA Experiment 20001458 PARAMETER Experiment Name: At_50mM_NH4NO3_L-to-H_P Parameter: Plant Line Value: Undefined
  misc_feature: MA Experiment 20001458 PARAMETER Experiment Name: At_50mM_NH4NO3_L-to-H_P Parameter: Timepoint (hr) Value: 2
  misc_feature: MA Experiment 20001458 PARAMETER Experiment Name: At_50mM_NH4NO3_L-to-H_P Parameter: Tissue Value: Siliques
  misc_feature: MA Experiment 20001458 PARAMETER Experiment Name: At_50mM_NH4NO3_L-to-H_P Parameter: Treatment Value: 50mM NH4NO3 vs. 100mM Manitol
  misc_feature: MA Experiment ID: 20001557 Result: Up-regulated in Transcription
  misc_feature: MA Experiment 20001557 PARAMETER Experiment Name: At_Drought_Soil_Dry_P Parameter: Age (day) Value: 27
  misc_feature: MA Experiment 20001557 PARAMETER Experiment Name: At_Drought_Soil_Dry_P Parameter: Organism Value: A. thaliana
  misc_feature: MA Experiment 20001557 PARAMETER Experiment Name: At_Drought_Soil_Dry_P Parameter: Plant Line Value: WS
  misc_feature: MA Experiment 20001557 PARAMETER Experiment Name: At_Drought_Soil_Dry_P Parameter: Post Timepoint (hr) Value: 3
  misc_feature: MA Experiment 20001557 PARAMETER Experiment Name: At_Drought_Soil_Dry_P Parameter: Post-Treatment Value: Re-Water vs. No Drought
  misc_feature: MA Experiment 20001557 PARAMETER Experiment Name: At_Drought_Soil_Dry_P Parameter: Timepoint (day) Value: 13
  misc_feature: MA Experiment 20001557 PARAMETER Experiment Name: At_Drought_Soil_Dry_P Parameter: Treatment Value: Drought vs. No Drought
  misc_feature: MA Experiment ID: 20001558 Result: Up-regulated in Transcription
  misc_feature: MA Experiment 20001558 PARAMETER Experiment Name: At_Drought_Soil_Dry_P Parameter: Age (day) Value: 27
  misc_feature: MA Experiment 20001558 PARAMETER Experiment Name: At_Drought_Soil_Dry_P Parameter: Organism Value: A. thaliana
  misc_feature: MA Experiment 20001558 PARAMETER Experiment Name: At_Drought_Soil_Dry_P Parameter: Plant Line Value: WS
  misc_feature: MA Experiment 20001558 PARAMETER Experiment Name: At_Drought_Soil_Dry_P Parameter: Post Timepoint (hr) Value: 6
  misc_feature: MA Experiment 20001558 PARAMETER Experiment Name: At_Drought_Soil_Dry_P Parameter: Post-Treatment Value: Re-Water vs. No Drought
  misc_feature: MA Experiment 20001558 PARAMETER Experiment Name: At_Drought_Soil_Dry_P Parameter: Timepoint (day) Value: 13
  misc_feature: MA Experiment 20001558 PARAMETER Experiment Name: At_Drought_Soil_Dry_P Parameter: Treatment Value: Drought vs. No Drought
  misc_feature: MA Experiment ID: 20001560 Result: Up-regulated in Transcription
  misc_feature: MA Experiment 20001560 PARAMETER Experiment Name: At_Drought_Soil_Dry_P Parameter: Age (day) Value: 28
  misc_feature: MA Experiment 20001560 PARAMETER Experiment Name: At_Drought_Soil_Dry_P Parameter: Organism Value: A. thaliana
  misc_feature: MA Experiment 20001560 PARAMETER Experiment Name: At_Drought_Soil_Dry_P Parameter: Plant Line Value: WS
  misc_feature: MA Experiment 20001560 PARAMETER Experiment Name: At_Drought_Soil_Dry_P Parameter: Post Timepoint (hr) Value: None
  misc_feature: MA Experiment 20001560 PARAMETER Experiment Name: At_Drought_Soil_Dry_P Parameter: Post-Treatment Value: None
  misc_feature: MA Experiment 20001560 PARAMETER Experiment Name: At_Drought_Soil_Dry_P Parameter: Timepoint (day) Value: 14
  misc_feature: MA Experiment 20001560 PARAMETER Experiment Name: At_Drought_Soil_Dry_P Parameter: Treatment Value: Drought vs. No Drought
  misc_feature: MA Experiment ID: 20001904 Result: Up-regulated in Transcription
  misc_feature: MA Experiment 20001904 PARAMETER Experiment Name: At_Drought_Reproduction_P Parameter: Age (day) Value: 37
  misc_feature: MA Experiment 20001904 PARAMETER Experiment Name: At_Drought_Reproduction_P Parameter: Organism Value: A. thaliana
  misc_feature: MA Experiment 20001904 PARAMETER Experiment Name: At_Drought_Reproduction_P Parameter: Plant Line Value: WS
  misc_feature: MA Experiment 20001904 PARAMETER Experiment Name: At_Drought_Reproduction_P Parameter: Timepoint (day) Value: 7
  misc_feature: MA Experiment 20001904 PARAMETER Experiment Name: At_Drought_Reproduction_P Parameter: Tissue Value: Rosettes
  misc_feature: MA Experiment 20001904 PARAMETER Experiment Name: At_Drought_Reproduction_P Parameter: Treatment Value: Drought vs. No Drought
  misc_feature: MA Experiment ID: 20001905 Result: Up-regulated in Transcription
  misc_feature: MA Experiment 20001905 PARAMETER Experiment Name: At_Drought_Reproduction_P Parameter: Age (day) Value: 40
  misc_feature: MA Experiment 20001905 PARAMETER Experiment Name: At_Drought_Reproduction_P Parameter: Organism Value: A. thaliana
  misc_feature: MA Experiment 20001905 PARAMETER Experiment Name: At_Drought_Reproduction_P Parameter: Plant Line Value: WS
  misc_feature: MA Experiment 20001905 PARAMETER Experiment Name: At_Drought_Reproduction_P Parameter: Timepoint (day) Value: 10
  misc_feature: MA Experiment 20001905 PARAMETER Experiment Name: At_Drought_Reproduction_P Parameter: Tissue Value: Rosettes
  misc_feature: MA Experiment 20001905 PARAMETER Experiment Name: At_Drought_Reproduction_P Parameter: Treatment Value: Drought vs. No Drought
  misc_feature: MA Experiment ID: 20001911 Result: Up-regulated in Transcription
  misc_feature: MA Experiment 20001911 PARAMETER Experiment Name: At_Drought_Reproduction_P Parameter: Age (day) Value: 40
  misc_feature: MA Experiment 20001911 PARAMETER Experiment Name: At_Drought_Reproduction_P Parameter: Organism Value: A. thaliana
  misc_feature: MA Experiment 20001911 PARAMETER Experiment Name: At_Drought_Reproduction_P Parameter: Plant Line Value: WS
  misc_feature: MA Experiment 20001911 PARAMETER Experiment Name: At_Drought_Reproduction_P Parameter: Timepoint (day) Value: 10
  misc_feature: MA Experiment 20001911 PARAMETER Experiment Name: At_Drought_Reproduction_P Parameter: Tissue Value: Flowers
  misc_feature: MA Experiment 20001911 PARAMETER Experiment Name: At_Drought_Reproduction_P Parameter: Treatment Value: Drought vs. No Drought
gaagacgtttctctctgcttcaccaccagagagatacatccaaaaattcatatctttccttcatttttattggcgttttaagaaaacaaagcttccccaattagggttttgtattagaagaatgggattgtggaatggaaaaggcaccggaggatttatcctctaccttctcgtggctttctccgtcgccgtcttctctgtttcttacgtcggagacacaacaaaccctattcatcatcatctctcttctctctctgccaccgaaaaaatttggccggatttgaagtttagctggaaacttgtgttggctacagtgatagcgtttctaggatcagcttgtgggactgttggtggtgttggaggtggtgggatttttgttcctatgctcactcttatactcgggttcgatacaaaatccgcagctgcaatatcaaaatgtatgataatgggagcatcagcatcatcagtttggtacaatgtacgagttcgtcatccgacaaaagaagtaccaatcttagattatgatcttgctcttctctttcaaccaatgcttcttctcggtatcactgttggtgtttctctcagtgttgtgttcccttattggctcattactgtcctcatcatcattcttttcgtcggtacttcttcgagatctttttttaaaggcattgagatgtggaaggaagagacattgttaaagaacgaaatggcgcagcaacgagctaatatggttaattcccggggagaacttttaatcgatacagagtatgagccgctttaccctagagaagaaaaatcagagctggaaataatacgctccaacctcaaatggaaagggcttctaattctagtaactgtgtggttgactttcttgctcattcaaattgtcaagaacgaaataaaggtctgcagcacaatatattggatactattcatcgtacagttcccagttgctttagcggtgtttgggtttgaagcaagcaaattgtatacagcgaacaaaaagaggttaaacagtggcaacactgaatgtatctgtgaagctacgatcgagtggactcctctgagtctaatcttctgtggtctctgtggtctcattggaggtatcgtaggtggtctccttggatccggtggtggatttgttctcgggcctttgcttcttgagattggagtcatcccacaggttgctagcgcaacagctacctttgtgatgatgttttcttcgtccttatccgtagtcgagttctatctcctcaagagattcccaataccatacgcaatgtacttgatttcggtatcgattcttgccggtttttggggacaatcctttataagaaagctcgtggcgatcctgagaagagcttccataatcgttttcgttctctcaggagtcatttgtgcaagtgctctcacaatgggagtgattgggatagagaagagcataaagatgatacataaccatgaattcatgggattcttaggattctgcagcagtcaatgaatcaaccatctatctgaacaaaaatttcaagtgttttgttttcatttactggacaatttcggttgtccaacaccattattgtgagaagttataaaattagattgttttacttgcagtccaagtcatttgtgctctgttcttggtcaatacatagttgaccatcttcagaaatagagtttgtctaaattgttgtcattgtgttttgcttgtattcaaacgttgtattattatttgcgagacgatagataaaataaaaatggaagtctttttctattcac

SEQ ID NO: 48758 - protein, 499 aa, Arabidopsis thaliana
  peptide (1)..(499): Ceres Seq. ID no. 14310276
  misc_feature (68)..(492): Homolog of NCBI NO: 6554197 NR Description: T23J18.20 [Arabidopsis thaliana]
  misc_feature (290)..(491): Homolog of NCBI NO: 16660290 NR Description: hypothetical protein [Musa acuminata]
  misc_feature (53)..(492): Homolog of NCBI NO: 15220419 NR Description: expressed protein [Arabidopsis thaliana]
  misc_feature (101)..(492): Homolog of NCBI NO: 34908754 NR Description: P0415A04.10 [Oryza sativa (japonica
  misc_feature (90)..(496): Homolog of NCBI NO: 40253486 NR Description: unknown protein [Oryza sativa (japonica
  misc_feature (60)..(497): Homolog of NCBI NO: 40253412 NR Description: membrane protein-like [Oryza sativa (japonica
  misc_feature (90)..(496): Homolog of NCBI NO: 30682879 NR Description: expressed protein [Arabidopsis thaliana]
  misc_feature (312)..(395): Homolog of NCBI NO: 25408492 NR Description: hypothetical protein At2g36630 [imported] -
  misc_feature (41)..(237): Homolog of NCBI NO: 25408492 NR Description: hypothetical protein At2g36630 [imported] -
  misc_feature (41)..(499): Homolog of NCBI NO: 30686851 NR Description: expressed protein [Arabidopsis thaliana]
KTFLSASPPERYIQKFISFLHFYWRFKKTKLPQLGFCIRRMGLWNGKGTGGFILYLLVAFSVAVFSVSYVGDTTNPIHHHLSSLSATEKIWPDLKFSWKLVLATVIAFLGSACGTVGGVGGGGIFVPMLTLILGFDTKSAAAISKCMIMGASASSVWYNVRVRHPTKEVPILDYDLALLFQPMLLLGITVGVSLSVVFPYWLITVLIIILFVGTSSRSFFKGIEMWKEETLLKNEMAQQRANMVNSRGELLIDTEYEPLYPREEKSELEIIRSNLKWKGLLILVTVWLTFLLIQIVKNEIKVCSTIYWILFIVQFPVALAVFGFEASKLYTANKKRLNSGNTECICEATIEWTPLSLIFCGLCGLIGGIVGGLLGSGGGFVLGPLLLEIGVIPQVASATATFVMMFSSSLSVVEFYLLKRFPIPYAMYLISVSILAGFWGQSFIRKLVAILRRASIIVFVLSGVICASALTMGVIGIEKSIKMIHNHEFMGFLGFCSSQ

SEQ ID NO: 48759 - protein, 459 aa, Arabidopsis thaliana
  peptide (1)..(459): Ceres Seq. ID no. 14310277
  misc_feature (28)..(452): Homolog of NCBI NO: 6554197 NR Description: T23J18.20 [Arabidopsis thaliana]
  misc_feature (250)..(451): Homolog of NCBI NO: 16660290 NR Description: hypothetical protein [Musa acuminata]
  misc_feature (13)..(452): Homolog of NCBI NO: 15220419 NR Description: expressed protein [Arabidopsis thaliana]
  misc_feature (61)..(452): Homolog of NCBI NO: 34908754 NR Description: P0415A04.10 [Oryza sativa (japonica
  misc_feature (50)..(456): Homolog of NCBI NO: 40253486 NR Description: unknown protein [Oryza sativa (japonica
  misc_feature (20)..(457): Homolog of NCBI NO: 40253412 NR Description: membrane protein-like [Oryza sativa (japonica
  misc_feature (50)..(456): Homolog of NCBI NO: 30682879 NR Description: expressed protein [Arabidopsis thaliana]
  misc_feature (272)..(355): Homolog of NCBI NO: 25408492 NR Description: hypothetical protein At2g36630 [imported] -
  misc_feature (1)..(197): Homolog of NCBI NO: 25408492 NR Description: hypothetical protein At2g36630 [imported] -
  misc_feature (1)..(459): Homolog of NCBI NO: 30686851 NR Description: expressed protein [Arabidopsis thaliana]
MGLWNGKGTGGFILYLLVAFSVAVFSVSYVGDTTNPIHHHLSSLSATEKIWPDLKFSWKLVLATVIAFLGSACGTVGGVGGGGIFVPMLTLILGFDTKSAAAISKCMIMGASASSVWYNVRVRHPTKEVPILDYDLALLFQPMLLLGITVGVSLSVVFPYWLITVLIIILFVGTSSRSFFKGIEMWKEETLLKNEMAQQRANMVNSRGELLIDTEYEPLYPREEKSELEIIRSNLKWKGLLILVTVWLTFLLIQIVKNEIKVCSTIYWILFIVQFPVALAVFGFEASKLYTANKKRLNSGNTECICEATIEWTPLSLIFCGLCGLIGGIVGGLLGSGGGFVLGPLLLEIGVIPQVASATATFVMMFSSSLSVVEFYLLKRFPIPYAMYLISVSILAGFWGQSFIRKLVAILRRASIIVFVLSGVICASALTMGVIGIEKSIKMIHNHEFMGFLGFCSSQ

SEQ ID NO: 48760 - protein, 372 aa, Arabidopsis thaliana
  peptide (1)..(372): Ceres Seq. ID no. 14310278
  misc_feature (1)..(365): Homolog of NCBI NO: 6554197 NR Description: T23J18.20 [Arabidopsis thaliana]
  misc_feature (163)..(364): Homolog of NCBI NO: 16660290 NR Description: hypothetical protein [Musa acuminata]
  misc_feature (1)..(365): Homolog of NCBI NO: 15220419 NR Description: expressed protein [Arabidopsis thaliana]
  misc_feature (1)..(365): Homolog of NCBI NO: 34908754 NR Description: P0415A04.10 [Oryza sativa (japonica
  misc_feature (1)..(369): Homolog of NCBI NO: 40253486 NR Description: unknown protein [Oryza sativa (japonica
  misc_feature (1)..(370): Homolog of NCBI NO: 40253412 NR Description: membrane protein-like [Oryza sativa (japonica
  misc_feature (1)..(369): Homolog of NCBI NO: 30682879 NR Description: expressed protein [Arabidopsis thaliana]
  misc_feature (185)..(268): Homolog of NCBI NO: 25408492 NR Description: hypothetical protein At2g36630 [imported] -
  misc_feature (1)..(110): Homolog of NCBI NO: 25408492 NR Description: hypothetical protein At2g36630 [imported] -
  misc_feature (1)..(372): Homolog of NCBI NO: 30686851 NR Description: expressed protein [Arabidopsis thaliana]
MLTLILGFDTKSAAAISKCMIMGASASSVWYNVRVRHPTKEVPILDYDLALLFQPMLLLGITVGVSLSVVFPYWLITVLIIILFVGTSSRSFFKGIEMWKEETLLKNEMAQQRANMVNSRGELLIDTEYEPLYPREEKSELEIIRSNLKWKGLLILVTVWLTFLLIQIVKNEIKVCSTIYWILFIVQFPVALAVFGFEASKLYTANKKRLNSGNTECICEATIEWTPLSLIFCGLCGLIGGIVGGLLGSGGGFVLGPLLLEIGVIPQVASATATFVMMFSSSLSVVEFYLLKRFPIPYAMYLISVSILAGFWGQSFIRKLVAILRRASIIVFVLSGVICASALTMGVIGIEKSIKMIHNHEFMGFLGFCSSQ

SEQ ID NO: 48761 - DNA, 2358 bp, Arabidopsis thaliana
  misc_feature (1)..(2358): Ceres Seq. ID no. 15175612
  misc_feature: MA Experiment ID: 20000234 Result: Up-regulated in Transcription
  misc_feature: MA Experiment 20000234 PARAMETER Experiment Name: At_Siliques_P Parameter: Age (day) Value: 21
  misc_feature: MA Experiment 20000234 PARAMETER Experiment Name: At_Siliques_P Parameter: Organism Value: A. thaliana
  misc_feature: MA Experiment 20000234 PARAMETER Experiment Name: At_Siliques_P Parameter: Plant Line Value: WS
  misc_feature: MA Experiment 20000234 PARAMETER Experiment Name: At_Siliques_P Parameter: Tissue Value: Less Than 5mm Siliques vs. Whole Plant
gagtcacactcagataacataaacctttgacaagagattttgatgctccttcgtcttacggctcgctctattcgtcgtttcacaacttcttcttcgtccttaccatttctctcatcgtcttcgtattgtactgtttcaacaatggcagctaatcatccaaaggatgtagcgtatctctccgccgtcatccccaaacgtatcaggcttttcgagcagatccaagcgaatcaactcgagaatcttaagtctcttccacacgatccgatcaaggttacgttaccagatggaaatgtgaaagaaggaaagaaatgggagacaactccgatggatatcgctgctcagatttctaagggtttggctaattctgcattgatttctgctgttgatgatgttctctgggatatgaataggccattggaaggtgattgtaagcttgagcttttcaaatttgatagtgataaaggtcgtgacactctttggcattctagtgcgcacattcttggtcaggctctcgagcaggagtatgggtgtcagctgtgcattggaccatgcacaacgagaggagagggtttctactatgatggattttatggtgaattgggcctgagtgacaatcacttttctagcatcgaagcaggtgctgcaaaagctgctaaggaagcacaaccatttgaaaggattgaagtgacgaaggatcaggcactcgagatgttttctgagaataattttaaggttgaactcatcaatggtttgcctgcagacatgaccattactgtctacagatgtggccctttggtggatttgtgtcgtggaccgcacataccaaatacttcctttgtgaaagcgttcaagtgtttgagggcctcatcagcttactggaagggtgacaaagaccgtgagagcttacagagagtttatgggatatcttatcctgatcagaagcagctgaagaaatatctccaatttctagaagaagccaaaaagtatgaccacagactattgggccaaaagcaggaactcttctttagtcatcaactcagccctgggagttatttcttccttccactcggcactcgtgtatataacaggttgatggacttcattaagaaccaatactggcacaggggttacacagaggttattacaccaaatatgtacaacatggatttgtggcaaacatccggacatgctgacaattacaaggataatatgtttacgtttaatattgagaagcaagagttcgggctcaaacctatgaattgtcctggtcactgcttgatattccagcatagggttcgctcatatagagagttacctatgagactggccgactttggagtgttacaccgcaatgaggcaagtggagcacttagtggattgactcgtgtccgacggttccagcaggatgatgcacacatattctgtacaacagaacaggttaagggagaagtgcagggtgtgttggagttcattgactatgtgtacaaagttttcgggtttacctatgagctaaaactttcaacgaggccagagaagtaccttggagatttggaaacatgggataaagctgaagcggatctcaaagaagctatagaagcttttggaaagccattagtgttgaacgaaggagatggtgcattttatggtccaaagatagacatcacagtttctgatgcaatgaataggaaattccagtgtgctactttacagcttgattttcaacttccgattcgcttcaacttggaatatgcagctgaggatgaagcgaaaaagagtagacctgtaatgatacatagagccgtgttgggatctgtggaacgtatgtttgccatattgttggagcattacaaaggaaaatggcccttctggattagtccgcgacaggccatagtttgtcctatatcagagaaatctcagcaatatgcagaaaaggtacaaaagcaaattaaagatgctgggttctatgttgatgctgacttaacagacagaaagatagataaaaaggtgcgagaagctcagcttgctcagtacaactacattctggtcgtgggtgaaacagaagctgctacaggacaggtgagtgttcgtgtgagagacaatgcagcccactccgtgaagagcattgaggatttactggaagaattcaaggccaagactgccgaatttgtatgagatccgactcatgaaattcaagttctgatatgatgtgtttttttttttgttgcaaattagggtcgacccagatttaagtgtttatctctttcattaaaccatatttggcctcaactatattaaagtttcgattacattctgcgaaaactctatgtttggtccacttctagattcatattatggaag

SEQ ID NO: 48762 - protein, 709 aa, Arabidopsis thaliana
  peptide (1)..(709): Ceres Seq. ID no. 15175613
  misc_feature (335)..(488): Pfam Name: tRNA synthetase class II core domain (G, H, P, S and T) Pfam Description: tRNA synthetase class II core domain (G, H, P,
  misc_feature (49)..(702): Homolog of NCBI NO: 26334063 NR Description: unnamed protein product [Mus musculus]
  misc_feature (49)..(702): Homolog of NCBI NO: 34857177 NR Description: similar to RIKEN cDNA A530046H20 [Rattus
  misc_feature (40)..(709): Homolog of NCBI NO: 21428938 NR Description: GH20022p [Drosophila melanogaster]
  misc_feature (40)..(709): Homolog of NCBI NO: 24583839 NR Description: Threonyl-tRNA synthetase CG5353-PA [Drosophila
  misc_feature (39)..(709): Homolog of NCBI NO: 17532457 NR Description: threonyl tRNA Synthetase (84.4 kD) (trs-1)
  misc_feature (74)..(707): Homolog of NCBI NO: 20178337 NR Description: Threonyl-tRNA synthetase, cytoplasmic
  misc_feature (49)..(708): Homolog of NCBI NO: 31237885 NR Description: ENSANGP00000024346 [Anopheles gambiae]
  misc_feature (49)..(708): Homolog of NCBI NO: 31237882 NR Description: ENSANGP00000021424 [Anopheles gambiae]
  misc_feature (185)..(708): Homolog of NCBI NO: 20429011 NR Description: threonyl-tRNA synthetase [Oryza sativa (japonica
  misc_feature (30)..(708): Homolog of NCBI NO: 38175524 NR Description: putative threonyl-tRNA synthetase
MLLRLTARSIRRFTTSSSSLPFLSSSSYCTVSTMAANHPKDVAYLSAVIPKRIRLFEQIQANQLENLKSLPHDPIKVTLPDGNVKEGKKWETTPMDIAAQISKGLANSALISAVDDVLWDMNRPLEGDCKLELFKFDSDKGRDTLWHSSAHILGQALEQEYGCQLCIGPCTTRGEGFYYDGFYGELGLSDNHFSSIEAGAAKAAKEAQPFERIEVTKDQALEMFSENNFKVELINGLPADMTITVYRCGPLVDLCRGPHIPNTSFVKAFKCLRASSAYWKGDKDRESLQRVYGISYPDQKQLKKYLQFLEEAKKYDHRLLGQKQELFFSHQLSPGSYFFLPLGTRVYNRLMDFIKNQYWHRGYTEVITPNMYNMDLWQTSGHADNYKDNMFTFNIEKQEFGLKPMNCPGHCLIFQHRVRSYRELPMRLADFGVLHRNEASGALSGLTRVRRFQQDDAHIFCTTEQVKGEVQGVLEFIDYVYKVFGFTYELKLSTRPEKYLGDLETWDKAEADLKEAIEAFGKPLVLNEGDGAFYGPKIDITVSDAMNRKFQCATLQLDFQLPIRFNLEYAAEDEAKKSRPVMIHRAVLGSVERMFAILLEHYKGKWPFWISPRQAIVCPISEKSQQYAEKVQKQIKDAGFYVDADLTDRKIDKKVREAQLAQYNYILVVGETEAATGQVSVRVRDNAAHSVKSIEDLLEEFKAKTAEFV

SEQ ID NO: 48763 - protein, 676 aa, Arabidopsis thaliana
  peptide (1)..(676): Ceres Seq. ID no. 15175614
  misc_feature (302)..(455): Pfam Name: tRNA synthetase class II core domain (G, H, P, S and T) Pfam Description: tRNA synthetase class II core domain (G, H, P,
  misc_feature (16)..(669): Homolog of NCBI NO: 26334063 NR Description: unnamed protein product [Mus musculus]
  misc_feature (16)..(669): Homolog of NCBI NO: 34857177 NR Description: similar to RIKEN cDNA A530046H20 [Rattus
  misc_feature (7)..(676): Homolog of NCBI NO: 21428938 NR Description: GH20022p [Drosophila melanogaster]
  misc_feature (7)..(676): Homolog of NCBI NO: 24583839 NR Description: Threonyl-tRNA synthetase CG5353-PA [Drosophila
  misc_feature (6)..(676): Homolog of NCBI NO: 17532457 NR Description: threonyl tRNA Synthetase (84.4 kD) (trs-1)
  misc_feature (41)..(674): Homolog of NCBI NO: 20178337 NR Description: Threonyl-tRNA synthetase, cytoplasmic
  misc_feature (16)..(675): Homolog of NCBI NO: 31237885 NR Description: ENSANGP00000024346 [Anopheles gambiae]
  misc_feature (16)..(675): Homolog of NCBI NO: 31237882 NR Description: ENSANGP00000021424 [Anopheles gambiae]
  misc_feature (152)..(675): Homolog of NCBI NO: 20429011 NR Description: threonyl-tRNA synthetase [Oryza sativa (japonica
  misc_feature (1)..(675): Homolog of NCBI NO: 38175524 NR Description: putative threonyl-tRNA synthetase
MAANHPKDVAYLSAVIPKRIRLFEQIQANQLENLKSLPHDPIKVTLPDGNVKEGKKWETTPMDIAAQISKGLANSALISAVDDVLWDMNRPLEGDCKLELFKFDSDKGRDTLWHSSAHILGQALEQEYGCQLCIGPCTTRGEGFYYDGFYGELGLSDNHFSSIEAGAAKAAKEAQPFERIEVTKDQALEMFSENNFKVELINGLPADMTITVYRCGPLVDLCRGPHIPNTSFVKAFKCLRASSAYWKGDKDRESLQRVYGISYPDQKQLKKYLQFLEEAKKYDHRLLGQKQELFFSHQLSPGSYFFLPLGTRVYNRLMDFIKNQYWHRGYTEVITPNMYNMDLWQTSGHADNYKDNMFTFNIEKQEFGLKPMNCPGHCLIFQHRVRSYRELPMRLADFGVLHRNEASGALSGLTRVRRFQQDDAHIFCTTEQVKGEVQGVLEFIDYVYKVFGFTYELKLSTRPEKYLGDLETWDKAEADLKEAIEAFGKPLVLNEGDGAFYGPKIDITVSDAMNRKFQCATLQLDFQLPIRFNLEYAAEDEAKKSRPVMIHRAVLGSVERMFAILLEHYKGKWPFWISPRQAIVCPISEKSQQYAEKVQKQIKDAGFYVDADLTDRKIDKKVREAQLAQYNYILVVGETEAATGQVSVRVRDNAAHSVKSIEDLLEEFKAKTAEFV

SEQ ID NO: 48764 - protein, 615 aa, Arabidopsis thaliana
  peptide (1)..(615): Ceres Seq. ID no. 15175615
  misc_feature (241)..(394): Pfam Name: tRNA synthetase class II core domain (G, H, P, S and T) Pfam Description: tRNA synthetase class II core domain (G, H, P,
  misc_feature (1)..(608): Homolog of NCBI NO: 26334063 NR Description: unnamed protein product [Mus musculus]
  misc_feature (1)..(608): Homolog of NCBI NO: 34857177 NR Description: similar to RIKEN cDNA A530046H20 [Rattus
  misc_feature (1)..(615): Homolog of NCBI NO: 21428938 NR Description: GH20022p [Drosophila melanogaster]
  misc_feature (1)..(615): Homolog of NCBI NO: 24583839 NR Description: Threonyl-tRNA synthetase CG5353-PA [Drosophila
  misc_feature (1)..(615): Homolog of NCBI NO: 17532457 NR Description: threonyl tRNA Synthetase (84.4 kD) (trs-1)
  misc_feature (1)..(613): Homolog of NCBI NO: 20178337 NR Description: Threonyl-tRNA synthetase, cytoplasmic
  misc_feature (1)..(614): Homolog of NCBI NO: 31237885 NR Description: ENSANGP00000024346 [Anopheles gambiae]
  misc_feature (1)..(614): Homolog of NCBI NO: 31237882 NR Description: ENSANGP00000021424 [Anopheles gambiae]
  misc_feature (91)..(614): Homolog of NCBI NO: 20429011 NR Description: threonyl-tRNA synthetase [Oryza sativa (japonica
  misc_feature (1)..(614): Homolog of NCBI NO: 38175524 NR Description: putative threonyl-tRNA synthetase
MDIAAQISKGLANSALISAVDDVLWDMNRPLEGDCKLELFKFDSDKGRDTLWHSSAHILGQALEQEYGCQLCIGPCTTRGEGFYYDGFYGELGLSDNHFSSIEAGAAKAAKEAQPFERIEVTKDQALEMFSENNFKVELINGLPADMTITVYRCGPLVDLCRGPHIPNTSFVKAFKCLRASSAYWKGDKDRESLQRVYGISYPDQKQLKKYLQFLEEAKKYDHRLLGQKQELFFSHQLSPGSYFFLPLGTRVYNRLMDFIKNQYWHRGYTEVITPNMYNMDLWQTSGHADNYKDNMFTFNIEKQEFGLKPMNCPGHCLIFQHRVRSYRELPMRLADFGVLHRNEASGALSGLTRVRRFQQDDAHIFCTTEQVKGEVQGVLEFIDYVYKVFGFTYELKLSTRPEKYLGDLETWDKAEADLKEAIEAFGKPLVLNEGDGAFYGPKIDITVSDAMNRKFQCATLQLDFQLPIRFNLEYAAEDEAKKSRPVMIHRAVLGSVERMFAILLEHYKGKWPFWISPRQAIVCPISEKSQQYAEKVQKQIKDAGFYVDADLTDRKIDKKVREAQLAQYNYILVVGETEAATGQVSVRVRDNAAHSVKSIEDLLEEFKAKTAEFV

SEQ ID NO: 48765 - DNA, 2144 bp, Arabidopsis thaliana
  misc_feature (1)..(2144): Ceres Seq. ID no. 12600977
  misc_feature: MA Experiment ID: 20000171 Result: Down-regulated in Transcription
  misc_feature: MA Experiment 20000171 PARAMETER Experiment Name: At_42deg_Heat_P Parameter: Age (day) Value: 14
  misc_feature: MA Experiment 20000171 PARAMETER Experiment Name: At_42deg_Heat_P Parameter: Organism Value: A. thaliana
  misc_feature: MA Experiment 20000171 PARAMETER Experiment Name: At_42deg_Heat_P Parameter: Plant Line Value: WS
  misc_feature: MA Experiment 20000171 PARAMETER Experiment Name: At_42deg_Heat_P Parameter: Temperature (deg C) Value: 42 vs. 22
  misc_feature: MA Experiment 20000171 PARAMETER Experiment Name: At_42deg_Heat_P Parameter: Timepoint (hr) Value: 1
  misc_feature: MA Experiment 20000171 PARAMETER Experiment Name: At_42deg_Heat_P Parameter: Tissue Value: Aerial
  misc_feature: MA Experiment ID: 20000180 Result: Up-regulated in Transcription
  misc_feature: MA Experiment 20000180 PARAMETER Experiment Name: At_Germinating_Seeds_P Parameter: Age (hr) Value: 24 vs. 0
  misc_feature: MA Experiment 20000180 PARAMETER Experiment Name: At_Germinating_Seeds_P Parameter: Tissue Value: Germinating Seeds
  misc_feature: MA Experiment ID: 20000234 Result: Down-regulated in Transcription
  misc_feature: MA Experiment 20000234 PARAMETER Experiment Name: At_Siliques_P Parameter: Age (day) Value: 21
  misc_feature: MA Experiment 20000234 PARAMETER Experiment Name: At_Siliques_P Parameter: Organism Value: A. thaliana
  misc_feature: MA Experiment 20000234 PARAMETER Experiment Name: At_Siliques_P Parameter: Plant Line Value: WS
  misc_feature: MA Experiment 20000234 PARAMETER Experiment Name: At_Siliques_P Parameter: Tissue Value: Less Than 5mm Siliques vs. Whole Plant
  misc_feature: MA Experiment ID: 20001247 Result: Up-regulated in Transcription
  misc_feature: MA Experiment 20001247 PARAMETER Experiment Name: At_Far-red-induction_P Parameter: Age (day) Value: 7
  misc_feature: MA Experiment 20001247 PARAMETER Experiment Name: At_Far-red-induction_P Parameter: Light Value: Far-red vs. White
  misc_feature: MA Experiment 20001247 PARAMETER Experiment Name: At_Far-red-induction_P Parameter: Organism Value: A. thaliana
  misc_feature: MA Experiment 20001247 PARAMETER Experiment Name: At_Far-red-induction_P Parameter: Plant Line Value: Columbia
  misc_feature: MA Experiment 20001247 PARAMETER Experiment Name: At_Far-red-induction_P Parameter: Timepoint (hr) Value: 1
  misc_feature: MA Experiment 20001247 PARAMETER Experiment Name: At_Far-red-induction_P Parameter: Tissue Value: Whole Plant
  misc_feature: MA Experiment ID: 20001911 Result: Down-regulated in Transcription
  misc_feature: MA Experiment 20001911 PARAMETER Experiment Name: At_Drought_Reproduction_P Parameter: Age (day) Value: 40
  misc_feature: MA Experiment 20001911 PARAMETER Experiment Name: At_Drought_Reproduction_P Parameter: Organism Value: A. thaliana
  misc_feature: MA Experiment 20001911 PARAMETER Experiment Name: At_Drought_Reproduction_P Parameter: Plant Line Value: WS
  misc_feature: MA Experiment 20001911 PARAMETER Experiment Name: At_Drought_Reproduction_P Parameter: Timepoint (day) Value: 10
  misc_feature: MA Experiment 20001911 PARAMETER Experiment Name: At_Drought_Reproduction_P Parameter: Tissue Value: Flowers
  misc_feature: MA Experiment 20001911 PARAMETER Experiment Name: At_Drought_Reproduction_P Parameter: Treatment Value: Drought vs. No Drought
atgccaacgaagcaatagctatgaaaagctaaaccctttccttcttcttcttcttcttcttcttcttcgattgtttagattacttgggtttgacccaagtttgcttctttctatgattcatcaatctagatcttgctatctgggtccagaaacgattcacgcgcttcattcatgatataaagttactaccttttttttattttaccttctgggtcatggttttgtctgcttttcgtcttttgcttttgtctggatgattcataatctctcgagatctattatgttcacaagagttgttcttatgcgtggtgagatgatcttaggagtgtttcactatctttcttcaattcgggtttttagtttctgagatctgtttttgaagaatctgatctgagtttgaggaagtttgactaaatagatcgaagaagatgtttaagcagatacttgggaagcttcctaagaaaacttctgctaagttttgggataatggtgaatcccaaactctagataacaacaacaatcaaggaggaggtgatgaagttttaagccagagaacgtcatcaaatggagatactagtttggattgtgtttcttcttttgatgtattgccaaggttgagagatgtttccatctctgagaagcaagaactgtttcttaagaagcttagactatgttgtctagtgtttgattttgtagctgagcctcaacagaacttcaaggagaaagagatcaaaaggcaaacacttcttgaagttgtggattatgttatctcttcagggaatggcaagttccctgaatcagttattcaagaagctaccaagatgatttcggcgaatctctttagtaatcctcatcgacaatggaagaacaaaactcctgaggcattggatttggaagaagaagaaggatctttgaatccttcttggcctcacttgcagattgtttatgagttccttttgagaatcgttgcatctcccaacacagaccccaagatatccaagaaatacatcgatcatacattcgttctcaagctattggatttgtttgattctgaagatccgagggaaagagagtatctgaaaacgatacttcaccgcatctacgggaggtttatggttcatcgcccgttcatcaggaaaactatgaacaacatcttgtatgattttatattcgagacagggaaacactcgggaatcgccgagtttcttgaagttttaggatccatcatcaatggattcgctttaccactcaaggaagaacacaagctctttcttactcgtgtcttgattcctctgcacaagctgaaatgcttaccaaattaccatcaacagctttcttactgcgttatacagtttgttgagaaagattgtaagctcgcggataccgttattagagggatgttgaagtactggcctgttactaatagcgctaaagaaatcatgttcttgaatgaattggaggagatactagaagcaactcaattaacagagtttgaacggtgtatggttccgctctctcgccaaattgctcagtgcttgagcagttctcactttcaggtagcggaacgggctttatacttatggaacaacgatcatgtcactaatttagtgagacagaacagtagaatcattttacctatagtgtttcccgctttggagaaaaacggtagcagccattggaatcaggctgtgaagaacttgacagagaatgttctcaaggttttgtccgatacaaatcctgatttattcgaagaatgtttgcacaagttccaagaagatcagcaaaaagcagaagatactaaaaagaagaatggagaaacctggagacagctagaggagattgttgcttcaatggcgaagtaagagttttttctgcactttacgtgattcaacaagaaatcggtttattgttttgttttgtttcctttacgcctgaaaggtatatacatttactttgctttgcttgcttcatttaagtatctggtttcgactttaagactagtttaattcagttaaacagtgtgagattttacctttttcagttcttgatttgtctgtatacttggttcatgtaaacatcttgttatgaaaacacgaattttctattgtctgaagtcacttagtttatcagtgaaagagattgct

SEQ ID NO: 48766 - protein, 477 aa, Arabidopsis thaliana
  peptide (1)..(477): Ceres Seq. ID no. 12600978
  misc_feature (59)..(473): Pfam Name: Protein phosphatase 2A regulatory B subunit (B56 Pfam Description: Protein phosphatase 2A regulatory B subunit
  misc_feature (59)..(473): Pfam Name: Protein phosphatase 2A regulatory B subunit (B56 Pfam Description: Protein phosphatase 2A regulatory B subunit
  misc_feature (23)..(474): Homolog of NCBI NO: 15233119 NR Description: B regulatory subunit of PP2A, putative; protein
  misc_feature (33)..(476): Homolog of NCBI NO: 21530784 NR Description: putative protein phosphatase 2A B'zeta subunit
  misc_feature (23)..(474): Homolog of NCBI NO: 20147343 NR Description: AT4g15410/dl3750w [Arabidopsis thaliana]
  misc_feature (23)..(474): Homolog of NCBI NO: 18414444 NR Description: Expressed protein
  misc_feature (1)..(474): Homolog of NCBI NO: 11994401 NR Description: protein phosphatase 2A B' regulatory subunit
  misc_feature (23)..(474): Homolog of NCBI NO: 15233119 NR Description: B regulatory subunit of PP2A, putative; protein
  misc_feature (23)..(474): Homolog of NCBI NO: 20147343 NR Description: AT4g15410/dl3750w [Arabidopsis thaliana]
  misc_feature (1)..(474): Homolog of NCBI NO: 11994401 NR Description: protein phosphatase 2A B' regulatory subunit
  misc_feature (1)..(477): Homolog of NCBI NO: 15230962 NR Description: protein phosphatase 2A regulatory subunit isoform
  misc_feature (1)..(471): Homolog of NCBI NO: 21537284 NR Description: B regulatory subunit of protein phosphatase 2A,
  misc_feature (1)..(471): Homolog of NCBI NO: 15222851 NR Description: B regulatory subunit of protein phosphatase 2A,
  misc_feature (1)..(474): Homolog of NCBI NO: 7485149 NR Description: hypothetical protein - Arabidopsis thaliana
  misc_feature (30)..(471): Homolog of NCBI NO: 15230961 NR Description: putative B regulatory subunit of protein
  misc_feature (23)..(474): Homolog of NCBI NO: 18414444 NR Description: Expressed protein
  misc_feature (33)..(476): Homolog of NCBI NO: 21530784 NR Description: putative protein phosphatase 2A B'zeta subunit
  misc_feature (30)..(471): Homolog of NCBI NO: 15230961 NR Description: putative B regulatory subunit of protein
  misc_feature (1)..(474): Homolog of NCBI NO: 7485149 NR Description: hypothetical protein - Arabidopsis thaliana
  misc_feature (1)..(471): Homolog of NCBI NO: 15222851 NR Description: B regulatory subunit of protein phosphatase 2A,
  misc_feature (1)..(471): Homolog of NCBI NO: 21537284 NR Description: B regulatory subunit of protein phosphatase 2A,
  misc_feature (1)..(477): Homolog of NCBI NO: 15230962 NR Description: protein phosphatase 2A regulatory subunit isoform
MFKQILGKLPKKTSAKFWDNGESQTLDNNNNQGGGDEVLSQRTSSNGDTSLDCVSSFDVLPRLRDVSISEKQELFLKKLRLCCLVFDFVAEPQQNFKEKEIKRQTLLEVVDYVISSGNGKFPESVIQEATKMISANLFSNPHRQWKNKTPEALDLEEEEGSLNPSWPHLQIVYEFLLRIVASPNTDPKISKKYIDHTFVLKLLDLFDSEDPREREYLKTILHRIYGRFMVHRPFIRKTMNNILYDFIFETGKHSGIAEFLEVLGSIINGFALPLKEEHKLFLTRVLIPLHKLKCLPNYHQQLSYCVIQFVEKDCKLADTVIRGMLKYWPVTNSAKEIMFLNELEEILEATQLTEFERCMVPLSRQIAQCLSSSHFQVAERALYLWNNDHVTNLVRQNSRIILPIVFPALEKNGSSHWNQAVKNLTENVLKVLSDTNPDLFEECLHKFQEDQQKAEDTKKKNGETWRQLEEIVASMAK

SEQ ID NO: 48767 - protein, 346 aa, Arabidopsis thaliana
  peptide (1)..(346): Ceres Seq. ID no. 12600979
  misc_feature (1)..(342): Pfam Name: Protein phosphatase 2A regulatory B subunit (B56 Pfam Description: Protein phosphatase 2A regulatory B subunit
  misc_feature (1)..(342): Pfam Name: Protein phosphatase 2A regulatory B subunit (B56 Pfam Description: Protein phosphatase 2A regulatory B subunit
  misc_feature (1)..(343): Homolog of NCBI NO: 15233119 NR Description: B regulatory subunit of PP2A, putative; protein
  misc_feature (1)..(345): Homolog of NCBI NO: 21530784 NR Description: putative protein phosphatase 2A B'zeta subunit
  misc_feature (1)..(343): Homolog of NCBI NO: 20147343 NR Description: AT4g15410/dl3750w [Arabidopsis thaliana]
  misc_feature (1)..(343): Homolog of NCBI NO: 18414444 NR Description: Expressed protein
  misc_feature (1)..(343): Homolog of NCBI NO: 11994401 NR Description: protein phosphatase 2A B' regulatory subunit
  misc_feature (1)..(343): Homolog of NCBI NO: 15233119 NR Description: B regulatory subunit of PP2A, putative; protein
  misc_feature (1)..(343): Homolog of NCBI NO: 20147343 NR Description: AT4g15410/dl3750w [Arabidopsis thaliana]
  misc_feature (1)..(343): Homolog of NCBI NO: 11994401 NR Description: protein phosphatase 2A B' regulatory subunit
  misc_feature (1)..(346): Homolog of NCBI NO: 15230962 NR Description: protein phosphatase 2A regulatory subunit isoform
  misc_feature (1)..(340): Homolog of NCBI NO: 21537284 NR Description: B regulatory subunit of protein phosphatase 2A,
  misc_feature (1)..(340): Homolog of NCBI NO: 15222851 NR Description: B regulatory subunit of protein phosphatase 2A,
  misc_feature (1)..(343): Homolog of NCBI NO: 7485149 NR Description: hypothetical protein - Arabidopsis thaliana
  misc_feature (1)..(340): Homolog of NCBI NO: 15230961 NR Description: putative B regulatory subunit of protein
  misc_feature (1)..(343): Homolog of NCBI NO: 18414444 NR Description: Expressed protein
  misc_feature (1)..(345): Homolog of NCBI NO: 21530784 NR Description: putative protein phosphatase 2A B'zeta subunit
  misc_feature (1)..(340): Homolog of NCBI NO: 15230961 NR Description: putative B regulatory subunit of protein
  misc_feature (1)..(343): Homolog of NCBI NO: 7485149 NR Description: hypothetical protein - Arabidopsis thaliana
  misc_feature (1)..(340): Homolog of NCBI NO: 15222851 NR Description: B regulatory subunit of protein phosphatase 2A,
  misc_feature (1)..(340): Homolog of NCBI NO: 21537284 NR Description: B regulatory subunit of protein phosphatase 2A,
  misc_feature (1)..(346): Homolog of NCBI NO: 15230962 NR Description: protein phosphatase 2A regulatory subunit isoform
MISANLFSNPHRQWKNKTPEALDLEEEEGSLNPSWPHLQIVYEFLLRIVASPNTDPKISKKYIDHTFVLKLLDLFDSEDPREREYLKTILHRIYGRFMVHRPFIRKTMNNILYDFIFETGKHSGIAEFLEVLGSIINGFALPLKEEHKLFLTRVLIPLHKLKCLPNYHQQLSYCVIQFVEKDCKLADTVIRGMLKYWPVTNSAKEIMFLNELEEILEATQLTEFERCMVPLSRQIAQCLSSSHFQVAERALYLWNNDHVTNLVRQNSRIILPIVFPALEKNGSSHWNQAVKNLTENVLKVLSDTNPDLFEECLHKFQEDQQKAEDTKKKNGETWRQLEEIVASMAK

SEQ ID NO: 48768 - protein, 249 aa, Arabidopsis thaliana
  peptide (1)..(249): Ceres Seq. ID no. 12600980
  misc_feature (1)..(245): Pfam Name: Protein phosphatase 2A regulatory B subunit (B56 Pfam Description: Protein phosphatase 2A regulatory B subunit
  misc_feature (1)..(245): Pfam Name: Protein phosphatase 2A regulatory B subunit (B56 Pfam Description: Protein phosphatase 2A regulatory B subunit
  misc_feature (1)..(246): Homolog of NCBI NO: 15233119 NR Description: B regulatory subunit of PP2A, putative; protein
  misc_feature (1)..(248): Homolog of NCBI NO: 21530784 NR Description: putative protein phosphatase 2A B'zeta subunit
  misc_feature (1)..(246): Homolog of NCBI NO: 20147343 NR Description: AT4g15410/dl3750w [Arabidopsis thaliana]
  misc_feature (1)..(246): Homolog of NCBI NO: 18414444 NR Description: Expressed protein
  misc_feature (1)..(246): Homolog of NCBI NO: 11994401 NR Description: protein phosphatase 2A B' regulatory subunit
  misc_feature (1)..(246): Homolog of NCBI NO: 15233119 NR Description: B regulatory subunit of PP2A, putative; protein
  misc_feature (1)..(246): Homolog of NCBI NO: 20147343 NR Description: AT4g15410/dl3750w [Arabidopsis thaliana]
  misc_feature (1)..(246): Homolog of NCBI NO: 11994401 NR Description: protein phosphatase 2A B' regulatory subunit
  misc_feature (1)..(249): Homolog of NCBI NO: 15230962 NR Description: protein phosphatase 2A regulatory subunit isoform
  misc_feature (1)..(243): Homolog of NCBI NO: 21537284 NR Description: B regulatory subunit of protein phosphatase 2A,
  misc_feature (1)..(243): Homolog of NCBI NO: 15222851 NR Description: B regulatory subunit of protein phosphatase 2A,
  misc_feature (1)..(246): Homolog of NCBI NO: 7485149 NR Description: hypothetical protein - Arabidopsis thaliana
  misc_feature (1)..(243): Homolog of NCBI NO: 15230961 NR Description: putative B regulatory subunit of protein
  misc_feature (1)..(246): Homolog of NCBI NO: 18414444 NR Description: Expressed protein
  misc_feature (1)..(248): Homolog of NCBI NO: 21530784 NR Description: putative protein phosphatase 2A B'zeta subunit
  misc_feature (1)..(243): Homolog of NCBI NO: 15230961 NR Description: putative B regulatory subunit of protein
  misc_feature (1)..(246): Homolog of NCBI NO: 7485149 NR Description: hypothetical protein - Arabidopsis thaliana
  misc_feature (1)..(243): Homolog of NCBI NO: 15222851 NR Description: B regulatory subunit of protein phosphatase 2A,
  misc_feature (1)..(243): Homolog of NCBI NO: 21537284 NR Description: B regulatory subunit of protein phosphatase 2A,
  misc_feature (1)..(249): Homolog of NCBI NO: 15230962 NR Description: protein phosphatase 2A regulatory subunit isoform
MVHRPFIRKTMNNILYDFIFETGKHSGIAEFLEVLGSIINGFALPLKEEHKLFLTRVLIPLHKLKCLPNYHQQLSYCVIQFVEKDCKLADTVIRGMLKYWPVTNSAKEIMFLNELEEILEATQLTEFERCMVPLSRQIAQCLSSSHFQVAERALYLWNNDHVTNLVRQNSRIILPIVFPALEKNGSSHWNQAVKNLTENVLKVLSDTNPDLFEECLHKFQEDQQKAEDTKKKNGETWRQLEEIVASMAK

SEQ ID NO: 48769 - DNA, 2034 bp, Arabidopsis thaliana; identical to SEQ ID NO: 44355
  misc_feature (1)..(2034): Ceres Seq. ID no. 13509639
  misc_feature: MA Experiment ID: 108434 Result: Up-regulated in Transcription
  misc_feature: MA Experiment 108434 PARAMETER Experiment Name: At_Root_Tips_cDNA_P Parameter: Tissue Value: Root Tips
  misc_feature: MA Experiment ID: 108462 Result: Down-regulated in Transcription
  misc_feature: MA Experiment 108462 PARAMETER Experiment Name: At_Germinating_Seeds_cDNA_P Parameter: Age (day) Value: 2 vs. 0
  misc_feature: MA Experiment 108462 PARAMETER Experiment Name: At_Germinating_Seeds_cDNA_P Parameter: Tissue Value: Germinating Seeds
  misc_feature: MA Experiment ID: 108463 Result: Down-regulated in Transcription
  misc_feature: MA Experiment 108463 PARAMETER Experiment Name: At_Germinating_Seeds_cDNA_P Parameter: Age (day) Value: 3 vs. 0
  misc_feature: MA Experiment 108463 PARAMETER Experiment Name: At_Germinating_Seeds_cDNA_P Parameter: Tissue Value: Germinating Seeds
  misc_feature: MA Experiment ID: 108464 Result: Down-regulated in Transcription
  misc_feature: MA Experiment 108464 PARAMETER Experiment Name: At_Germinating_Seeds_cDNA_P Parameter: Age (day) Value: 4 vs. 0
  misc_feature: MA Experiment 108464 PARAMETER Experiment Name: At_Germinating_Seeds_cDNA_P Parameter: Tissue Value: Germinating Seeds
  misc_feature: MA Experiment ID: 108489 Result: Up-regulated in Transcription
  misc_feature: MA Experiment ID: 108561 Result: Down-regulated in Transcription
  misc_feature: MA Experiment 108561 PARAMETER Experiment Name: At_100uM_ABA_cDNA_P Parameter: Timepoint (hr) Value: 6
  misc_feature: MA Experiment 108561 PARAMETER Experiment Name: At_100uM_ABA_cDNA_P Parameter: Tissue Value: Aerial
  misc_feature: MA Experiment 108561 PARAMETER Experiment Name: At_100uM_ABA_cDNA_P Parameter: Treatment Value: 100uM ABA vs. No Treatment
  misc_feature: MA Experiment ID: 108573 Result: Down-regulated in Transcription
  misc_feature: MA Experiment 108573 PARAMETER Experiment Name: At_Drought_cDNA_P Parameter: Timepoint (hr) Value: 6
  misc_feature: MA Experiment 108573 PARAMETER Experiment Name: At_Drought_cDNA_P Parameter: Tissue Value: Aerial
  misc_feature: MA Experiment 108573 PARAMETER Experiment Name: At_Drought_cDNA_P Parameter: Treatment Value: Drought vs. No Drought
  misc_feature: MA Experiment ID: 108595 Result: Down-regulated in Transcription
  misc_feature: MA Experiment 108595 PARAMETER Experiment Name: At_Ler-pi_Ovule_cDNA_P Parameter: Plant Line Value: null
  misc_feature: MA Experiment ID: 108605 Result: Down-regulated in Transcription
  misc_feature: MA Experiment 108605 PARAMETER Experiment Name: At_100uM_ABA_cDNA_P Parameter: Timepoint (hr) Value: 6
  misc_feature: MA Experiment 108605 PARAMETER Experiment Name: At_100uM_ABA_cDNA_P Parameter: Tissue Value: Aerial
  misc_feature: MA Experiment 108605 PARAMETER Experiment Name: At_100uM_ABA_cDNA_P Parameter: Treatment Value: 100uM ABA vs. No Treatment
  misc_feature: MA Experiment ID: 108609 Result: Down-regulated in Transcription
  misc_feature: MA Experiment 108609 PARAMETER Experiment Name: At_100uM_ABA_cDNA_P Parameter: Timepoint (hr) Value: 24
  misc_feature: MA Experiment 108609 PARAMETER Experiment Name: At_100uM_ABA_cDNA_P Parameter: Tissue Value: Aerial
  misc_feature: MA Experiment 108609 PARAMETER Experiment Name: At_100uM_ABA_cDNA_P Parameter: Treatment Value: 100uM ABA vs. No Treatment
  misc_feature: MA Experiment ID: 20000069 Result: Down-regulated in Transcription
  misc_feature: MA Experiment 20000069 PARAMETER Experiment Name: At_100uM_ABA_Mutants_cDNA_P Parameter: Plant Line Value: CS23
  misc_feature: MA Experiment 20000069 PARAMETER Experiment Name: At_100uM_ABA_Mutants_cDNA_P Parameter: Timepoint (hr) Value: 6
  misc_feature: MA Experiment 20000069 PARAMETER Experiment Name: At_100uM_ABA_Mutants_cDNA_P Parameter: Tissue Value: Aerial
  misc_feature: MA Experiment 20000069 PARAMETER Experiment Name: At_100uM_ABA_Mutants_cDNA_P Parameter: Treatment Value: 100uM ABA vs. No Treatment
  misc_feature: MA Experiment ID: 20000070 Result: Down-regulated in Transcription
  misc_feature: MA Experiment 20000070 PARAMETER Experiment Name: At_100uM_ABA_Mutants_cDNA_P Parameter: Plant Line Value: CS24
  misc_feature: MA Experiment 20000070 PARAMETER Experiment Name: At_100uM_ABA_Mutants_cDNA_P Parameter: Timepoint (hr) Value: 6
  misc_feature: MA Experiment 20000070 PARAMETER Experiment Name: At_100uM_ABA_Mutants_cDNA_P Parameter: Tissue Value: Aerial
  misc_feature: MA Experiment 20000070 PARAMETER Experiment Name: At_100uM_ABA_Mutants_cDNA_P Parameter: Treatment Value: 100uM ABA vs. No Treatment
  misc_feature: MA Experiment ID: 20000071 Result: Down-regulated in Transcription
  misc_feature: MA Experiment 20000071 PARAMETER Experiment Name: At_100uM_ABA_Mutants_cDNA_P Parameter: Plant Line Value: CS8104
  misc_feature: MA Experiment 20000071 PARAMETER Experiment Name: At_100uM_ABA_Mutants_cDNA_P Parameter: Timepoint (hr) Value: 6
  misc_feature: MA Experiment 20000071 PARAMETER Experiment Name: At_100uM_ABA_Mutants_cDNA_P Parameter: Tissue Value: Aerial
  misc_feature: MA Experiment 20000071 PARAMETER Experiment Name: At_100uM_ABA_Mutants_cDNA_P Parameter: Treatment Value: 100uM ABA vs. No Treatment
  misc_feature: MA Experiment ID: 20000087 Result: Down-regulated in Transcription
  misc_feature: MA Experiment 20000087 PARAMETER Experiment Name: At_100uM_ABA_Mutants_cDNA_P Parameter: Plant Line Value: WS
  misc_feature: MA Experiment 20000087 PARAMETER Experiment Name: At_100uM_ABA_Mutants_cDNA_P Parameter: Timepoint (hr) Value: 6
  misc_feature: MA Experiment 20000087 PARAMETER Experiment Name: At_100uM_ABA_Mutants_cDNA_P Parameter: Tissue Value: Aerial
  misc_feature: MA Experiment 20000087 PARAMETER Experiment Name: At_100uM_ABA_Mutants_cDNA_P Parameter: Treatment Value: 100uM ABA vs. No Treatment
  misc_feature: MA Experiment ID: 20000093 Result: Up-regulated in Transcription
  misc_feature: MA Experiment 20000093 PARAMETER Experiment Name: At_42deg_Heat_cDNA_P Parameter: Temperature (deg C) Value: 42 vs. 22
  misc_feature: MA Experiment 20000093 PARAMETER Experiment Name: At_42deg_Heat_cDNA_P Parameter: Timepoint (hr) Value: 0.5
  misc_feature: MA Experiment 20000093 PARAMETER Experiment Name: At_42deg_Heat_cDNA_P Parameter: Tissue Value: Aerial
  misc_feature: MA Experiment ID: 20000117 Result: Down-regulated in Transcription
  misc_feature: MA Experiment 20000117 PARAMETER Experiment Name: At_100uM_ABA_Mutants_cDNA_P Parameter: Plant Line Value: Columbia
  misc_feature: MA Experiment 20000117 PARAMETER Experiment Name: At_100uM_ABA_Mutants_cDNA_P Parameter: Timepoint (hr) Value: 6
  misc_feature: MA Experiment 20000117 PARAMETER Experiment Name: At_100uM_ABA_Mutants_cDNA_P Parameter: Tissue Value: Aerial
  misc_feature: MA Experiment 20000117 PARAMETER Experiment Name: At_100uM_ABA_Mutants_cDNA_P Parameter: Treatment Value: 100uM ABA vs. No Treatment
  misc_feature: MA Experiment ID: 20000169 Result: Down-regulated in Transcription
  misc_feature: MA Experiment 20000169 PARAMETER Experiment Name: At_100uM_ABA_P Parameter: Age (day) Value: 14
  misc_feature: MA Experiment 20000169 PARAMETER Experiment Name: At_100uM_ABA_P Parameter: Organism Value: A. thaliana
  misc_feature: MA Experiment 20000169 PARAMETER Experiment Name: At_100uM_ABA_P Parameter: Plant Line Value: WS
  misc_feature: MA Experiment 20000169 PARAMETER Experiment Name: At_100uM_ABA_P Parameter: Timepoint (hr) Value: 6
  misc_feature: MA Experiment 20000169 PARAMETER Experiment Name: At_100uM_ABA_P Parameter: Tissue Value: Aerial
  misc_feature: MA Experiment 20000169 PARAMETER Experiment Name: At_100uM_ABA_P Parameter: Treatment Value: 100uM ABA vs. No Treatment
  misc_feature: MA Experiment ID: 20000185 Result: Down-regulated in Transcription
  misc_feature: MA Experiment 20000185 PARAMETER Experiment Name: At_Roots__P Parameter: Age (day) Value: 7 vs. 21
  misc_feature: MA Experiment 20000185 PARAMETER Experiment Name: At_Roots__P Parameter: Organism Value: A. thaliana
  misc_feature: MA Experiment 20000185 PARAMETER Experiment Name: At_Roots__P Parameter: Tissue Value: Roots vs. Whole Plant
  misc_feature: MA Experiment ID: 20000224 Result: Up-regulated in Transcription
  misc_feature: MA Experiment ID: 20000234 Result: Up-regulated in Transcription
  misc_feature: MA Experiment 20000234 PARAMETER Experiment Name: At_Siliques_P Parameter: Age (day) Value: 21
  misc_feature: MA Experiment 20000234 PARAMETER Experiment Name: At_Siliques_P Parameter: Organism Value: A. thaliana
  misc_feature: MA Experiment 20000234 PARAMETER Experiment Name: At_Siliques_P Parameter: Plant Line Value: WS
  misc_feature: MA Experiment 20000234 PARAMETER Experiment Name: At_Siliques_P Parameter: Tissue Value: Less Than 5mm Siliques vs. Whole Plant
  misc_feature: MA Experiment ID: 20000436 Result: Down-regulated in Transcription
  misc_feature: MA Experiment 20000436 PARAMETER Experiment Name: At_Drought_P Parameter: Age (day) Value: 7
  misc_feature: MA Experiment 20000436 PARAMETER Experiment Name: At_Drought_P Parameter: Organism Value: A. thaliana
  misc_feature: MA Experiment 20000436 PARAMETER Experiment Name: At_Drought_P Parameter: Plant Line Value: WS
  misc_feature: MA Experiment 20000436 PARAMETER Experiment Name: At_Drought_P Parameter: Timepoint (hr) Value: 12
  misc_feature: MA Experiment 20000436 PARAMETER Experiment Name: At_Drought_P Parameter: Tissue Value: Whole Plant
  misc_feature: MA Experiment 20000436 PARAMETER Experiment Name: At_Drought_P Parameter: Treatment Value: Drought vs. No Drought
  misc_feature: MA Experiment ID: 20000437 Result: Down-regulated in Transcription
  misc_feature: MA Experiment 20000437 PARAMETER Experiment Name: At_Drought_P Parameter: Age (day) Value: 8
  misc_feature: MA Experiment 20000437 PARAMETER Experiment Name: At_Drought_P Parameter: Organism Value: A. thaliana
  misc_feature: MA Experiment 20000437 PARAMETER Experiment Name: At_Drought_P Parameter: Plant Line Value: WS
  misc_feature: MA Experiment 20000437 PARAMETER Experiment Name: At_Drought_P Parameter: Timepoint (hr) Value: 24
  misc_feature: MA Experiment 20000437 PARAMETER Experiment Name: At_Drought_P Parameter: Tissue Value: Whole Plant
  misc_feature: MA Experiment 20000437 PARAMETER Experiment Name: At_Drought_P Parameter: Treatment Value: Drought vs. No Drought
  misc_feature: MA Experiment ID: 20000439 Result: Down-regulated in Transcription
  misc_feature: MA Experiment 20000439 PARAMETER Experiment Name: At_Roots__P Parameter: Age (day) Value: 14 vs. 21
  misc_feature: MA Experiment 20000439 PARAMETER Experiment Name: At_Roots__P Parameter: Organism Value: A. thaliana
  misc_feature: MA Experiment 20000439 PARAMETER Experiment Name: At_Roots__P Parameter: Tissue Value: Roots vs. Whole Plant
  misc_feature: MA Experiment ID: 20000453 Result: Down-regulated in Transcription
  misc_feature: MA Experiment 20000453 PARAMETER Experiment Name: At_100uM_ABA_P Parameter: Age (day) Value: 15
  misc_feature: MA Experiment 20000453 PARAMETER Experiment Name: At_100uM_ABA_P Parameter: Organism Value: A. thaliana
  misc_feature: MA Experiment 20000453 PARAMETER Experiment Name: At_100uM_ABA_P Parameter: Plant Line Value: WS
  misc_feature: MA Experiment 20000453 PARAMETER Experiment Name: At_100uM_ABA_P Parameter: Timepoint (hr) Value: 24
  misc_feature: MA Experiment 20000453 PARAMETER Experiment Name: At_100uM_ABA_P Parameter: Tissue Value: Aerial
  misc_feature: MA Experiment 20000453 PARAMETER Experiment Name: At_100uM_ABA_P Parameter: Treatment Value: 100uM ABA vs. No Treatment
  misc_feature: MA Experiment ID: 20000794 Result: Down-regulated in Transcription
  misc_feature: MA Experiment 20000794 PARAMETER Experiment Name: At_Petals_P Parameter: Age (day) Value: 23-25 days
  misc_feature: MA Experiment 20000794 PARAMETER Experiment Name: At_Petals_P Parameter: Plant Line Value: WS
  misc_feature: MA Experiment 20000794 PARAMETER Experiment Name: At_Petals_P Parameter: Tissue Value: Petals vs. Whole plant
  misc_feature: MA Experiment ID: 20001450 Result: Down-regulated in Transcription
  misc_feature: MA Experiment 20001450 PARAMETER Experiment Name: At_Far-red-induction_P Parameter: Age (day) Value: 7
  misc_feature: MA Experiment 20001450 PARAMETER Experiment Name: At_Far-red-induction_P Parameter: Light Value: Far-red vs. White
  misc_feature: MA Experiment 20001450 PARAMETER Experiment Name: At_Far-red-induction_P Parameter: Organism Value: A. thaliana
  misc_feature: MA Experiment 20001450 PARAMETER Experiment Name: At_Far-red-induction_P Parameter: Plant Line Value: Columbia
  misc_feature: MA Experiment 20001450 PARAMETER Experiment Name: At_Far-red-induction_P Parameter: Timepoint (hr) Value: 8
  misc_feature: MA Experiment 20001450 PARAMETER Experiment Name: At_Far-red-induction_P Parameter: Tissue Value: Whole Plant
  misc_feature: MA Experiment ID: 20001451 Result: Down-regulated in Transcription
  misc_feature: MA Experiment 20001451 PARAMETER Experiment Name: At_Far-red-induction_P Parameter: Age (day) Value: 7
  misc_feature: MA Experiment 20001451 PARAMETER Experiment Name: At_Far-red-induction_P Parameter: Light Value: Far-red vs. White
  misc_feature: MA Experiment 20001451 PARAMETER Experiment Name: At_Far-red-induction_P Parameter: Organism Value: A. thaliana
  misc_feature: MA Experiment 20001451 PARAMETER Experiment Name: At_Far-red-induction_P Parameter: Plant Line Value: Columbia
  misc_feature: MA Experiment 20001451 PARAMETER Experiment Name: At_Far-red-induction_P Parameter: Timepoint (hr) Value: 24
  misc_feature: MA Experiment 20001451 PARAMETER Experiment Name: At_Far-red-induction_P Parameter: Tissue Value: Whole Plant
  misc_feature: MA Experiment ID: 20001458 Result: Up-regulated in Transcription
  misc_feature: MA Experiment 20001458 PARAMETER Experiment Name: At_50mM_NH4NO3_L-to-H_P Parameter: Age (day) Value: Undefined
  misc_feature: MA Experiment 20001458 PARAMETER Experiment Name: At_50mM_NH4NO3_L-to-H_P Parameter: Organism Value: Undefined
  misc_feature: MA Experiment 20001458 PARAMETER Experiment Name: At_50mM_NH4NO3_L-to-H_P Parameter: Plant Line Value: Undefined
  misc_feature: MA Experiment 20001458 PARAMETER Experiment Name: At_50mM_NH4NO3_L-to-H_P Parameter: Timepoint (hr) Value: 2
  misc_feature: MA Experiment 20001458 PARAMETER Experiment Name: At_50mM_NH4NO3_L-to-H_P Parameter: Tissue Value: Siliques
  misc_feature: MA Experiment 20001458 PARAMETER Experiment Name: At_50mM_NH4NO3_L-to-H_P Parameter: Treatment Value: 50mM NH4NO3 vs. 100mM Manitol
  misc_feature: MA Experiment ID: 20001556 Result: Up-regulated in Transcription
  misc_feature: MA Experiment 20001556 PARAMETER Experiment Name: At_Drought_Soil_Dry_P Parameter: Age (day) Value: 26
  misc_feature: MA Experiment 20001556 PARAMETER Experiment Name: At_Drought_Soil_Dry_P Parameter: Organism Value: A. thaliana
  misc_feature: MA Experiment 20001556 PARAMETER Experiment Name: At_Drought_Soil_Dry_P Parameter: Plant Line Value: WS
  misc_feature: MA Experiment 20001556 PARAMETER Experiment Name: At_Drought_Soil_Dry_P Parameter: Post Timepoint (hr) Value: None
  misc_feature: MA Experiment 20001556 PARAMETER Experiment Name: At_Drought_Soil_Dry_P Parameter: Post-Treatment Value: None
  misc_feature: MA Experiment 20001556 PARAMETER Experiment Name: At_Drought_Soil_Dry_P Parameter: Timepoint (day) Value: 12
  misc_feature: MA Experiment 20001556 PARAMETER Experiment Name: At_Drought_Soil_Dry_P Parameter: Treatment Value: Drought vs. No Drought
  misc_feature: MA Experiment ID: 20001558 Result: Up-regulated in Transcription
  misc_feature: MA Experiment 20001558 PARAMETER Experiment Name: At_Drought_Soil_Dry_P Parameter: Age (day) Value: 27
  misc_feature: MA Experiment 20001558 PARAMETER Experiment Name: At_Drought_Soil_Dry_P Parameter: Organism Value: A. thaliana
  misc_feature: MA Experiment 20001558 PARAMETER Experiment Name: At_Drought_Soil_Dry_P Parameter: Plant Line Value: WS
  misc_feature: MA Experiment 20001558 PARAMETER Experiment Name: At_Drought_Soil_Dry_P Parameter: Post Timepoint (hr) Value: 6
  misc_feature: MA Experiment 20001558 PARAMETER Experiment Name: At_Drought_Soil_Dry_P Parameter: Post-Treatment Value: Re-Water vs. No Drought
  misc_feature: MA Experiment 20001558 PARAMETER Experiment Name: At_Drought_Soil_Dry_P Parameter: Timepoint (day) Value: 13
  misc_feature: MA Experiment 20001558 PARAMETER Experiment Name: At_Drought_Soil_Dry_P Parameter: Treatment Value: Drought vs. No Drought
  misc_feature: MA Experiment ID: 20001757 Result: Up-regulated in Transcription
  misc_feature: MA Experiment 20001757 PARAMETER Experiment Name: At_50mM_NH4NO3_L-to-H_P Parameter: Timepoint (hr) Value: 6
  misc_feature: MA Experiment 20001757 PARAMETER Experiment Name: At_50mM_NH4NO3_L-to-H_P Parameter: Tissue Value: Leaf
  misc_feature: MA Experiment 20001757 PARAMETER Experiment Name: At_50mM_NH4NO3_L-to-H_P Parameter: Treatment Value: 50mM NH4NO3 vs 100mM Mannitol
  misc_feature: MA Experiment ID: 20001905 Result: Down-regulated in Transcription
  misc_feature: MA Experiment 20001905 PARAMETER Experiment Name: At_Drought_Reproduction_P Parameter: Age (day) Value: 40
  misc_feature: MA Experiment 20001905 PARAMETER Experiment Name: At_Drought_Reproduction_P Parameter: Organism Value: A. thaliana
  misc_feature: MA Experiment 20001905 PARAMETER Experiment Name: At_Drought_Reproduction_P Parameter: Plant Line Value: WS
  misc_feature: MA Experiment 20001905 PARAMETER Experiment Name: At_Drought_Reproduction_P Parameter: Timepoint (day) Value: 10
  misc_feature: MA Experiment 20001905 PARAMETER Experiment Name: At_Drought_Reproduction_P Parameter: Tissue Value: Rosettes
  misc_feature: MA Experiment 20001905 PARAMETER Experiment Name: At_Drought_Reproduction_P Parameter: Treatment Value: Drought vs. No Drought
  misc_feature: MA Experiment ID: 20001906 Result: Down-regulated in Transcription
  misc_feature: MA Experiment 20001906 PARAMETER Experiment Name: At_Drought_Reproduction_P Parameter: Age (day) Value: 35
  misc_feature: MA Experiment 20001906 PARAMETER Experiment Name: At_Drought_Reproduction_P Parameter: Organism Value: A. thaliana
  misc_feature: MA Experiment 20001906 PARAMETER Experiment Name: At_Drought_Reproduction_P Parameter: Plant Line Value: WS
  misc_feature: MA Experiment 20001906 PARAMETER Experiment Name: At_Drought_Reproduction_P Parameter: Timepoint (day) Value: 5
  misc_feature: MA Experiment 20001906 PARAMETER Experiment Name: At_Drought_Reproduction_P Parameter: Tissue Value: Siliques
  misc_feature: MA Experiment 20001906 PARAMETER Experiment Name: At_Drought_Reproduction_P Parameter: Treatment Value: Drought vs. No Drought

SEQ ID NO: 48770 - protein, 634 aa, Arabidopsis thaliana; identical to SEQ ID NO: 44356
  peptide (1)..(634): Ceres Seq. ID no. 13509640
  misc_feature (89)..(626): Homolog of NCBI NO: 15222666 NR Description: chaperonin, putative [Arabidopsis thaliana]
  misc_feature (136)..(634): Homolog of NCBI NO: 2493650 NR Description: RUBISCO SUBUNIT BINDING-PROTEIN BETA SUBUNIT (60
  misc_feature (35)..(633): Homolog of NCBI NO: 2506277 NR Description: RuBisCO subunit binding-protein beta subunit,
  misc_feature (35)..(634): Homolog of NCBI NO: 34897924 NR Description: ESTs C99033(E4350),C99032(E4350),D46006(S10372), correspond to a region of the predicted gene.~Similar to
  misc_feature (35)..(634): Homolog of NCBI NO: 7443855 NR Description: probable chaperonin 60 beta chain precursor,
  misc_feature (35)..(634): Homolog of NCBI NO: 30696748 NR Description: chaperonin, putative [Arabidopsis thaliana]
  misc_feature (35)..(634): Homolog of NCBI NO: 15231255 NR Description: chaperonin, putative [Arabidopsis thaliana]
  misc_feature (35)..(622): Homolog of NCBI NO: 134104 NR Description: RuBisCO subunit binding-protein beta subunit,
  misc_feature (35)..(634): Homolog of NCBI NO: 81601 NR Description: chaperonin 60 beta precursor - Arabidopsis
  misc_feature (35)..(634): Homolog of NCBI NO: 15222729 NR Description: RuBisCo subunit binding-protein beta subunit/60
  misc_feature (89)..(626): Homolog of NCBI NO: 15222666 NR Description: chaperonin, putative [Arabidopsis thaliana]
  misc_feature (136)..(634): Homolog of NCBI NO: 2493650 NR Description: RUBISCO SUBUNIT BINDING-PROTEIN BETA SUBUNIT (60
  misc_feature (35)..(633): Homolog of NCBI NO: 2506277 NR Description: RuBisCO subunit binding-protein beta subunit,
  misc_feature (35)..(634): Homolog of NCBI NO: 34897924 NR Description: ESTs C99033(E4350),C99032(E4350),D46006(S10372), correspond to a region of the predicted gene.~Similar to
  misc_feature (35)..(634): Homolog of NCBI NO: 7443855 NR Description: probable chaperonin 60 beta chain precursor,
  misc_feature (35)..(634): Homolog of NCBI NO: 30696748 NR Description: chaperonin, putative [Arabidopsis thaliana]
  misc_feature (35)..(634): Homolog of NCBI NO: 15231255 NR Description: chaperonin, putative [Arabidopsis thaliana]
  misc_feature (35)..(622): Homolog of NCBI NO: 134104 NR Description: RuBisCO subunit binding-protein beta subunit,
  misc_feature (35)..(634): Homolog of NCBI NO: 81601 NR Description: chaperonin 60 beta precursor - Arabidopsis
  misc_feature (35)..(634): Homolog of NCBI NO: 15222729 NR Description: RuBisCo subunit binding-protein beta subunit/60

SEQ ID NO: 48771 - protein, 600 aa, Arabidopsis thaliana; identical to SEQ ID NO: 44357
  peptide (1)..(600): Ceres Seq. ID no. 13509641
  misc_feature (55)..(592): Homolog of NCBI NO: 15222666 NR Description: chaperonin, putative [Arabidopsis thaliana]
  misc_feature (102)..(600): Homolog of NCBI NO: 2493650 NR Description: RUBISCO SUBUNIT BINDING-PROTEIN BETA SUBUNIT (60
  misc_feature (1)..(599): Homolog of NCBI NO: 2506277 NR Description: RuBisCO subunit binding-protein beta subunit,
  misc_feature (1)..(600): Homolog of NCBI NO: 34897924 NR Description: ESTs C99033(E4350),C99032(E4350),D46006(S10372), correspond to a region of the predicted gene.~Similar to
  misc_feature (1)..(600): Homolog of NCBI NO: 7443855 NR Description: probable chaperonin 60 beta chain precursor,
  misc_feature (1)..(600): Homolog of NCBI NO: 30696748 NR Description: chaperonin, putative [Arabidopsis thaliana]
  misc_feature (1)..(600): Homolog of NCBI NO: 15231255 NR Description: chaperonin, putative [Arabidopsis thaliana]
  misc_feature (1)..(588): Homolog of NCBI NO: 134104 NR Description: RuBisCO subunit binding-protein beta subunit,
  misc_feature (1)..(600): Homolog of NCBI NO: 81601 NR Description: chaperonin 60 beta precursor - Arabidopsis
  misc_feature (1)..(600): Homolog of NCBI NO: 15222729 NR Description: RuBisCo subunit binding-protein beta subunit/60
  misc_feature (55)..(592): Homolog of NCBI NO: 15222666 NR Description: chaperonin, putative [Arabidopsis thaliana]
  misc_feature (102)..(600): Homolog of NCBI NO: 2493650 NR Description: RUBISCO SUBUNIT BINDING-PROTEIN BETA SUBUNIT (60
  misc_feature (1)..(599): Homolog of NCBI NO: 2506277 NR Description: RuBisCO subunit binding-protein beta subunit,
  misc_feature (1)..(600): Homolog of NCBI NO: 34897924 NR Description: ESTs C99033(E4350),C99032(E4350),D46006(S10372), correspond to a region of the predicted gene.~Similar to
  misc_feature (1)..(600): Homolog of NCBI NO: 7443855 NR Description: probable chaperonin 60 beta chain precursor,
  misc_feature (1)..(600): Homolog of NCBI NO: 30696748 NR Description: chaperonin, putative [Arabidopsis thaliana]
  misc_feature (1)..(600): Homolog of NCBI NO: 15231255 NR Description: chaperonin, putative [Arabidopsis thaliana]
  misc_feature (1)..(588): Homolog of NCBI NO: 134104 NR Description: RuBisCO subunit binding-protein beta subunit,
  misc_feature (1)..(600): Homolog of NCBI NO: 81601 NR Description: chaperonin 60 beta precursor - Arabidopsis
  misc_feature (1)..(600): Homolog of NCBI NO: 15222729 NR Description: RuBisCo subunit binding-protein beta subunit/60

SEQ ID NO: 48772 - protein, 587 aa, Arabidopsis thaliana; identical to SEQ ID NO: 44358
  peptide (1)..(587): Ceres Seq. ID no. 13509642
  misc_feature (42)..(579): Homolog of NCBI NO: 15222666 NR Description: chaperonin, putative [Arabidopsis thaliana]
  misc_feature (89)..(587): Homolog of NCBI NO: 2493650 NR Description: RUBISCO SUBUNIT BINDING-PROTEIN BETA SUBUNIT (60
  misc_feature (1)..(586): Homolog of NCBI NO: 2506277 NR Description: RuBisCO subunit binding-protein beta subunit,
  misc_feature (1)..(587): Homolog of NCBI NO: 34897924 NR Description: ESTs C99033(E4350),C99032(E4350),D46006(S10372), correspond to a region of the predicted gene.~Similar to
  misc_feature (1)..(587): Homolog of NCBI NO: 7443855 NR Description: probable chaperonin 60 beta chain precursor,
  misc_feature (1)..(587): Homolog of NCBI NO: 30696748 NR Description: chaperonin, putative [Arabidopsis thaliana]
  misc_feature (1)..(587): Homolog of NCBI NO: 15231255 NR Description: chaperonin, putative [Arabidopsis thaliana]
  misc_feature (1)..(575): Homolog of NCBI NO: 134104 NR Description: RuBisCO subunit binding-protein beta subunit,
  misc_feature (1)..(587): Homolog of NCBI NO: 81601 NR Description: chaperonin 60 beta precursor - Arabidopsis
  misc_feature (1)..(587): Homolog of NCBI NO: 15222729 NR Description: RuBisCo subunit binding-protein beta subunit/60
  misc_feature (42)..(579): Homolog of NCBI NO: 15222666 NR Description: chaperonin, putative [Arabidopsis thaliana]
  misc_feature (89)..(587): Homolog of NCBI NO: 2493650 NR Description: RUBISCO SUBUNIT BINDING-PROTEIN BETA SUBUNIT (60
  misc_feature (1)..(586): Homolog of NCBI NO: 2506277 NR Description: RuBisCO subunit binding-protein beta subunit,
  misc_feature (1)..(587): Homolog of NCBI NO: 34897924 NR Description: ESTs C99033(E4350),C99032(E4350),D46006(S10372), correspond to a region of the predicted gene.~Similar to
  misc_feature (1)..(587): Homolog of NCBI NO: 7443855 NR Description: probable chaperonin 60 beta chain precursor,
  misc_feature (1)..(587): Homolog of NCBI NO: 30696748 NR Description: chaperonin, putative [Arabidopsis thaliana]
  misc_feature (1)..(587): Homolog of NCBI NO: 15231255 NR Description: chaperonin, putative [Arabidopsis thaliana]
  misc_feature (1)..(575): Homolog of NCBI NO: 134104 NR Description: RuBisCO subunit binding-protein beta subunit,
  misc_feature (1)..(587): Homolog of NCBI NO: 81601 NR Description: chaperonin 60 beta precursor - Arabidopsis
  misc_feature (1)..(587): Homolog of NCBI NO: 15222729 NR Description: RuBisCo subunit binding-protein beta subunit/60

SEQ ID NO: 48773 - DNA, 2107 bp, Arabidopsis thaliana
  misc_feature (1)..(2107): Ceres Seq. ID no. 13591874
  misc_feature: MA Experiment ID: 20000234 Result: Up-regulated in Transcription
  misc_feature: MA Experiment 20000234 PARAMETER Experiment Name: At_Siliques_P Parameter: Age (day) Value: 21
  misc_feature: MA Experiment 20000234 PARAMETER Experiment Name: At_Siliques_P Parameter: Organism Value: A. thaliana
  misc_feature: MA Experiment 20000234 PARAMETER Experiment Name: At_Siliques_P Parameter: Plant Line Value: WS
  misc_feature: MA Experiment 20000234 PARAMETER Experiment Name: At_Siliques_P Parameter: Tissue Value: Less Than 5mm Siliques vs. Whole Plant
  misc_feature: MA Experiment ID: 20000495 Result: Down-regulated in Transcription
  misc_feature: MA Experiment 20000495 PARAMETER Experiment Name: At_Guard_Cells_P Parameter: Harvest Date Value: 8/2/2002
  misc_feature: MA Experiment 20000495 PARAMETER Experiment Name: At_Guard_Cells_P Parameter: Organism Value: A. thaliana
  misc_feature: MA Experiment 20000495 PARAMETER Experiment Name: At_Guard_Cells_P Parameter: Tissue Value: Guard Cells vs. Leaves
  misc_feature: MA Experiment ID: 20001451 Result: Down-regulated in Transcription
  misc_feature: MA Experiment 20001451 PARAMETER Experiment Name: At_Far-red-induction_P Parameter: Age (day) Value: 7
  misc_feature: MA Experiment 20001451 PARAMETER Experiment Name: At_Far-red-induction_P Parameter: Light Value: Far-red vs. White
  misc_feature: MA Experiment 20001451 PARAMETER Experiment Name: At_Far-red-induction_P Parameter: Organism Value: A. thaliana
  misc_feature: MA Experiment 20001451 PARAMETER Experiment Name: At_Far-red-induction_P Parameter: Plant Line Value: Columbia
  misc_feature: MA Experiment 20001451 PARAMETER Experiment Name: At_Far-red-induction_P Parameter: Timepoint (hr) Value: 24
  misc_feature: MA Experiment 20001451 PARAMETER Experiment Name: At_Far-red-induction_P Parameter: Tissue Value: Whole Plant
  misc_feature: MA Experiment ID: 20001557 Result: Up-regulated in Transcription
  misc_feature: MA Experiment 20001557 PARAMETER Experiment Name: At_Drought_Soil_Dry_P Parameter: Age (day) Value: 27
  misc_feature: MA Experiment 20001557 PARAMETER Experiment Name: At_Drought_Soil_Dry_P Parameter: Organism Value: A. thaliana
  misc_feature: MA Experiment 20001557 PARAMETER Experiment Name: At_Drought_Soil_Dry_P Parameter: Plant Line Value: WS
  misc_feature: MA Experiment 20001557 PARAMETER Experiment Name: At_Drought_Soil_Dry_P Parameter: Post Timepoint (hr) Value: 3
  misc_feature: MA Experiment 20001557 PARAMETER Experiment Name: At_Drought_Soil_Dry_P Parameter: Post-Treatment Value: Re-Water vs. No Drought
  misc_feature: MA Experiment 20001557 PARAMETER Experiment Name: At_Drought_Soil_Dry_P Parameter: Timepoint (day) Value: 13
  misc_feature: MA Experiment 20001557 PARAMETER Experiment Name: At_Drought_Soil_Dry_P Parameter: Treatment Value: Drought vs. No Drought
gagggtttccgctttccacacacacagctgcaacactatcttctcagaaatggtaaccgaagctttcgaattcgtcgccgttcctttcaattccgatggctggggacctccagacgcttccgacgtttcctcctccgcctctcccaccagcgtcgccgccgctaatcttctcccgaacgttcctttcgcttccttctcccgttccgataagctcggccgtgtagctgattggactcgcaatctctctaatccatccgctcgtcctaacaccggatccaaatcagatccgtctgcagttttcgatttctccgctttcgcaatcgacgaaggcttcggtctcgcttcctccggtggtaatcccgacgaagacgcagctttccgtctcgtcgacggtaaacctccgccgcgtcctaaattcggacctaaatggcgtttcaatcctcaccacaatcggaatcagcttcctcaacggcgagatgaagaagttgaagctaagaagcgtgatgctgagaaggaacgagctcgtcgtgatcgtctctacaataacaaccgtaacaacatccatcaccaacgccgtgaagctgccgctttcaaatcatccgttgatattcagccggagtggaacatgcttgagcagatccctttctcaacattctcgaagctctcgtacacagttcaagaaccagaagatcttcttctctgtggtggccttgagtactacaaccgccttttcgatcgcataacgccgaaaaacgaacgcagactcgagcgtttcaagaacaggaacttcttcaaagtcactactagtgatgatcctgtgattaggcgtttagctaaggaagacaaagctactgttttcgctactgatgctatattagctgctcttatgtgtgctcctagatctgtttactcttgggatattgttattcaacgtgttggtaacaaactgttctttgacaagagagatggatcacagcttgatttgttgtctgtgcatgagacatctcaagagccattgcctgagtctaaagatgatatcaattctgctcattctctaggtgtggaagctgcttacatcaatcagaacttttcgcagcaggttttggttagagatggaaagaaggaaacttttgatgaagccaatccatttgctaatgaaggtgaagagattgcttctgttgcttataggtatagaaggtggaagcttgatgataatatgcatcttgttgcgaggtgtgagttacagagtgttgctgatctcaacaaccaaaggtcgtttcttactttgaatgctcttaacgagtttgatcctaagtactctggtgttgattggagacagaagcttgaaactcagagaggtgcggttttagctacagaattgaagaacaatggaaataagttggctaaatggactgcacaagctttattggctaatgctgatatgatgaagattggttttgtctctagggttcatcctcgtgatcatttcaaccatgttatattatctgttttggggtataagccgaaggatttcgctggacagattaatctcaacacttctaacatgtgggggattgtgaaatccatagttgatctgtgtatgaaactaagcgaagggaagtatgttcttgtgaaggatccatcgaagcctcaagtgaggatttatgaggttccacctgatgctttcgagaatgattacgttgaggaaccgttgcctgaagatgaacaggttcagccaactgaggaaaacacagagggagcagaagcaagtgtagctgcaactaaagaaaccgaggagaagaaagctgatgatgctcaagcttgatggttataaagtcaggtccaaagtctacacctttcgtttctgggttcttttgagagttgaagcttcaatcaaacaacaacaatggaggttccttttttaattatcttgtcctttttcaaatttttgtggtactgctgtaattttaagtcagaaatgagattgtagaacactatcttcgtgacatcttttggaaaatcattacggattgtttacagaacagaaatctttttactatgactcttatagccaccaaattttcttgaatcattttgcattagtttt

SEQ ID NO: 48774 - protein, 607 aa, Arabidopsis thaliana
  peptide (1)..(607): Ceres Seq. ID no. 13591875
  misc_feature (19)..(575): Pfam Name: Eukaryotic translation initiation factor 3 Pfam Description: Eukaryotic translation initiation factor 3
  misc_feature (200)..(576): Homolog of NCBI NO: 39585043 NR Description: Hypothetical protein CBG06842 [Caenorhabditis
  misc_feature (200)..(576): Homolog of NCBI NO: 17554522 NR Description: Translation initiation factor (64.3 kD)
  misc_feature (59)..(578): Homolog of NCBI NO: 24649360 NR Description: Eukaryotic initiation factor 3 p66 subunit
  misc_feature (37)..(582): Homolog of NCBI NO: 26337171 NR Description: unnamed protein product [Mus musculus]
  misc_feature (37)..(582): Homolog of NCBI NO: 34866902 NR Description: similar to eukaryotic translation initiation
  misc_feature (52)..(584): Homolog of NCBI NO: 38174024 NR Description: Unknown (protein for MGC:75703) [Silurana
  misc_feature (37)..(582): Homolog of NCBI NO: 4503523 NR Description: eukaryotic translation initiation factor 3
  misc_feature (59)..(581): Homolog of NCBI NO: 27882463 NR Description: Similar to eukaryotic translation initiation
  misc_feature (190)..(607): Homolog of NCBI NO: 12407755 NR Description: initiation factor 3d [Arabidopsis thaliana]
  misc_feature (17)..(607): Homolog of NCBI NO: 15241470 NR Description: eukaryotic translation initiation factor 3
RVSAFHTHSCNTIFSEMVTEAFEFVAVPFNSDGWGPPDASDVSSSASPTSVAAANLLPNVPFASFSRSDKLGRVADWTRNLSNPSARPNTGSKSDPSAVFDFSAFAIDEGFGLASSGGNPDEDAAFRLVDGKPPPRPKFGPKWRFNPHHNRNQLPQRRDEEVEAKKRDAEKERARRDRLYNNNRNNIHHQRREAAAFKSSVDIQPEWNMLEQIPFSTFSKLSYTVQEPEDLLLCGGLEYYNRLFDRITPKNERRLERFKNRNFFKVTTSDDPVIRRLAKEDKATVFATDAILAALMCAPRSVYSWDIVIQRVGNKLFFDKRDGSQLDLLSVHETSQEPLPESKDDINSAHSLGVEAAYINQNFSQQVLVRDGKKETFDEANPFANEGEEIASVAYRYRRWKLDDNMHLVARCELQSVADLNNQRSFLTLNALNEFDPKYSGVDWRQKLETQRGAVLATELKNNGNKLAKWTAQALLANADMMKIGFVSRVHPRDHFNHVILSVLGYKPKDFAGQINLNTSNMWGIVKSIVDLCMKLSEGKYVLVKDPSKPQVRIYEVPPDAFENDYVEEPLPEDEQVQPTEENTEGAEASVAATKETEEKKADDAQA

SEQ ID NO: 48775 - protein, 591 aa, Arabidopsis thaliana
  peptide (1)..(591): Ceres Seq. ID no. 13591876
  misc_feature (3)..(559): Pfam Name: Eukaryotic translation initiation factor 3 Pfam Description: Eukaryotic translation initiation factor 3
  misc_feature (184)..(560): Homolog of NCBI NO: 39585043 NR Description: Hypothetical protein CBG06842 [Caenorhabditis
  misc_feature (184)..(560): Homolog of NCBI NO: 17554522 NR Description: Translation initiation factor (64.3 kD)
  misc_feature (43)..(562): Homolog of NCBI NO: 24649360 NR Description: Eukaryotic initiation factor 3 p66 subunit
  misc_feature (21)..(566): Homolog of NCBI NO: 26337171 NR Description: unnamed protein product [Mus musculus]
  misc_feature (21)..(566): Homolog of NCBI NO: 34866902 NR Description: similar to eukaryotic translation initiation
  misc_feature (36)..(568): Homolog of NCBI NO: 38174024 NR Description: Unknown (protein for MGC:75703) [Silurana
  misc_feature (21)..(566): Homolog of NCBI NO: 4503523 NR Description: eukaryotic translation initiation factor 3
  misc_feature (43)..(565): Homolog of NCBI NO: 27882463 NR Description: Similar to eukaryotic translation initiation
  misc_feature (174)..(591): Homolog of NCBI NO: 12407755 NR Description: initiation factor 3d [Arabidopsis thaliana]
  misc_feature (1)..(591): Homolog of NCBI NO: 15241470 NR Description: eukaryotic translation initiation factor 3
MVTEAFEFVAVPFNSDGWGPPDASDVSSSASPTSVAAANLLPNVPFASFSRSDKLGRVADWTRNLSNPSARPNTGSKSDPSAVFDFSAFAIDEGFGLASSGGNPDEDAAFRLVDGKPPPRPKFGPKWRFNPHHNRNQLPQRRDEEVEAKKRDAEKERARRDRLYNNNRNNIHHQRREAAAFKSSVDIQPEWNMLEQIPFSTFSKLSYTVQEPEDLLLCGGLEYYNRLFDRITPKNERRLERFKNRNFFKVTTSDDPVIRRLAKEDKATVFATDAILAALMCAPRSVYSWDIVIQRVGNKLFFDKRDGSQLDLLSVHETSQEPLPESKDDINSAHSLGVEAAYINQNFSQQVLVRDGKKETFDEANPFANEGEEIASVAYRYRRWKLDDNMHLVARCELQSVADLNNQRSFLTLNALNEFDPKYSGVDWRQKLETQRGAVLATELKNNGNKLAKWTAQALLANADMMKIGFVSRVHPRDHFNHVILSVLGYKPKDFAGQINLNTSNMWGIVKSIVDLCMKLSEGKYVLVKDPSKPQVRIYEVPPDAFENDYVEEPLPEDEQVQPTEENTEGAEASVAATKETEEKKADDAQA

SEQ ID NO: 48776 - protein, 399 aa, Arabidopsis thaliana
  peptide (1)..(399): Ceres Seq. ID no. 13591877
  misc_feature (1)..(367): Pfam Name: Eukaryotic translation initiation factor 3 Pfam Description: Eukaryotic translation initiation factor 3
  misc_feature (1)..(368): Homolog of NCBI NO: 39585043 NR Description: Hypothetical protein CBG06842 [Caenorhabditis
  misc_feature (1)..(368): Homolog of NCBI NO: 17554522 NR Description: Translation initiation factor (64.3 kD)
  misc_feature (1)..(370): Homolog of NCBI NO: 24649360 NR Description: Eukaryotic initiation factor 3 p66 subunit
  misc_feature (1)..(374): Homolog of NCBI NO: 26337171 NR Description: unnamed protein product [Mus musculus]
  misc_feature (1)..(374): Homolog of NCBI NO: 34866902 NR Description: similar to eukaryotic translation initiation
  misc_feature (1)..(376): Homolog of NCBI NO: 38174024 NR Description: Unknown (protein for MGC:75703) [Silurana
  misc_feature (1)..(374): Homolog of NCBI NO: 4503523 NR Description: eukaryotic translation initiation factor 3
  misc_feature (1)..(373): Homolog of NCBI NO: 27882463 NR Description: Similar to eukaryotic translation initiation
  misc_feature (1)..(399): Homolog of NCBI NO: 12407755 NR Description: initiation factor 3d [Arabidopsis thaliana]
  misc_feature (1)..(399): Homolog of NCBI NO: 15241470 NR Description: eukaryotic translation initiation factor 3
MLEQIPFSTFSKLSYTVQEPEDLLLCGGLEYYNRLFDRITPKNERRLERFKNRNFFKVTTSDDPVIRRLAKEDKATVFATDAILAALMCAPRSVYSWDIVIQRVGNKLFFDKRDGSQLDLLSVHETSQEPLPESKDDINSAHSLGVEAAYINQNFSQQVLVRDGKKETFDEANPFANEGEEIASVAYRYRRWKLDDNMHLVARCELQSVADLNNQRSFLTLNALNEFDPKYSGVDWRQKLETQRGAVLATELKNNGNKLAKWTAQALLANADMMKIGFVSRVHPRDHFNHVILSVLGYKPKDFAGQINLNTSNMWGIVKSIVDLCMKLSEGKYVLVKDPSKPQVRIYEVPPDAFENDYVEEPLPEDEQVQPTEENTEGAEASVAATKETEEKKADDAQA

SEQ ID NO: 48777 - DNA, 2038 bp, Arabidopsis thaliana
  misc_feature (1)..(2038): Ceres Seq. ID no. 12575176
  misc_feature: MA Experiment ID: 108569 Result: Up-regulated in Transcription
  misc_feature: MA Experiment 108569 PARAMETER Experiment Name: At_0.001%_MeJA__cDNA_P Parameter: Timepoint (hr) Value: 6
  misc_feature: MA Experiment 108569 PARAMETER Experiment Name: At_0.001%_MeJA__cDNA_P Parameter: Tissue Value: Aerial
  misc_feature: MA Experiment 108569 PARAMETER Experiment Name: At_0.001%_MeJA__cDNA_P Parameter: Treatment Value: 0.001% MeJA vs. No Treatment
  misc_feature: MA Experiment ID: 108573 Result: Up-regulated in Transcription
  misc_feature: MA Experiment 108573 PARAMETER Experiment Name: At_Drought_cDNA_P Parameter: Timepoint (hr) Value: 6
  misc_feature: MA Experiment 108573 PARAMETER Experiment Name: At_Drought_cDNA_P Parameter: Tissue Value: Aerial
  misc_feature: MA Experiment 108573 PARAMETER Experiment Name: At_Drought_cDNA_P Parameter: Treatment Value: Drought vs. No Drought
  misc_feature: MA Experiment ID: 108577 Result: Down-regulated in Transcription
  misc_feature: MA Experiment 108577 PARAMETER Experiment Name: At_42deg_Heat_cDNA_P Parameter: Temperature (deg C) Value: 42 vs. 22
  misc_feature: MA Experiment 108577 PARAMETER Experiment Name: At_42deg_Heat_cDNA_P Parameter: Timepoint (hr) Value: 6
  misc_feature: MA Experiment 108577 PARAMETER Experiment Name: At_42deg_Heat_cDNA_P Parameter: Tissue Value: Aerial
  misc_feature: MA Experiment ID: 108595 Result: Down-regulated in Transcription
  misc_feature: MA Experiment 108595 PARAMETER Experiment Name: At_Ler-pi_Ovule_cDNA_P Parameter: Plant Line Value: null
  misc_feature: MA Experiment ID: 108668 Result: Down-regulated in Transcription
  misc_feature: MA Experiment 108668 PARAMETER Experiment Name: At_2mM_SA_cDNA_P Parameter: Plant Line Value: WS
  misc_feature: MA Experiment 108668 PARAMETER Experiment Name: At_2mM_SA_cDNA_P Parameter: Timepoint (hr) Value: 6
  misc_feature: MA Experiment 108668 PARAMETER Experiment Name: At_2mM_SA_cDNA_P Parameter: Treatment Value: 2mM SA vs. No Treatment
  misc_feature: MA Experiment ID: 20000089 Result: Up-regulated in Transcription
  misc_feature: MA Experiment ID: 20000180 Result: Down-regulated in Transcription
  misc_feature: MA Experiment 20000180 PARAMETER Experiment Name: At_Germinating_Seeds_P Parameter: Age (hr) Value: 24 vs. 0
  misc_feature: MA Experiment 20000180 PARAMETER Experiment Name: At_Germinating_Seeds_P Parameter: Tissue Value: Germinating Seeds
  misc_feature: MA Experiment ID: 20000264 Result: Up-regulated in Transcription
  misc_feature: MA Experiment 20000264 PARAMETER Experiment Name: At_Open_Flower_P Parameter: Age (day) Value: 21
  misc_feature: MA Experiment 20000264 PARAMETER Experiment Name: At_Open_Flower_P Parameter: Plant Line Value: WS
  misc_feature: MA Experiment 20000264 PARAMETER Experiment Name: At_Open_Flower_P Parameter: Tissue Value: Open Flower vs. Whole Plant
  misc_feature: MA Experiment ID: 20000265 Result: Up-regulated in Transcription
  misc_feature: MA Experiment 20000265 PARAMETER Experiment Name: At_Open_Flower_P Parameter: Age (day) Value: 21
  misc_feature: MA Experiment 20000265 PARAMETER Experiment Name: At_Open_Flower_P Parameter: Plant Line Value: WS
  misc_feature: MA Experiment 20000265 PARAMETER Experiment Name: At_Open_Flower_P Parameter: Tissue Value: Closed Flower vs. Whole Plant
  misc_feature: MA Experiment ID: 20000286 Result: Up-regulated in Transcription
  misc_feature: MA Experiment 20000286 PARAMETER Experiment Name: At_Open_Flower_P Parameter: Age (day) Value: 21
  misc_feature: MA Experiment 20000286 PARAMETER Experiment Name: At_Open_Flower_P Parameter: Plant Line Value: WS
  misc_feature: MA Experiment 20000286 PARAMETER Experiment Name: At_Open_Flower_P Parameter: Tissue Value: Half Open vs. Whole Plant
  misc_feature: MA Experiment ID: 20000438 Result: Up-regulated in Transcription
  misc_feature: MA Experiment 20000438 PARAMETER Experiment Name: At_Shoots__P Parameter: Age (day) Value: 14
  misc_feature: MA Experiment 20000438 PARAMETER Experiment Name: At_Shoots__P Parameter: Tissue Value: Shoots vs. Whole Plant
  misc_feature: MA Experiment ID: 20000495 Result: Down-regulated in Transcription
  misc_feature: MA Experiment 20000495 PARAMETER Experiment Name: At_Guard_Cells_P Parameter: Harvest Date Value: 8/2/2002
  misc_feature: MA Experiment 20000495 PARAMETER Experiment Name: At_Guard_Cells_P Parameter: Organism Value: A. thaliana
  misc_feature: MA Experiment 20000495 PARAMETER Experiment Name: At_Guard_Cells_P Parameter: Tissue Value: Guard Cells vs. Leaves
  misc_feature: MA Experiment ID: 20000794 Result: Up-regulated in Transcription
  misc_feature: MA Experiment 20000794 PARAMETER Experiment Name: At_Petals_P Parameter: Age (day) Value: 23-25 days
  misc_feature: MA Experiment 20000794 PARAMETER Experiment Name: At_Petals_P Parameter: Plant Line Value: WS
  misc_feature: MA Experiment 20000794 PARAMETER Experiment Name: At_Petals_P Parameter: Tissue Value: Petals vs. Whole plant
  misc_feature: MA Experiment ID: 20001247 Result: Down-regulated in Transcription
  misc_feature: MA Experiment 20001247 PARAMETER Experiment Name: At_Far-red-induction_P Parameter: Age (day) Value: 7
  misc_feature: MA Experiment 20001247 PARAMETER Experiment Name: At_Far-red-induction_P Parameter: Light Value: Far-red vs. White
  misc_feature: MA Experiment 20001247 PARAMETER Experiment Name: At_Far-red-induction_P Parameter: Organism Value: A. thaliana
  misc_feature: MA Experiment 20001247 PARAMETER Experiment Name: At_Far-red-induction_P Parameter: Plant Line Value: Columbia
  misc_feature: MA Experiment 20001247 PARAMETER Experiment Name: At_Far-red-induction_P Parameter: Timepoint (hr) Value: 1
  misc_feature: MA Experiment 20001247 PARAMETER Experiment Name: At_Far-red-induction_P Parameter: Tissue Value: Whole Plant
  misc_feature: MA Experiment ID: 20001248 Result: Down-regulated in Transcription
  misc_feature: MA Experiment 20001248 PARAMETER Experiment Name: At_Far-red-induction_P Parameter: Age (day) Value: 7
  misc_feature: MA Experiment 20001248 PARAMETER Experiment Name: At_Far-red-induction_P Parameter: Light Value: Far-red vs. White
  misc_feature: MA Experiment 20001248 PARAMETER Experiment Name: At_Far-red-induction_P Parameter: Organism Value: A. thaliana
  misc_feature: MA Experiment 20001248 PARAMETER Experiment Name: At_Far-red-induction_P Parameter: Plant Line Value: Columbia
  misc_feature: MA Experiment 20001248 PARAMETER Experiment Name: At_Far-red-induction_P Parameter: Timepoint (hr) Value: 4
  misc_feature: MA Experiment 20001248 PARAMETER Experiment Name: At_Far-red-induction_P Parameter: Tissue Value: Whole Plant
  misc_feature: MA Experiment ID: 20001451 Result: Down-regulated in Transcription
  misc_feature: MA Experiment 20001451 PARAMETER Experiment Name: At_Far-red-induction_P Parameter: Age (day) Value: 7
  misc_feature: MA Experiment 20001451 PARAMETER Experiment Name: At_Far-red-induction_P Parameter: Light Value: Far-red vs. White
  misc_feature: MA Experiment 20001451 PARAMETER Experiment Name: At_Far-red-induction_P Parameter: Organism Value: A. thaliana
  misc_feature: MA Experiment 20001451 PARAMETER Experiment Name: At_Far-red-induction_P Parameter: Plant Line Value: Columbia
  misc_feature: MA Experiment 20001451 PARAMETER Experiment Name: At_Far-red-induction_P Parameter: Timepoint (hr) Value: 24
  misc_feature: MA Experiment 20001451 PARAMETER Experiment Name: At_Far-red-induction_P Parameter: Tissue Value: Whole Plant
  misc_feature: MA Experiment ID: 20001911 Result: Down-regulated in Transcription
  misc_feature: MA Experiment 20001911 PARAMETER Experiment Name: At_Drought_Reproduction_P Parameter: Age (day) Value: 40
  misc_feature: MA Experiment 20001911 PARAMETER Experiment Name: At_Drought_Reproduction_P Parameter: Organism Value: A. thaliana
  misc_feature: MA Experiment 20001911 PARAMETER Experiment Name: At_Drought_Reproduction_P Parameter: Plant Line Value: WS
  misc_feature: MA Experiment 20001911 PARAMETER Experiment Name: At_Drought_Reproduction_P Parameter: Timepoint (day) Value: 10
  misc_feature: MA Experiment 20001911 PARAMETER Experiment Name: At_Drought_Reproduction_P Parameter: Tissue Value: Flowers
  misc_feature: MA Experiment 20001911 PARAMETER Experiment Name: At_Drought_Reproduction_P Parameter: Treatment Value: Drought vs. No Drought
aaatggaccaaatttgtggctactactctcctcaattataaaaatgaaatatttatatatcttccctgaaccaggaagatattttgtttgtcttctacaaatattatatatatgtaatttctttggataattttctaccgcttaagaagcacagatggacataatctcagggcaagctctgttactcctcttttgctttatcttatcatgttttcttatcttcaccaccacaagatctggacgaatctcccgcggggccaccgcgctgcctccaggacctccacggttaccgatcatcggaaatattcacctcgtcggaaaacatccacatcgctcattcgccgagctctcaaaaacttatggaccagtcatgagtcttaagcttggaagtttaaatacagtggttatagcttcaccagaagctgcgagagaggttttacgaacacatgaccagattttgtctgcccgtagtcccactaacgcggtacggtccatcaatcaccaagacgcttcccttgtctggcttccttcgtcgtccgctcgttggaggctgttgagaaggctgtcggtgactcagctcttgtcaccacagcgtatcgaagccacgaaagccttgaggatgaacaaggtgaaggaacttgtgagcttcataagtgaaagcagcgatagggaagaatctgttgatatttctcgtgtagccttcatcacaactcttaatatcatatcgaacattctgttttccgtcgatctcggtagctacaacgcgaaagcttctattaatggggttcaagacacggtgattagtgttatggatgctgccgggactccagacgctgctaattactttccatttctgaggtttcttgatctgcaaggtaatgtgaagacttttaaggtttgcacggagaggctggtaagggttttccgtgggttcattgatgctaagattgcggaaaaatcatcgcagaataaccctaaagatgtttcaaaaaacgatttcgttgacaaccttctcgattacaaaggagatgaatcagaactctccattagcgatattgaacaccttctcttggatatgtttacagcaggcacggatacaagctctagtaccctggagtgggcaatgacagagttacttaaaaaccctaaaacgatggcgaaagctcaggccgagatcgattgtgtgataggtcaaaacggtatcgttgaagagtcagatatctccaaactgccgtatttacaagcagtcgtgaaggaaactttccggttacatacgcctgttccgcttcttatcccgcgaaaagccgaatccgatgcggagattcttggtttcatggtgcttaaagatactcaggttctagtgaacgtctgggccataggacgagacccgagcgtgtgggataatccgtcccagtttgagccagagaggtttttggggaaagatatggacgtgagaggtagagattatgagcttacaccattcggagccggacgtagaatttgcccgggaatgcctttggctatgaaaacagtgtctcttatgcttgcttctcttctttattcctttgactggaagcttccgaagggtgtcctttcggaggatttggacatggacgagacctttggtctaactttgcataagaccaacccgttacatgccgtacccgtcaagaaacgcgccaatattaattagtcgtggttttataattaaaaataaacagagaaataatctccaaagctttgtttattaccaaaaactatctgttttcggttctagagtttgtttgtttctctctcttgaggtggctagagcttgaagaagtcaaaagtatccatattgatgcctagcttcggtcctcggtttaggctaggaaggaaacgaagaagtttctgcaaaccgatgcagatcatcaatggaataatgaaatgttaattttatcatttactcatataggtttccgcctcattatcatttacttgatgtttctcctaaatcttgtcatttaattgactaaggaaataacgaagaaatctcgtg

SEQ ID NO: 48778 - protein, 512 aa, Arabidopsis thaliana
  peptide (1)..(512): Ceres Seq. ID no. 12575177
  misc_feature (39)..(503): Pfam Name: Cytochrome P450 Pfam Description: Cytochrome P450
  misc_feature (9)..(503): Homolog of NCBI NO: 37531380 NR Description: putative Cytochrome P450 [Oryza sativa (japonica
  misc_feature (8)..(510): Homolog of NCBI NO: 37531412 NR Description: putative cytochrome P450 [Oryza sativa (japonica
  misc_feature (19)..(511): Homolog of NCBI NO: 33320161 NR Description: cytochrome P450 [Pastinaca sativa]
  misc_feature (1)..(508): Homolog of NCBI NO: 15233027 NR Description: cytochrome p450 family; protein id: At3g61040.1
  misc_feature (1)..(507): Homolog of NCBI NO: 26451374 NR Description: putative cytochrome P450 [Arabidopsis thaliana]
  misc_feature (1)..(502): Homolog of NCBI NO: 25282569 NR Description: probable cytochrome P450 [imported] - Arabidopsis
  misc_feature (1)..(512): Homolog of NCBI NO: 15217636 NR Description: cytochrome P450 monooxygenase; protein id:
  misc_feature (1)..(512): Homolog of NCBI NO: 15225510 NR Description: cytochrome p450 family; protein id: At2g45550.1
  misc_feature (1)..(508): Homolog of NCBI NO: 15225512 NR Description: cytochrome p450 family
  misc_feature (1)..(482): Homolog of NCBI NO: 25282599 NR Description: cytochrome P450 monooxygenase [imported] -
MDIISGQALLLLFCFILSCFLIFTTTRSGRISRGATALPPGPPRLPIIGNIHLVGKHPHRSFAELSKTYGPVMSLKLGSLNTVVIASPEAAREVLRTHDQILSARSPTNAVRSINHQDASLVWLPSSSARWRLLRRLSVTQLLSPQRIEATKALRMNKVKELVSFISESSDREESVDISRVAFITTLNIISNILFSVDLGSYNAKASINGVQDTVISVMDAAGTPDAANYFPFLRFLDLQGNVKTFKVCTERLVRVFRGFIDAKIAEKSSQNNPKDVSKNDFVDNLLDYKGDESELSISDIEHLLLDMFTAGTDTSSSTLEWAMTELLKNPKTMAKAQAEIDCVIGQNGIVEESDISKLPYLQAVVKETFRLHTPVPLLIPRKAESDAEILGFMVLKDTQVLVNVWAIGRDPSVWDNPSQFEPERFLGKDMDVRGRDYELTPFGAGRRICPGMPLAMKTVSLMLASLLYSFDWKLPKGVLSEDLDMDETFGLTLHKTNPLHAVPVKKRANIN

SEQ ID NO: 48779 - protein, 440 aa, Arabidopsis thaliana
  peptide (1)..(440): Ceres Seq. ID no. 12575178
  misc_feature (1)..(431): Pfam Name: Cytochrome P450 Pfam Description: Cytochrome P450
  misc_feature (1)..(431): Homolog of NCBI NO: 37531380 NR Description: putative Cytochrome P450 [Oryza sativa (japonica
  misc_feature (1)..(438): Homolog of NCBI NO: 37531412 NR Description: putative cytochrome P450 [Oryza sativa (japonica
  misc_feature (1)..(439): Homolog of NCBI NO: 33320161 NR Description: cytochrome P450 [Pastinaca sativa]
  misc_feature (1)..(436): Homolog of NCBI NO: 15233027 NR Description: cytochrome p450 family; protein id: At3g61040.1
  misc_feature (1)..(435): Homolog of NCBI NO: 26451374 NR Description: putative cytochrome P450 [Arabidopsis thaliana]
  misc_feature (1)..(430): Homolog of NCBI NO: 25282569 NR Description: probable cytochrome P450 [imported] - Arabidopsis
  misc_feature (1)..(440): Homolog of NCBI NO: 15217636 NR Description: cytochrome P450 monooxygenase; protein id:
  misc_feature (1)..(440): Homolog of NCBI NO: 15225510 NR Description: cytochrome p450 family; protein id: At2g45550.1
  misc_feature (1)..(436): Homolog of NCBI NO: 15225512 NR Description: cytochrome p450 family
  misc_feature (1)..(410): Homolog of NCBI NO: 25282599 NR Description: cytochrome P450 monooxygenase [imported] -
MSLKLGSLNTVVIASPEAAREVLRTHDQILSARSPTNAVRSINHQDASLVWLPSSSARWRLLRRLSVTQLLSPQRIEATKALRMNKVKELVSFISESSDREESVDISRVAFITTLNIISNILFSVDLGSYNAKASINGVQDTVISVMDAAGTPDAANYFPFLRFLDLQGNVKTFKVCTERLVRVFRGFIDAKIAEKSSQNNPKDVSKNDFVDNLLDYKGDESELSISDIEHLLLDMFTAGTDTSSSTLEWAMTELLKNPKTMAKAQAEIDCVIGQNGIVEESDISKLPYLQAVVKETFRLHTPVPLLIPRKAESDAEILGFMVLKDTQVLVNVWAIGRDPSVWDNPSQFEPERFLGKDMDVRGRDYELTPFGAGRRICPGMPLAMKTVSLMLASLLYSFDWKLPKGVLSEDLDMDETFGLTLHKTNPLHAVPVKKRANIN

SEQ ID NO: 48780 - protein, 357 aa, Arabidopsis thaliana
  peptide (1)..(357): Ceres Seq. ID no. 12575179
  misc_feature (1)..(348): Pfam Name: Cytochrome P450 Pfam Description: Cytochrome P450
  misc_feature (1)..(348): Homolog of NCBI NO: 37531380 NR Description: putative Cytochrome P450 [Oryza sativa (japonica
  misc_feature (1)..(355): Homolog of NCBI NO: 37531412 NR Description: putative cytochrome P450 [Oryza sativa (japonica
  misc_feature (1)..(356): Homolog of NCBI NO: 33320161 NR Description: cytochrome P450 [Pastinaca sativa]
  misc_feature (1)..(353): Homolog of NCBI NO: 15233027 NR Description: cytochrome p450 family; protein id: At3g61040.1
  misc_feature (1)..(352): Homolog of NCBI NO: 26451374 NR Description: putative cytochrome P450 [Arabidopsis thaliana]
  misc_feature (1)..(347): Homolog of NCBI NO: 25282569 NR Description: probable cytochrome P450 [imported] - Arabidopsis
  misc_feature (1)..(357): Homolog of NCBI NO: 15217636 NR Description: cytochrome P450 monooxygenase; protein id:
  misc_feature (1)..(357): Homolog of NCBI NO: 15225510 NR Description: cytochrome p450 family; protein id: At2g45550.1
  misc_feature (1)..(353): Homolog of NCBI NO: 15225512 NR Description: cytochrome p450 family
  misc_feature (1)..(327): Homolog of NCBI NO: 25282599 NR Description: cytochrome P450 monooxygenase [imported] -
MNKVKELVSFISESSDREESVDISRVAFITTLNIISNILFSVDLGSYNAKASINGVQDTVISVMDAAGTPDAANYFPFLRFLDLQGNVKTFKVCTERLVRVFRGFIDAKIAEKSSQNNPKDVSKNDFVDNLLDYKGDESELSISDIEHLLLDMFTAGTDTSSSTLEWAMTELLKNPKTMAKAQAEIDCVIGQNGIVEESDISKLPYLQAVVKETFRLHTPVPLLIPRKAESDAEILGFMVLKDTQVLVNVWAIGRDPSVWDNPSQFEPERFLGKDMDVRGRDYELTPFGAGRRICPGMPLAMKTVSLMLASLLYSFDWKLPKGVLSEDLDMDETFGLTLHKTNPLHAVPVKKRANIN

SEQ ID NO: 48781 - DNA, 2662 bp, Arabidopsis thaliana; identical to SEQ ID NO: 46613
  misc_feature (1)..(2662): Ceres Seq. ID no. 12600678
  misc_feature: MA Experiment ID: 20000185 Result: Up-regulated in Transcription
  misc_feature: MA Experiment 20000185 PARAMETER Experiment Name: At_Roots__P Parameter: Age (day) Value: 7 vs. 21
  misc_feature: MA Experiment 20000185 PARAMETER Experiment Name: At_Roots__P Parameter: Organism Value: A. thaliana
  misc_feature: MA Experiment 20000185 PARAMETER Experiment Name: At_Roots__P Parameter: Tissue Value: Roots vs. Whole Plant
  misc_feature: MA Experiment ID: 20000234 Result: Up-regulated in Transcription
  misc_feature: MA Experiment 20000234 PARAMETER Experiment Name: At_Siliques_P Parameter: Age (day) Value: 21
  misc_feature: MA Experiment 20000234 PARAMETER Experiment Name: At_Siliques_P Parameter: Organism Value: A. thaliana
  misc_feature: MA Experiment 20000234 PARAMETER Experiment Name: At_Siliques_P Parameter: Plant Line Value: WS
  misc_feature: MA Experiment 20000234 PARAMETER Experiment Name: At_Siliques_P Parameter: Tissue Value: Less Than 5mm Siliques vs. Whole Plant
  misc_feature: MA Experiment ID: 20000265 Result: Up-regulated in Transcription
  misc_feature: MA Experiment 20000265 PARAMETER Experiment Name: At_Open_Flower_P Parameter: Age (day) Value: 21
  misc_feature: MA Experiment 20000265 PARAMETER Experiment Name: At_Open_Flower_P Parameter: Plant Line Value: WS
  misc_feature: MA Experiment 20000265 PARAMETER Experiment Name: At_Open_Flower_P Parameter: Tissue Value: Closed Flower vs. Whole Plant
  misc_feature: MA Experiment ID: 20000286 Result: Up-regulated in Transcription
  misc_feature: MA Experiment 20000286 PARAMETER Experiment Name: At_Open_Flower_P Parameter: Age (day) Value: 21
  misc_feature: MA Experiment 20000286 PARAMETER Experiment Name: At_Open_Flower_P Parameter: Plant Line Value: WS
  misc_feature: MA Experiment 20000286 PARAMETER Experiment Name: At_Open_Flower_P Parameter: Tissue Value: Half Open vs. Whole Plant
  misc_feature: MA Experiment ID: 20000439 Result: Up-regulated in Transcription
  misc_feature: MA Experiment 20000439 PARAMETER Experiment Name: At_Roots__P Parameter: Age (day) Value: 14 vs. 21
  misc_feature: MA Experiment 20000439 PARAMETER Experiment Name: At_Roots__P Parameter: Organism Value: A. thaliana
  misc_feature: MA Experiment 20000439 PARAMETER Experiment Name: At_Roots__P Parameter: Tissue Value: Roots vs. Whole Plant
  misc_feature: MA Experiment ID: 20001451 Result: Down-regulated in Transcription
  misc_feature: MA Experiment 20001451 PARAMETER Experiment Name: At_Far-red-induction_P Parameter: Age (day) Value: 7
  misc_feature: MA Experiment 20001451 PARAMETER Experiment Name: At_Far-red-induction_P Parameter: Light Value: Far-red vs. White
  misc_feature: MA Experiment 20001451 PARAMETER Experiment Name: At_Far-red-induction_P Parameter: Organism Value: A. thaliana
  misc_feature: MA Experiment 20001451 PARAMETER Experiment Name: At_Far-red-induction_P Parameter: Plant Line Value: Columbia
  misc_feature: MA Experiment 20001451 PARAMETER Experiment Name: At_Far-red-induction_P Parameter: Timepoint (hr) Value: 24
  misc_feature: MA Experiment 20001451 PARAMETER Experiment Name: At_Far-red-induction_P Parameter: Tissue Value: Whole Plant

SEQ ID NO: 48782 - protein, 725 aa, Arabidopsis thaliana; identical to SEQ ID NO: 46614
  peptide (1)..(725): Ceres Seq. ID no. 12600679
  misc_feature (217)..(529): Pfam Name: Myosin tail Pfam Description: Myosin tail
  misc_feature (217)..(529): Pfam Name: Myosin tail Pfam Description: Myosin tail
  misc_feature (1)..(191): Homolog of NCBI NO: 9294552 NR Description: gene_id:MQC12.9~unknown protein [Arabidopsis
  misc_feature (287)..(725): Homolog of NCBI NO: 15231114 NR Description: unknown protein; protein id: At3g20350.1
  misc_feature (287)..(725): Homolog of NCBI NO: 9294553 NR Description: gb|AAF00675.1~gene_id:MQC12.10~similar to unknown
  misc_feature (213)..(446): Homolog of NCBI NO: 18399293 NR Description: expressed protein
  misc_feature (213)..(446): Homolog of NCBI NO: 15724288 NR Description: AT3g11590/F24K9_26 [Arabidopsis thaliana]
  misc_feature (1)..(191): Homolog of NCBI NO: 9294552 NR Description: gene_id:MQC12.9~unknown protein [Arabidopsis
  misc_feature (287)..(725): Homolog of NCBI NO: 9294553 NR Description: gb|AAF00675.1~gene_id:MQC12.10~similar to unknown
  misc_feature (213)..(446): Homolog of NCBI NO: 15724288 NR Description: AT3g11590/F24K9_26 [Arabidopsis thaliana]
  misc_feature (16)..(658): Homolog of NCBI NO: 15231114 NR Description: unknown protein; protein id: At3g20350.1
  misc_feature (202)..(658): Homolog of NCBI NO: 9294553 NR Description: gb|AAF00675.1~gene_id:MQC12.10~similar to unknown
  misc_feature (39)..(725): Homolog of NCBI NO: 38344183 NR Description: OSJNBa0053K19.22 [Oryza sativa (japonica
  misc_feature (60)..(724): Homolog of NCBI NO: 40253811 NR Description: hypothetical protein [Oryza sativa (japonica
  misc_feature (272)..(440): Homolog of NCBI NO: 29367527 NR Description: unknown [Oryza sativa (japonica cultivar-group)]
  misc_feature (213)..(446): Homolog of NCBI NO: 18399293 NR Description: expressed protein
  misc_feature (287)..(725): Homolog of NCBI NO: 15231114 NR Description: unknown protein; protein id: At3g20350.1
  misc_feature (272)..(440): Homolog of NCBI NO: 29367527 NR Description: unknown [Oryza sativa (japonica cultivar-group)]
  misc_feature (60)..(724): Homolog of NCBI NO: 40253811 NR Description: hypothetical protein [Oryza sativa (japonica
  misc_feature (39)..(725): Homolog of NCBI NO: 38344183 NR Description: OSJNBa0053K19.22 [Oryza sativa (japonica
  misc_feature (202)..(658): Homolog of NCBI NO: 9294553 NR Description: gb|AAF00675.1~gene_id:MQC12.10~similar to unknown
  misc_feature (16)..(658): Homolog of NCBI NO: 15231114 NR Description: unknown protein; protein id: At3g20350.1

SEQ ID NO: 48783 - protein, 573 aa, Arabidopsis thaliana; identical to SEQ ID NO: 46615
  peptide (1)..(573): Ceres Seq. ID no. 12600680
  misc_feature (65)..(377): Pfam Name: Myosin tail Pfam Description: Myosin tail
  misc_feature (65)..(377): Pfam Name: Myosin tail Pfam Description: Myosin tail
  misc_feature (1)..(39): Homolog of NCBI NO: 9294552 NR Description: gene_id:MQC12.9~unknown protein [Arabidopsis
  misc_feature (135)..(573): Homolog of NCBI NO: 15231114 NR Description: unknown protein; protein id: At3g20350.1
  misc_feature (135)..(573): Homolog of NCBI NO: 9294553 NR Description: gb|AAF00675.1~gene_id:MQC12.10~similar to unknown
  misc_feature (61)..(294): Homolog of NCBI NO: 18399293 NR Description: expressed protein
  misc_feature (61)..(294): Homolog of NCBI NO: 15724288 NR Description: AT3g11590/F24K9_26 [Arabidopsis thaliana]
  misc_feature (1)..(39): Homolog of NCBI NO: 9294552 NR Description: gene_id:MQC12.9~unknown protein [Arabidopsis
  misc_feature (135)..(573): Homolog of NCBI NO: 9294553 NR Description: gb|AAF00675.1~gene_id:MQC12.10~similar to unknown
  misc_feature (61)..(294): Homolog of NCBI NO: 15724288 NR Description: AT3g11590/F24K9_26 [Arabidopsis thaliana]
  misc_feature (1)..(506): Homolog of NCBI NO: 15231114 NR Description: unknown protein; protein id: At3g20350.1
  misc_feature (50)..(506): Homolog of NCBI NO: 9294553 NR Description: gb|AAF00675.1~gene_id:MQC12.10~similar to unknown
  misc_feature (1)..(573): Homolog of NCBI NO: 38344183 NR Description: OSJNBa0053K19.22 [Oryza sativa (japonica
  misc_feature (1)..(572): Homolog of NCBI NO: 40253811 NR Description: hypothetical protein [Oryza sativa (japonica
  misc_feature (120)..(288): Homolog of NCBI NO: 29367527 NR Description: unknown [Oryza sativa (japonica cultivar-group)]
  misc_feature (61)..(294): Homolog of NCBI NO: 18399293 NR Description: expressed protein
  misc_feature (135)..(573): Homolog of NCBI NO: 15231114 NR Description: unknown protein; protein id: At3g20350.1
  misc_feature (120)..(288): Homolog of NCBI NO: 29367527 NR Description: unknown [Oryza sativa (japonica cultivar-group)]
  misc_feature (1)..(572): Homolog of NCBI NO: 40253811 NR Description: hypothetical protein [Oryza sativa (japonica
  misc_feature (1)..(573): Homolog of NCBI NO: 38344183 NR Description: OSJNBa0053K19.22 [Oryza sativa (japonica
  misc_feature (50)..(506): Homolog of NCBI NO: 9294553 NR Description: gb|AAF00675.1~gene_id:MQC12.10~similar to unknown
  misc_feature (1)..(506): Homolog of NCBI NO: 15231114 NR Description: unknown protein; protein id: At3g20350.1

SEQ ID NO: 48784 - protein, 531 aa, Arabidopsis thaliana; identical to SEQ ID NO: 46616
  peptide (1)..(531): Ceres Seq. ID no. 12600681
  misc_feature (23)..(335): Pfam Name: Myosin tail Pfam Description: Myosin tail
  misc_feature (23)..(335): Pfam Name: Myosin tail Pfam Description: Myosin tail
  misc_feature (67)..(298): Homolog of NCBI NO: 34394172 NR Description: hypothetical protein [Oryza sativa (japonica
  misc_feature (93)..(531): Homolog of NCBI NO: 15231114 NR Description: unknown protein; protein id: At3g20350.1
  misc_feature (93)..(531): Homolog of NCBI NO: 9294553 NR Description: gb|AAF00675.1~gene_id:MQC12.10~similar to unknown
  misc_feature (19)..(252): Homolog of NCBI NO: 18399293 NR Description: expressed protein
  misc_feature (19)..(252): Homolog of NCBI NO: 15724288 NR Description: AT3g11590/F24K9_26 [Arabidopsis thaliana]
  misc_feature (67)..(298): Homolog of NCBI NO: 34394172 NR Description: hypothetical protein [Oryza sativa (japonica
  misc_feature (93)..(531): Homolog of NCBI NO: 9294553 NR Description: gb|AAF00675.1~gene_id:MQC12.10~similar to unknown
  misc_feature (19)..(252): Homolog of NCBI NO: 15724288 NR Description: AT3g11590/F24K9_26 [Arabidopsis thaliana]
  misc_feature (1)..(464): Homolog of NCBI NO: 15231114 NR Description: unknown protein; protein id: At3g20350.1
  misc_feature (8)..(464): Homolog of NCBI NO: 9294553 NR Description: gb|AAF00675.1~gene_id:MQC12.10~similar to unknown
  misc_feature (1)..(531): Homolog of NCBI NO: 38344183 NR Description: OSJNBa0053K19.22 [Oryza sativa (japonica
  misc_feature (1)..(530): Homolog of NCBI NO: 40253811 NR Description: hypothetical protein [Oryza sativa (japonica
  misc_feature (78)..(246): Homolog of NCBI NO: 29367527 NR Description: unknown [Oryza sativa (japonica cultivar-group)]
  misc_feature (19)..(252): Homolog of NCBI NO: 18399293 NR Description: expressed protein
  misc_feature (93)..(531): Homolog of NCBI NO: 15231114 NR Description: unknown protein; protein id: At3g20350.1
  misc_feature (78)..(246): Homolog of NCBI NO: 29367527 NR Description: unknown [Oryza sativa (japonica cultivar-group)]
  misc_feature (1)..(530): Homolog of NCBI NO: 40253811 NR Description: hypothetical protein [Oryza sativa (japonica
  misc_feature (1)..(531): Homolog of NCBI NO: 38344183 NR Description: OSJNBa0053K19.22 [Oryza sativa (japonica
  misc_feature (8)..(464): Homolog of NCBI NO: 9294553 NR Description: gb|AAF00675.1~gene_id:MQC12.10~similar to unknown
  misc_feature (1)..(464): Homolog of NCBI NO: 15231114 NR Description: unknown protein; protein id: At3g20350.1

SEQ ID NO: 48785 - DNA, 2500 bp, Arabidopsis thaliana; identical to SEQ ID NO: 44754
  misc_feature (1)..(2500): Ceres Seq. ID no. 13503824
  misc_feature: MA Experiment ID: 20000173 Result: Down-regulated in Transcription
  misc_feature: MA Experiment 20000173 PARAMETER Experiment Name: At_42deg_Heat_P Parameter: Age (day) Value: 14
  misc_feature: MA Experiment 20000173 PARAMETER Experiment Name: At_42deg_Heat_P Parameter: Organism Value: A. thaliana
  misc_feature: MA Experiment 20000173 PARAMETER Experiment Name: At_42deg_Heat_P Parameter: Plant Line Value: WS
  misc_feature: MA Experiment 20000173 PARAMETER Experiment Name: At_42deg_Heat_P Parameter: Temperature (deg C) Value: 42 vs. 22
  misc_feature: MA Experiment 20000173 PARAMETER Experiment Name: At_42deg_Heat_P Parameter: Timepoint (hr) Value: 6
  misc_feature: MA Experiment 20000173 PARAMETER Experiment Name: At_42deg_Heat_P Parameter: Tissue Value: Aerial
  misc_feature: MA Experiment ID: 20000184 Result: Down-regulated in Transcription
  misc_feature: MA Experiment 20000184 PARAMETER Experiment Name: At_Shoots__P Parameter: Age (day) Value: 7
  misc_feature: MA Experiment 20000184 PARAMETER Experiment Name: At_Shoots__P Parameter: Tissue Value: Shoots vs. Whole Plant
  misc_feature: MA Experiment ID: 20000234 Result: Up-regulated in Transcription
  misc_feature: MA Experiment 20000234 PARAMETER Experiment Name: At_Siliques_P Parameter: Age (day) Value: 21
  misc_feature: MA Experiment 20000234 PARAMETER Experiment Name: At_Siliques_P Parameter: Organism Value: A. thaliana
  misc_feature: MA Experiment 20000234 PARAMETER Experiment Name: At_Siliques_P Parameter: Plant Line Value: WS
  misc_feature: MA Experiment 20000234 PARAMETER Experiment Name: At_Siliques_P Parameter: Tissue Value: Less Than 5mm Siliques vs. Whole Plant
  misc_feature: MA Experiment ID: 20000235 Result: Up-regulated in Transcription
  misc_feature: MA Experiment 20000235 PARAMETER Experiment Name: At_Siliques_P Parameter: Age (day) Value: 21
  misc_feature: MA Experiment 20000235 PARAMETER Experiment Name: At_Siliques_P Parameter: Organism Value: A. thaliana
  misc_feature: MA Experiment 20000235 PARAMETER Experiment Name: At_Siliques_P Parameter: Plant Line Value: WS
  misc_feature: MA Experiment 20000235 PARAMETER Experiment Name: At_Siliques_P Parameter: Tissue Value: 5-10mm Siliques vs. Whole Plant
  misc_feature: MA Experiment ID: 20000264 Result: Up-regulated in Transcription
  misc_feature: MA Experiment 20000264 PARAMETER Experiment Name: At_Open_Flower_P Parameter: Age (day) Value: 21
  misc_feature: MA Experiment 20000264 PARAMETER Experiment Name: At_Open_Flower_P Parameter: Plant Line Value: WS
  misc_feature: MA Experiment 20000264 PARAMETER Experiment Name: At_Open_Flower_P Parameter: Tissue Value: Open Flower vs. Whole Plant
  misc_feature: MA Experiment ID: 20000265 Result: Up-regulated in Transcription
  misc_feature: MA Experiment 20000265 PARAMETER Experiment Name: At_Open_Flower_P Parameter: Age (day) Value: 21
  misc_feature: MA Experiment 20000265 PARAMETER Experiment Name: At_Open_Flower_P Parameter: Plant Line Value: WS
  misc_feature: MA Experiment 20000265 PARAMETER Experiment Name: At_Open_Flower_P Parameter: Tissue Value: Closed Flower vs. Whole Plant
  misc_feature: MA Experiment ID: 20000286 Result: Up-regulated in Transcription
  misc_feature: MA Experiment 20000286 PARAMETER Experiment Name: At_Open_Flower_P Parameter: Age (day) Value: 21
  misc_feature: MA Experiment 20000286 PARAMETER Experiment Name: At_Open_Flower_P Parameter: Plant Line Value: WS
  misc_feature: MA Experiment 20000286 PARAMETER Experiment Name: At_Open_Flower_P Parameter: Tissue Value: Half Open vs. Whole Plant
  misc_feature: MA Experiment ID: 20000439 Result: Up-regulated in Transcription
  misc_feature: MA Experiment 20000439 PARAMETER Experiment Name: At_Roots__P Parameter: Age (day) Value: 14 vs. 21
  misc_feature: MA Experiment 20000439 PARAMETER Experiment Name: At_Roots__P Parameter: Organism Value: A. thaliana
  misc_feature: MA Experiment 20000439 PARAMETER Experiment Name: At_Roots__P Parameter: Tissue Value: Roots vs. Whole Plant
  misc_feature: MA Experiment ID: 20000794 Result: Up-regulated in Transcription
  misc_feature: MA Experiment 20000794 PARAMETER Experiment Name: At_Petals_P Parameter: Age (day) Value: 23-25 days
  misc_feature: MA Experiment 20000794 PARAMETER Experiment Name: At_Petals_P Parameter: Plant Line Value: WS
  misc_feature: MA Experiment 20000794 PARAMETER Experiment Name: At_Petals_P Parameter: Tissue Value: Petals vs. Whole plant
  misc_feature: MA Experiment ID: 20001451 Result: Down-regulated in Transcription
  misc_feature: MA Experiment 20001451 PARAMETER Experiment Name: At_Far-red-induction_P Parameter: Age (day) Value: 7
  misc_feature: MA Experiment 20001451 PARAMETER Experiment Name: At_Far-red-induction_P Parameter: Light Value: Far-red vs. White
  misc_feature: MA Experiment 20001451 PARAMETER Experiment Name: At_Far-red-induction_P Parameter: Organism Value: A. thaliana
  misc_feature: MA Experiment 20001451 PARAMETER Experiment Name: At_Far-red-induction_P Parameter: Plant Line Value: Columbia
  misc_feature: MA Experiment 20001451 PARAMETER Experiment Name: At_Far-red-induction_P Parameter: Timepoint (hr) Value: 24
  misc_feature: MA Experiment 20001451 PARAMETER Experiment Name: At_Far-red-induction_P Parameter: Tissue Value: Whole Plant

SEQ ID NO: 48786 - protein, 772 aa, Arabidopsis thaliana; identical to SEQ ID NO: 44755
  peptide (1)..(772): Ceres Seq. ID no. 13503825
  misc_feature (31)..(174): Pfam Name: NUDIX domain Pfam Description: NUDIX domain
  misc_feature (31)..(174): Pfam Name: NUDIX domain Pfam Description: NUDIX domain
  misc_feature (1)..(181): Homolog of NCBI NO: 15893737 NR Description: Hydrolase of MutT (Nudix) family [Clostridium
  misc_feature (4)..(169): Homolog of NCBI NO: 16799464 NR Description: similar to different proteins [Listeria innocua]
  misc_feature (4)..(169): Homolog of NCBI NO: 16802413 NR Description: similar to different proteins [Listeria
  misc_feature (339)..(762): Homolog of NCBI NO: 29347256 NR Description: putative dipeptidyl-peptidase III
  misc_feature (1)..(107): Homolog of NCBI NO: 26450678 NR Description: unknown protein [Arabidopsis thaliana]
  misc_feature (1)..(181): Homolog of NCBI NO: 15893737 NR Description: Hydrolase of MutT (Nudix) family [Clostridium
  misc_feature (4)..(169): Homolog of NCBI NO: 16802413 NR Description: similar to different proteins [Listeria
  misc_feature (1)..(107): Homolog of NCBI NO: 26450678 NR Description: unknown protein [Arabidopsis thaliana]
  misc_feature (358)..(772): Homolog of NCBI NO: 7715590 NR Description: F20B17.11 [Arabidopsis thaliana]
  misc_feature (22)..(213): Homolog of NCBI NO: 7715590 NR Description: F20B17.11 [Arabidopsis thaliana]
  misc_feature (1)..(22): Homolog of NCBI NO: 7715590 NR Description: F20B17.11 [Arabidopsis thaliana]
  misc_feature (212)..(530): Homolog of NCBI NO: 7715590 NR Description: F20B17.11 [Arabidopsis thaliana]
  misc_feature (442)..(772): Homolog of NCBI NO: 15912329 NR Description: At1g79690/F20B17_11 [Arabidopsis thaliana]
  misc_feature (339)..(762): Homolog of NCBI NO: 29347256 NR Description: putative dipeptidyl-peptidase III
  misc_feature (4)..(169): Homolog of NCBI NO: 16799464 NR Description: similar to different proteins [Listeria innocua]
  misc_feature (442)..(772): Homolog of NCBI NO: 15912329 NR Description: At1g79690/F20B17_11 [Arabidopsis thaliana]
  misc_feature (212)..(530): Homolog of NCBI NO: 7715590 NR Description: F20B17.11 [Arabidopsis thaliana]
  misc_feature (1)..(22): Homolog of NCBI NO: 7715590 NR Description: F20B17.11 [Arabidopsis thaliana]
  misc_feature (22)..(213): Homolog of NCBI NO: 7715590 NR Description: F20B17.11 [Arabidopsis thaliana]
  misc_feature (358)..(772): Homolog of NCBI NO: 7715590 NR Description: F20B17.11 [Arabidopsis thaliana]

SEQ ID NO: 48787 - protein, 539 aa, Arabidopsis thaliana; identical to SEQ ID NO: 44756
  peptide (1)..(539): Ceres Seq. ID no. 13503826
  misc_feature (106)..(529): Homolog of NCBI NO: 29347256 NR Description: putative dipeptidyl-peptidase III
  misc_feature (209)..(539): Homolog of NCBI NO: 15912329 NR Description: At1g79690/F20B17_11 [Arabidopsis thaliana]
  misc_feature (1)..(297): Homolog of NCBI NO: 7715590 NR Description: F20B17.11 [Arabidopsis thaliana]
  misc_feature (125)..(539): Homolog of NCBI NO: 7715590 NR Description: F20B17.11 [Arabidopsis thaliana]
  misc_feature (106)..(529): Homolog of NCBI NO: 29347256 NR Description: putative dipeptidyl-peptidase III
  misc_feature (209)..(539): Homolog of NCBI NO: 15912329 NR Description: At1g79690/F20B17_11 [Arabidopsis thaliana]
  misc_feature (1)..(297): Homolog of NCBI NO: 7715590 NR Description: F20B17.11 [Arabidopsis thaliana]
  misc_feature (125)..(539): Homolog of NCBI NO: 7715590 NR Description: F20B17.11 [Arabidopsis thaliana]

SEQ ID NO: 48788 - protein, 442 aa, Arabidopsis thaliana; identical to SEQ ID NO: 44757
  peptide (1)..(442): Ceres Seq. ID no. 13503827
  misc_feature (9)..(432): Homolog of NCBI NO: 29347256 NR Description: putative dipeptidyl-peptidase III
  misc_feature (112)..(442): Homolog of NCBI NO: 15912329 NR Description: At1g79690/F20B17_11 [Arabidopsis thaliana]
  misc_feature (1)..(200): Homolog of NCBI NO: 7715590 NR Description: F20B17.11 [Arabidopsis thaliana]
  misc_feature (28)..(442): Homolog of NCBI NO: 7715590 NR Description: F20B17.11 [Arabidopsis thaliana]
  misc_feature (9)..(432): Homolog of NCBI NO: 29347256 NR Description: putative dipeptidyl-peptidase III
  misc_feature (112)..(442): Homolog of NCBI NO: 15912329 NR Description: At1g79690/F20B17_11 [Arabidopsis thaliana]
  misc_feature (1)..(200): Homolog of NCBI NO: 7715590 NR Description: F20B17.11 [Arabidopsis thaliana]
  misc_feature (28)..(442): Homolog of NCBI NO: 7715590 NR Description: F20B17.11 [Arabidopsis thaliana]

SEQ ID NO: 48789 - DNA, 2769 bp, Arabidopsis thaliana
  misc_feature (1)..(2769): Ceres Seq. ID no. 14310267
  misc_feature: MA Experiment ID: 20000185 Result: Up-regulated in Transcription
  misc_feature: MA Experiment 20000185 PARAMETER Experiment Name: At_Roots__P Parameter: Age (day) Value: 7 vs. 21
  misc_feature: MA Experiment 20000185 PARAMETER Experiment Name: At_Roots__P Parameter: Organism Value: A. thaliana
  misc_feature: MA Experiment 20000185 PARAMETER Experiment Name: At_Roots__P Parameter: Tissue Value: Roots vs. Whole Plant
  misc_feature: MA Experiment ID: 20001451 Result: Down-regulated in Transcription
  misc_feature: MA Experiment 20001451 PARAMETER Experiment Name: At_Far-red-induction_P Parameter: Age (day) Value: 7
  misc_feature: MA Experiment 20001451 PARAMETER Experiment Name: At_Far-red-induction_P Parameter: Light Value: Far-red vs. White
  misc_feature: MA Experiment 20001451 PARAMETER Experiment Name: At_Far-red-induction_P Parameter: Organism Value: A. thaliana
  misc_feature: MA Experiment 20001451 PARAMETER Experiment Name: At_Far-red-induction_P Parameter: Plant Line Value: Columbia
  misc_feature: MA Experiment 20001451 PARAMETER Experiment Name: At_Far-red-induction_P Parameter: Timepoint (hr) Value: 24
  misc_feature: MA Experiment 20001451 PARAMETER Experiment Name: At_Far-red-induction_P Parameter: Tissue Value: Whole Plant
gaaaataatttctcgaaagagaaaaaaagagagagagagagagagatggagcttctacagtactaaaagctgagtgaatccgaagaaatctccgccaacggaatattttttttctgggagctgaaaatcgttggtgacgatggcggattctctttctagggtttacggaactctgtttagtggtgttaatatatctctcttctcggatccaccgttgaaaaccccctgaagagtgtttttttttccgggtgtaaggtcttttacgtttcgttttttcttgagatttcgtcttccgctgtgagtttctgttctcgcggcgagtttttgtgtagatctgagggttttcaaggcaagagaaagtgtcggtgatgtcgattttctcactcgcgagctcttctgattcacaaagagatgacctaataatggcgttgaaggcggtggttattgtatattgtgtggtttctctcgtcagtgttcaattagctgatgctcaacatgaaggactgccagtttcaccaacgttatcaccttcaacttcaccagttatcactgatctgcccctaccagctgaatttccgcggtttcacagaaagtatttcgcaccacaacaagcagaagcacctcagcattctcccccttatagtcgtttggtcgcttctgatcatccccctaccagctcacatttctccaaaccttccatgaaaaggaatgctcagtctcctggagccggcttggctgatattgctccagcacaatctagcaatggtgttcttcctgatgccttaactcagccacctttgtcgccctccatttcaaattgttgcaaatcagatatggtgcttaaacgaagaagtattggttgccactgcgtgtatcctataaaactggacatccttctcttgaatgtttcagaaactcctagttggaacatgttcttgaacgaatttgctacccagcttggtctcctacctcaccaaatcgagctgattaacttctatgtgctaagcttatcaaggatgaacatatcgatggatatcacccctcattctggaattagtttctcagctagtcaggcatccgcaataaactcttcccttatcagccacaagattcaatttagccctactttggtgggagattacaaacttctaaaccttacttggtttgaggcccctgcaccttcgcaagcacctctagtggcttcttcacctcataaagcaccatcacaaggatcctcagcaactacgtcagtaagatctccagggaaaaagaggcatcccaatcttattcttatcttttctatagccgctggtgtgcttatacttgccataatcactgtacttgttatttgttcccgcgcactccgagaagagaaagctccagatcctcacaaagaagctgtaaaaccaaggaacctggacgctggttcatttgggggatctcttcctcacccagcaagtacacggtttctgtcatatgaagaactcaaagaggcaactagcaattttgaatctgctagcattctaggagaaggtgggtttggcaaggtttacagaggcatcttagccgatggtactgctgtagcgattaagaagctcacaagtggtgggccacaaggtgataaagaattccaggtggagattgatatgcttagccgtcttcatcatcgtaatcttgtgaaacttgtgggttactatagtagtcgagattcttctcagcacctactttgttatgagcttgttccaaatggcagcctcgaggcttggctccatgggcctctcgggttgaactgtcctcttgattgggacaccagaatgaagattgcacttgatgctgcaagaggacttgcataccttcatgaagactcgcaaccctccgttatacacagagattttaaagcctctaatatactccttgaaaacaacttcaacgccaaagttgcagattttggcctagccaaacaagctcctgaaggcaggggtaatcacttatctactcgtgttatgggcacatttggatatgttgcgcctgaatatgcaatgacgggacacctactcgtcaagagtgatgtttatagttacggtgtggtccttctcgaattgttaactggtagaaaacctgtggatatgtcacaaccttcaggccaagaaaatctcgtcacttggacaaggccagttttaagagacaaagaccggttagaagaactagtcgattcaagacttgaaggaaaatacccgaaagaagatttcataagagtatgcacaatcgctgcagcttgtgttgcacctgaagctagccagagaccaacgatgggcgaagtggttcagtcacttaaaatggttcaacgggtggttgagtatcaagacccggttttaaacacttcaaataaagctcgtcctaaccggagacaatcatcagctacgttcgagtcagaagtaacctcttctatgttctcttctggtccttattctggtctaagcgcttttgatcatgaaaatattacacgaacaactgttttctcagaagatcttcacgaaggccgatgatagaagccagggttttcttctttttatttgtttttctcccacttacggtgagaaaatttccaccagagaagcttttgagtttgggacattattacagctctttggattttggattctcctttattggaggatagaattttgtatatatttttgcgttaattaattaatatttgccacaaccatcagatatacaaatagaatttgaatatactttttccaatat

SEQ ID NO: 48790 - protein, 725 aa, Arabidopsis thaliana
  peptide (1)..(725): Ceres Seq. ID no. 14310268
  misc_feature (352)..(683): Homolog of NCBI NO: 15240947 NR Description: protein kinase family [Arabidopsis thaliana]
  misc_feature (366)..(655): Homolog of NCBI NO: 34894174 NR Description: putative protein kinase [Oryza sativa (japonica
  misc_feature (306)..(658): Homolog of NCBI NO: 34910468 NR Description: putative protein kinase [Oryza sativa (japonica
  misc_feature (352)..(699): Homolog of NCBI NO: 34903544 NR Description: putative protein kinase APK1AArabidopsis thaliana
  misc_feature (364)..(658): Homolog of NCBI NO: 25287641 NR Description: probable protein kinase [imported] - Arabidopsis
  misc_feature (354)..(724): Homolog of NCBI NO: 22327898 NR Description: protein kinase family [Arabidopsis thaliana]
  misc_feature (354)..(724): Homolog of NCBI NO: 20453162 NR Description: At5g56885 [Arabidopsis thaliana]
  misc_feature (144)..(658): Homolog of NCBI NO: 30680947 NR Description: protein kinase family [Arabidopsis thaliana]
  misc_feature (46)..(658): Homolog of NCBI NO: 32488293 NR Description: OSJNBb0065L13.2 [Oryza sativa (japonica
  misc_feature (21)..(725): Homolog of NCBI NO: 34902828 NR Description: unnamed protein product [Oryza sativa (japonica
MSIFSLASSSDSQRDDLIMALKAVVIVYCVVSLVSVQLADAQHEGLPVSPTLSPSTSPVITDLPLPAEFPRFHRKYFAPQQAEAPQHSPPYSRLVASDHPPTSSHFSKPSMKRNAQSPGAGLADIAPAQSSNGVLPDALTQPPLSPSISNCCKSDMVLKRRSIGCHCVYPIKLDILLLNVSETPSWNMFLNEFATQLGLLPHQIELINFYVLSLSRMNISMDITPHSGISFSASQASAINSSLISHKIQFSPTLVGDYKLLNLTWFEAPAPSQAPLVASSPHKAPSQGSSATTSVRSPGKKRHPNLILIFSIAAGVLILAIITVLVICSRALREEKAPDPHKEAVKPRNLDAGSFGGSLPHPASTRFLSYEELKEATSNFESASILGEGGFGKVYRGILADGTAVAIKKLTSGGPQGDKEFQVEIDMLSRLHHRNLVKLVGYYSSRDSSQHLLCYELVPNGSLEAWLHGPLGLNCPLDWDTRMKIALDAARGLAYLHEDSQPSVIHRDFKASNILLENNFNAKVADFGLAKQAPEGRGNHLSTRVMGTFGYVAPEYAMTGHLLVKSDVYSYGVVLLELLTGRKPVDMSQPSGQENLVTWTRPVLRDKDRLEELVDSRLEGKYPKEDFIRVCTIAAACVAPEASQRPTMGEVVQSLKMVQRVVEYQDPVLNTSNKARPNRRQSSATFESEVTSSMFSSGPYSGLSAFDHENITRTTVFSEDLHEGR

SEQ ID NO: 48791 - protein, 707 aa, Arabidopsis thaliana
  peptide (1)..(707): Ceres Seq. ID no. 14310269
  misc_feature (334)..(665): Homolog of NCBI NO: 15240947 NR Description: protein kinase family [Arabidopsis thaliana]
  misc_feature (348)..(637): Homolog of NCBI NO: 34894174 NR Description: putative protein kinase [Oryza sativa (japonica
  misc_feature (288)..(640): Homolog of NCBI NO: 34910468 NR Description: putative protein kinase [Oryza sativa (japonica
  misc_feature (334)..(681): Homolog of NCBI NO: 34903544 NR Description: putative protein kinase APK1AArabidopsis thaliana
  misc_feature (346)..(640): Homolog of NCBI NO: 25287641 NR Description: probable protein kinase [imported] - Arabidopsis
  misc_feature (336)..(706): Homolog of NCBI NO: 22327898 NR Description: protein kinase family [Arabidopsis thaliana]
  misc_feature (336)..(706): Homolog of NCBI NO: 20453162 NR Description: At5g56885 [Arabidopsis thaliana]
  misc_feature (126)..(640): Homolog of NCBI NO: 30680947 NR Description: protein kinase family [Arabidopsis thaliana]
  misc_feature (28)..(640): Homolog of NCBI NO: 32488293 NR Description: OSJNBb0065L13.2 [Oryza sativa (japonica
  misc_feature (3)..(707): Homolog of NCBI NO: 34902828 NR Description: unnamed protein product [Oryza sativa (japonica
MALKAVVIVYCVVSLVSVQLADAQHEGLPVSPTLSPSTSPVITDLPLPAEFPRFHRKYFAPQQAEAPQHSPPYSRLVASDHPPTSSHFSKPSMKRNAQSPGAGLADIAPAQSSNGVLPDALTQPPLSPSISNCCKSDMVLKRRSIGCHCVYPIKLDILLLNVSETPSWNMFLNEFATQLGLLPHQIELINFYVLSLSRMNISMDITPHSGISFSASQASAINSSLISHKIQFSPTLVGDYKLLNLTWFEAPAPSQAPLVASSPHKAPSQGSSATTSVRSPGKKRHPNLILIFSIAAGVLILAIITVLVICSRALREEKAPDPHKEAVKPRNLDAGSFGGSLPHPASTRFLSYEELKEATSNFESASILGEGGFGKVYRGILADGTAVAIKKLTSGGPQGDKEFQVEIDMLSRLHHRNLVKLVGYYSSRDSSQHLLCYELVPNGSLEAWLHGPLGLNCPLDWDTRMKIALDAARGLAYLHEDSQPSVIHRDFKASNILLENNFNAKVADFGLAKQAPEGRGNHLSTRVMGTFGYVAPEYAMTGHLLVKSDVYSYGVVLLELLTGRKPVDMSQPSGQENLVTWTRPVLRDKDRLEELVDSRLEGKYPKEDFIRVCTIAAACVAPEASQRPTMGEVVQSLKMVQRVVEYQDPVLNTSNKARPNRRQSSATFESEVTSSMFSSGPYSGLSAFDHENITRTTVFSEDLHEGR

SEQ ID NO: 48792 - protein, 615 aa, Arabidopsis thaliana
  peptide (1)..(615): Ceres Seq. ID no. 14310270
  misc_feature (242)..(573): Homolog of NCBI NO: 15240947 NR Description: protein kinase family [Arabidopsis thaliana]
  misc_feature (256)..(545): Homolog of NCBI NO: 34894174 NR Description: putative protein kinase [Oryza sativa (japonica
  misc_feature (196)..(548): Homolog of NCBI NO: 34910468 NR Description: putative protein kinase [Oryza sativa (japonica
  misc_feature (242)..(589): Homolog of NCBI NO: 34903544 NR Description: putative protein kinase APK1AArabidopsis thaliana
  misc_feature (254)..(548): Homolog of NCBI NO: 25287641 NR Description: probable protein kinase [imported] - Arabidopsis
  misc_feature (244)..(614): Homolog of NCBI NO: 22327898 NR Description: protein kinase family [Arabidopsis thaliana]
  misc_feature (244)..(614): Homolog of NCBI NO: 20453162 NR Description: At5g56885 [Arabidopsis thaliana]
  misc_feature (34)..(548): Homolog of NCBI NO: 30680947 NR Description: protein kinase family [Arabidopsis thaliana]
  misc_feature (1)..(548): Homolog of NCBI NO: 32488293 NR Description: OSJNBb0065L13.2 [Oryza sativa (japonica
  misc_feature (1)..(615): Homolog of NCBI NO: 34902828 NR Description: unnamed protein product [Oryza sativa (japonica
MKRNAQSPGAGLADIAPAQSSNGVLPDALTQPPLSPSISNCCKSDMVLKRRSIGCHCVYPIKLDILLLNVSETPSWNMFLNEFATQLGLLPHQIELINFYVLSLSRMNISMDITPHSGISFSASQASAINSSLISHKIQFSPTLVGDYKLLNLTWFEAPAPSQAPLVASSPHKAPSQGSSATTSVRSPGKKRHPNLILIFSIAAGVLILAIITVLVICSRALREEKAPDPHKEAVKPRNLDAGSFGGSLPHPASTRFLSYEELKEATSNFESASILGEGGFGKVYRGILADGTAVAIKKLTSGGPQGDKEFQVEIDMLSRLHHRNLVKLVGYYSSRDSSQHLLCYELVPNGSLEAWLHGPLGLNCPLDWDTRMKIALDAARGLAYLHEDSQPSVIHRDFKASNILLENNFNAKVADFGLAKQAPEGRGNHLSTRVMGTFGYVAPEYAMTGHLLVKSDVYSYGVVLLELLTGRKPVDMSQPSGQENLVTWTRPVLRDKDRLEELVDSRLEGKYPKEDFIRVCTIAAACVAPEASQRPTMGEVVQSLKMVQRVVEYQDPVLNTSNKARPNRRQSSATFESEVTSSMFSSGPYSGLSAFDHENITRTTVFSEDLHEGR

SEQ ID NO: 48793 - DNA, 1560 bp, Arabidopsis thaliana
  misc_feature (1)..(1560): Ceres Seq. ID no. 13578975
  misc_feature: MA Experiment ID: 20000307 Result: Down-regulated in Transcription
  misc_feature: MA Experiment 20000307 PARAMETER Experiment Name: At_Germinating_Seeds_Sub_P Parameter: Age (hr) Value: 24 vs. 0
  misc_feature: MA Experiment 20000307 PARAMETER Experiment Name: At_Germinating_Seeds_Sub_P Parameter: Organism Value: A. thaliana
  misc_feature: MA Experiment 20000307 PARAMETER Experiment Name: At_Germinating_Seeds_Sub_P Parameter: Plant Line Value: WS
  misc_feature: MA Experiment 20000307 PARAMETER Experiment Name: At_Germinating_Seeds_Sub_P Parameter: Tissue Value: Germinating Seeds
  misc_feature: MA Experiment ID: 20000315 Result: Down-regulated in Transcription
  misc_feature: MA Experiment 20000315 PARAMETER Experiment Name: At_14day_Shoots-Roots_Sub_P Parameter: Age (day) Value: 14
  misc_feature: MA Experiment 20000315 PARAMETER Experiment Name: At_14day_Shoots-Roots_Sub_P Parameter: Organism Value: A. thaliana
  misc_feature: MA Experiment 20000315 PARAMETER Experiment Name: At_14day_Shoots-Roots_Sub_P Parameter: Plant Line Value: WS
  misc_feature: MA Experiment 20000315 PARAMETER Experiment Name: At_14day_Shoots-Roots_Sub_P Parameter: Tissue Value: Shoots vs. Whole Plant
  misc_feature: MA Experiment ID: 20000355 Result: Down-regulated in Transcription
  misc_feature: MA Experiment 20000355 PARAMETER Experiment Name: At_Siliques_Sub_P Parameter: Age (day) Value: 21
  misc_feature: MA Experiment 20000355 PARAMETER Experiment Name: At_Siliques_Sub_P Parameter: Organism Value: A. thaliana
  misc_feature: MA Experiment 20000355 PARAMETER Experiment Name: At_Siliques_Sub_P Parameter: Plant Line Value: WS
  misc_feature: MA Experiment 20000355 PARAMETER Experiment Name: At_Siliques_Sub_P Parameter: Tissue Value: Less Than 5mm Siliques vs. Whole Plant
aacaaaacttctccggccatggatcctggcgacccaacttcaataatcttttcaaagatcagaactttcgaacttgagaacgcttccagagtcattgactattttctcttgcaagacatggaacaaagagatttgattcgaattgcttttggtcctgactctctcatacagactttctgtcagaaagctaaagtcgatttaggtttttcctcgaacggtttctcgagacccatcaatatccatggccagtcattgtcctcgtcttctcccagaaatgggttcttagagttctcgagaaaccctagtaaccctttgtcttcttcgttaactttgaacacactcagagataataagcctaacttcaattctagtccttttcgtgaaagttcatcactttttgcctcttcttccggcgatgagcagcagcaacaacaattcagtaacaactttctgttcacaaacgacgaggacccatttgccaattctcacaagaggagtttctctgctaacgatgcttgttttgagtcagaggaaccatggtttggaggaggaaatggttgtcatcaatttccacaaggcggtttagttgatggttttggttcctctggtgtctttggatcgccgagtgagatggattacatgcttgaggggatgatgaggatgaagttagctcagcaaaagagcatggttgctgctcagtttatggcggcttgtggctctccaatgttgcatagacacggatcaggacattttggagaagaatgtggtaactattttagtcaaggaaggcatgaaagagaggattcagtctctaaacagatttacttgacatttccatctgaaagctccttcactgatgaagacgtctcaacctatttcagagattttggacttgtggatgatgtgaggattccatatcagcagcaaaggatgtatgggtttgtaacttttgctaaggctgaaactgtgagaaccatattagctcgtggaaaccctcatttcatatgtgactcacgtgtgctcgttaaaccatacaaggagaaaggaaaaatccttcaaaagaggcagcagcaacaactacacgagttgttggagagagggaactattcaccttcttcaagtccgtctggaaaggactcgagggaactatatgaatgtcgcttaggaccaaggatgttttcaaagaagacacaggagatgttgcgaagaaaaaccgagcaagctgatttacaacatgccatagaacgtagtccttctattggttctccctctcatttcccacctcgattcaatcatagtcttctctttcaatcaggaaacaacaacgaagaaatcatggaaggcgacagtgatagaagtgagaaagatcttcaacaagtagcaaccagcaacgaagaacgtggttacaataacggtttctacaaagggcaagagacgagtctggagaatactctccctgatagcttgtttggttctccaaaaaaatctggcgaaacctaccaaaccgagtctgataccgagcataataataaggaagcctcatcaaatcagttagcgtag

SEQ ID NO: 48794 - protein, 519 aa, Arabidopsis thaliana
  peptide (1)..(519): Ceres Seq. ID no. 13578976
  misc_feature (285)..(342): Pfam Name: RNA recognition motif. (a.k.a. RRM, RBD, or RNP domain) Pfam Description: RNA recognition motif. (a.k.a. RRM, RBD, or RNP
  misc_feature (7)..(108): Homolog of NCBI NO: 26453236 NR Description: unknown protein [Arabidopsis thaliana]
  misc_feature (265)..(415): Homolog of NCBI NO: 26453236 NR Description: unknown protein [Arabidopsis thaliana]
  misc_feature (134)..(268): Homolog of NCBI NO: 22331232 NR Description: RNA recognition motif (RRM)-containing protein
  misc_feature (134)..(268): Homolog of NCBI NO: 11994270 NR Description: emb|CAB41315.1~gene_id:MSA6.14~similar to unknown
  misc_feature (7)..(203): Homolog of NCBI NO: 22331232 NR Description: RNA recognition motif (RRM)-containing protein
  misc_feature (7)..(203): Homolog of NCBI NO: 11994270 NR Description: emb|CAB41315.1~gene_id:MSA6.14~similar to unknown
  misc_feature (244)..(471): Homolog of NCBI NO: 22331232 NR Description: RNA recognition motif (RRM)-containing protein
  misc_feature (244)..(471): Homolog of NCBI NO: 11994270 NR Description: emb|CAB41315.1~gene_id:MSA6.14~similar to unknown
  misc_feature (7)..(415): Homolog of NCBI NO: 15217946 NR Description: expressed protein [Arabidopsis thaliana]
  misc_feature (7)..(519): Homolog of NCBI NO: 30695000 NR Description: expressed protein [Arabidopsis thaliana]
NKTSPAMDPGDPTSIIFSKIRTFELENASRVIDYFLLQDMEQRDLIRIAFGPDSLIQTFCQKAKVDLGFSSNGFSRPINIHGQSLSSSSPRNGFLEFSRNPSNPLSSSLTLNTLRDNKPNFNSSPFRESSSLFASSSGDEQQQQQFSNNFLFTNDEDPFANSHKRSFSANDACFESEEPWFGGGNGCHQFPQGGLVDGFGSSGVFGSPSEMDYMLEGMMRMKLAQQKSMVAAQFMAACGSPMLHRHGSGHFGEECGNYFSQGRHEREDSVSKQIYLTFPSESSFTDEDVSTYFRDFGLVDDVRIPYQQQRMYGFVTFAKAETVRTILARGNPHFICDSRVLVKPYKEKGKILQKRQQQQLHELLERGNYSPSSSPSGKDSRELYECRLGPRMFSKKTQEMLRRKTEQADLQHAIERSPSIGSPSHFPPRFNHSLLFQSGNNNEEIMEGDSDRSEKDLQQVATSNEERGYNNGFYKGQETSLENTLPDSLFGSPKKSGETYQTESDTEHNNKEASSNQLA

SEQ ID NO: 48795 - protein, 513 aa, Arabidopsis thaliana
  peptide (1)..(513): Ceres Seq. ID no. 13578977
  misc_feature (279)..(336): Pfam Name: RNA recognition motif. (a.k.a. RRM, RBD, or RNP domain) Pfam Description: RNA recognition motif. (a.k.a. RRM, RBD, or RNP
  misc_feature (1)..(102): Homolog of NCBI NO: 26453236 NR Description: unknown protein [Arabidopsis thaliana]
  misc_feature (259)..(409): Homolog of NCBI NO: 26453236 NR Description: unknown protein [Arabidopsis thaliana]
  misc_feature (128)..(262): Homolog of NCBI NO: 22331232 NR Description: RNA recognition motif (RRM)-containing protein
  misc_feature (128)..(262): Homolog of NCBI NO: 11994270 NR Description: emb|CAB41315.1~gene_id:MSA6.14~similar to unknown
  misc_feature (1)..(197): Homolog of NCBI NO: 22331232 NR Description: RNA recognition motif (RRM)-containing protein
  misc_feature (1)..(197): Homolog of NCBI NO: 11994270 NR Description: emb|CAB41315.1~gene_id:MSA6.14~similar to unknown
  misc_feature (238)..(465): Homolog of NCBI NO: 22331232 NR Description: RNA recognition motif (RRM)-containing protein
  misc_feature (238)..(465): Homolog of NCBI NO: 11994270 NR Description: emb|CAB41315.1~gene_id:MSA6.14~similar to unknown
  misc_feature (1)..(409): Homolog of NCBI NO: 15217946 NR Description: expressed protein [Arabidopsis thaliana]
  misc_feature (1)..(513): Homolog of NCBI NO: 30695000 NR Description: expressed protein [Arabidopsis thaliana]
MDPGDPTSIIFSKIRTFELENASRVIDYFLLQDMEQRDLIRIAFGPDSLIQTFCQKAKVDLGFSSNGFSRPINIHGQSLSSSSPRNGFLEFSRNPSNPLSSSLTLNTLRDNKPNFNSSPFRESSSLFASSSGDEQQQQQFSNNFLFTNDEDPFANSHKRSFSANDACFESEEPWFGGGNGCHQFPQGGLVDGFGSSGVFGSPSEMDYMLEGMMRMKLAQQKSMVAAQFMAACGSPMLHRHGSGHFGEECGNYFSQGRHEREDSVSKQIYLTFPSESSFTDEDVSTYFRDFGLVDDVRIPYQQQRMYGFVTFAKAETVRTILARGNPHFICDSRVLVKPYKEKGKILQKRQQQQLHELLERGNYSPSSSPSGKDSRELYECRLGPRMFSKKTQEMLRRKTEQADLQHAIERSPSIGSPSHFPPRFNHSLLFQSGNNNEEIMEGDSDRSEKDLQQVATSNEERGYNNGFYKGQETSLENTLPDSLFGSPKKSGETYQTESDTEHNNKEASSNQLA

SEQ ID NO: 48796 - protein, 480 aa, Arabidopsis thaliana
  peptide (1)..(480): Ceres Seq. ID no. 13578978
  misc_feature (246)..(303): Pfam Name: RNA recognition motif. (a.k.a. RRM, RBD, or RNP domain) Pfam Description: RNA recognition motif. (a.k.a. RRM, RBD, or RNP
  misc_feature (1)..(69): Homolog of NCBI NO: 26453236 NR Description: unknown protein [Arabidopsis thaliana]
  misc_feature (226)..(376): Homolog of NCBI NO: 26453236 NR Description: unknown protein [Arabidopsis thaliana]
  misc_feature (95)..(229): Homolog of NCBI NO: 22331232 NR Description: RNA recognition motif (RRM)-containing protein
  misc_feature (95)..(229): Homolog of NCBI NO: 11994270 NR Description: emb|CAB41315.1~gene_id:MSA6.14~similar to unknown
  misc_feature (1)..(164): Homolog of NCBI NO: 22331232 NR Description: RNA recognition motif (RRM)-containing protein
  misc_feature (1)..(164): Homolog of NCBI NO: 11994270 NR Description: emb|CAB41315.1~gene_id:MSA6.14~similar to unknown
  misc_feature (205)..(432): Homolog of NCBI NO: 22331232 NR Description: RNA recognition motif (RRM)-containing protein
  misc_feature (205)..(432): Homolog of NCBI NO: 11994270 NR Description: emb|CAB41315.1~gene_id:MSA6.14~similar to unknown
  misc_feature (1)..(376): Homolog of NCBI NO: 15217946 NR Description: expressed protein [Arabidopsis thaliana]
  misc_feature (1)..(480): Homolog of NCBI NO: 30695000 NR Description: expressed protein [Arabidopsis thaliana]
MEQRDLIRIAFGPDSLIQTFCQKAKVDLGFSSNGFSRPINIHGQSLSSSSPRNGFLEFSRNPSNPLSSSLTLNTLRDNKPNFNSSPFRESSSLFASSSGDEQQQQQFSNNFLFTNDEDPFANSHKRSFSANDACFESEEPWFGGGNGCHQFPQGGLVDGFGSSGVFGSPSEMDYMLEGMMRMKLAQQKSMVAAQFMAACGSPMLHRHGSGHFGEECGNYFSQGRHEREDSVSKQIYLTFPSESSFTDEDVSTYFRDFGLVDDVRIPYQQQRMYGFVTFAKAETVRTILARGNPHFICDSRVLVKPYKEKGKILQKRQQQQLHELLERGNYSPSSSPSGKDSRELYECRLGPRMFSKKTQEMLRRKTEQADLQHAIERSPSIGSPSHFPPRFNHSLLFQSGNNNEEIMEGDSDRSEKDLQQVATSNEERGYNNGFYKGQETSLENTLPDSLFGSPKKSGETYQTESDTEHNNKEASSNQLA

SEQ ID NO: 48797 - DNA, 1818 bp, Arabidopsis thaliana
  misc_feature (1)..(1818): Ceres Seq. ID no. 15168825
  misc_feature: MA Experiment ID: 20000180 Result: Up-regulated in Transcription
  misc_feature: MA Experiment 20000180 PARAMETER Experiment Name: At_Germinating_Seeds_P Parameter: Age (hr) Value: 24 vs. 0
  misc_feature: MA Experiment 20000180 PARAMETER Experiment Name: At_Germinating_Seeds_P Parameter: Tissue Value: Germinating Seeds
  misc_feature: MA Experiment ID: 20000184 Result: Up-regulated in Transcription
  misc_feature: MA Experiment 20000184 PARAMETER Experiment Name: At_Shoots__P Parameter: Age (day) Value: 7
  misc_feature: MA Experiment 20000184 PARAMETER Experiment Name: At_Shoots__P Parameter: Tissue Value: Shoots vs. Whole Plant
  misc_feature: MA Experiment ID: 20000185 Result: Down-regulated in Transcription
  misc_feature: MA Experiment 20000185 PARAMETER Experiment Name: At_Roots__P Parameter: Age (day) Value: 7 vs. 21
  misc_feature: MA Experiment 20000185 PARAMETER Experiment Name: At_Roots__P Parameter: Organism Value: A. thaliana
  misc_feature: MA Experiment 20000185 PARAMETER Experiment Name: At_Roots__P Parameter: Tissue Value: Roots vs. Whole Plant
  misc_feature: MA Experiment ID: 20000438 Result: Up-regulated in Transcription
  misc_feature: MA Experiment 20000438 PARAMETER Experiment Name: At_Shoots__P Parameter: Age (day) Value: 14
  misc_feature: MA Experiment 20000438 PARAMETER Experiment Name: At_Shoots__P Parameter: Tissue Value: Shoots vs. Whole Plant
  misc_feature: MA Experiment ID: 20000439 Result: Down-regulated in Transcription
  misc_feature: MA Experiment 20000439 PARAMETER Experiment Name: At_Roots__P Parameter: Age (day) Value: 14 vs. 21
  misc_feature: MA Experiment 20000439 PARAMETER Experiment Name: At_Roots__P Parameter: Organism Value: A. thaliana
  misc_feature: MA Experiment 20000439 PARAMETER Experiment Name: At_Roots__P Parameter: Tissue Value: Roots vs. Whole Plant
  misc_feature: MA Experiment ID: 20001557 Result: Down-regulated in Transcription
  misc_feature: MA Experiment 20001557 PARAMETER Experiment Name: At_Drought_Soil_Dry_P Parameter: Age (day) Value: 27
  misc_feature: MA Experiment 20001557 PARAMETER Experiment Name: At_Drought_Soil_Dry_P Parameter: Organism Value: A. thaliana
  misc_feature: MA Experiment 20001557 PARAMETER Experiment Name: At_Drought_Soil_Dry_P Parameter: Plant Line Value: WS
  misc_feature: MA Experiment 20001557 PARAMETER Experiment Name: At_Drought_Soil_Dry_P Parameter: Post Timepoint (hr) Value: 3
  misc_feature: MA Experiment 20001557 PARAMETER Experiment Name: At_Drought_Soil_Dry_P Parameter: Post-Treatment Value: Re-Water vs. No Drought
  misc_feature: MA Experiment 20001557 PARAMETER Experiment Name: At_Drought_Soil_Dry_P Parameter: Timepoint (day) Value: 13
  misc_feature: MA Experiment 20001557 PARAMETER Experiment Name: At_Drought_Soil_Dry_P Parameter: Treatment Value: Drought vs. No Drought
  misc_feature: MA Experiment ID: 20001558 Result: Down-regulated in Transcription
  misc_feature: MA Experiment 20001558 PARAMETER Experiment Name: At_Drought_Soil_Dry_P Parameter: Age (day) Value: 27
  misc_feature: MA Experiment 20001558 PARAMETER Experiment Name: At_Drought_Soil_Dry_P Parameter: Organism Value: A. thaliana
  misc_feature: MA Experiment 20001558 PARAMETER Experiment Name: At_Drought_Soil_Dry_P Parameter: Plant Line Value: WS
  misc_feature: MA Experiment 20001558 PARAMETER Experiment Name: At_Drought_Soil_Dry_P Parameter: Post Timepoint (hr) Value: 6
  misc_feature: MA Experiment 20001558 PARAMETER Experiment Name: At_Drought_Soil_Dry_P Parameter: Post-Treatment Value: Re-Water vs. No Drought
  misc_feature: MA Experiment 20001558 PARAMETER Experiment Name: At_Drought_Soil_Dry_P Parameter: Timepoint (day) Value: 13
  misc_feature: MA Experiment 20001558 PARAMETER Experiment Name: At_Drought_Soil_Dry_P Parameter: Treatment Value: Drought vs. No Drought
  misc_feature: MA Experiment ID: 20001905 Result: Down-regulated in Transcription
  misc_feature: MA Experiment 20001905 PARAMETER Experiment Name: At_Drought_Reproduction_P Parameter: Age (day) Value: 40
  misc_feature: MA Experiment 20001905 PARAMETER Experiment Name: At_Drought_Reproduction_P Parameter: Organism Value: A. thaliana
  misc_feature: MA Experiment 20001905 PARAMETER Experiment Name: At_Drought_Reproduction_P Parameter: Plant Line Value: WS
  misc_feature: MA Experiment 20001905 PARAMETER Experiment Name: At_Drought_Reproduction_P Parameter: Timepoint (day) Value: 10
  misc_feature: MA Experiment 20001905 PARAMETER Experiment Name: At_Drought_Reproduction_P Parameter: Tissue Value: Rosettes
  misc_feature: MA Experiment 20001905 PARAMETER Experiment Name: At_Drought_Reproduction_P Parameter: Treatment Value: Drought vs. No Drought
gtctcactccgatccgatcatggctttcgctgtctcggttcagtcacatttcgcaatcagagcgttaaaacgagaccacttcaagaacccttctcctcgtactttctgctcgtgttttaaatcgaggcctgactcgtcttaccttagtttaaaggaacgtacttgcttcgtttccaaaccgggtttagtcactactagatacagacatatattccaggtcggagctgagacgggaggagagttcgccgacagtggagaagtagctgattcgcttgcttctgatgcaccagagtcattttcttggtcttctgtgatactcccgtttatcttcccggctttgggaggattattgtttgggtatgacattggggctacctccggtgctacgctctcacttcagtcacctgcgcttagcggaactacatggtttaacttctcacctgttcagctaggacttgtggttagcggatccttgtatggagcccttcttggctcaatttctgtctatggcgttgctgatttccttggaagaaggcgggaacttattatagctgctgttctctatctcctcgggtctctgatcactggctgtgcccctgatcttaatattctcttagttggaaggcttctctatggctttggtattggtttggcaatgcatggggctcccctctatattgctgagacatgcccatctcaaatccgtggaactttgatatctctgaaagaactcttcatcgtattgggaattttgttgggtttttctgttggaagcttccagattgatgtagttggagggtggcgttacatgtatggatttggtacgcctgttgctttgctgatgggactaggcatgtggagtctccctgcatctcctcgctggttgctgcttagagctgtccaaggtaaaggacaattacaagaatacaaagagaaggccatgcttgccctcagcaaattacgtggcagacctccaggtgataaaatctcaagaagttggtagatgatgcctatttatctgtgaaaacggcctatgaagatgagaaatctgggggaaacttcctggaagtattccaagggcctaatttgaaagctttgacaattggtggaggtttagtcctcttccaacagataactggacagcctagtgttctttattatgcgggttcgattcttcagactgctggattctctgctgctgctgatgcaactcgagtctctgttattattggtgttttcaagttactgatgacatgggtagctgttgcgaaagttgatgatctcggcagacgacctttactgattggaggtgtcagcggcattgcgttgtccttgtttctactgtcagcatactacaagtttctcggaggctttccccttgtcgctgttggtgcactgcttctctatgttggttgttaccagatctcatttggacccatcagctggctaatggtgtcagagattttcccgctccgcacaagagggagagggatcagtcttgcagttcttacaaactttggctccaatgctattgtgacatttgcattttcacctttaaaggaatttcttggagccgagaatcttttccttctctttgggggcatagcactggtatcactgctgtttgtaatactagtagttccagagaccaagggtctcagcttggaagaaattgaatcaaaaatcttgaagtgaaacgttgaagaacatatttgttatagttgattctggtgaaatacatgtatgaggatgtgactattctctttgtaacataatatgtttcgtaatcaatgggaaaaccaaacctttttcatgatt

SEQ ID NO: 48798 - protein, 333 aa, Arabidopsis thaliana
  peptide (1)..(333): Ceres Seq. ID no. 15168826
  misc_feature (107)..(330): Pfam Name: Sugar (and other) transporter Pfam Description: Sugar (and other) transporter
  misc_feature (88)..(295): Homolog of NCBI NO: 15220697 NR Description: sugar transporter family [Arabidopsis thaliana]
  misc_feature (80)..(322): Homolog of NCBI NO: 30686148 NR Description: sugar transporter family [Arabidopsis thaliana]
  misc_feature (70)..(322): Homolog of NCBI NO: 15237892 NR Description: sugar transporter family [Arabidopsis thaliana]
  misc_feature (219)..(322): Homolog of NCBI NO: 6714427 NR Description: hypothetical protein [Arabidopsis thaliana]
  misc_feature (73)..(322): Homolog of NCBI NO: 30678759 NR Description: sugar transporter family [Arabidopsis thaliana]
  misc_feature (95)..(330): Homolog of NCBI NO: 37537174 NR Description: putative sugar transporter protein
  misc_feature (128)..(329): Homolog of NCBI NO: 34897404 NR Description: putative sugar transporter protein
  misc_feature (250)..(330): Homolog of NCBI NO: 15237848 NR Description: sugar transporter family [Arabidopsis thaliana]
  misc_feature (7)..(221): Homolog of NCBI NO: 15237848 NR Description: sugar transporter family [Arabidopsis thaliana]
  misc_feature (7)..(330): Homolog of NCBI NO: 9759246 NR Description: sugar transporter-like protein [Arabidopsis
SHSDPIMAFAVSVQSHFAIRALKRDHFKNPSPRTFCSCFKSRPDSSYLSLKERTCFVSKPGLVTTRYRHIFQVGAETGGEFADSGEVADSLASDAPESFSWSSVILPFIFPALGGLLFGYDIGATSGATLSLQSPALSGTTWFNFSPVQLGLVVSGSLYGALLGSISVYGVADFLGRRRELIIAAVLYLLGSLITGCAPDLNILLVGRLLYGFGIGLAMHGAPLYIAETCPSQIRGTLISLKELFIVLGILLGFSVGSFQIDVVGGWRYMYGFGTPVALLMGLGMWSLPASPRWLLLRAVQGKGQLQEYKEKAMLALSKLRGRPPGDKISRSW

SEQ ID NO: 48799 - protein, 327 aa, Arabidopsis thaliana
  peptide (1)..(327): Ceres Seq. ID no. 15168827
  misc_feature (101)..(324): Pfam Name: Sugar (and other) transporter Pfam Description: Sugar (and other) transporter
  misc_feature (82)..(289): Homolog of NCBI NO: 15220697 NR Description: sugar transporter family [Arabidopsis thaliana]
  misc_feature (74)..(316): Homolog of NCBI NO: 30686148 NR Description: sugar transporter family [Arabidopsis thaliana]
  misc_feature (64)..(316): Homolog of NCBI NO: 15237892 NR Description: sugar transporter family [Arabidopsis thaliana]
  misc_feature (213)..(316): Homolog of NCBI NO: 6714427 NR Description: hypothetical protein [Arabidopsis thaliana]
  misc_feature (67)..(316): Homolog of NCBI NO: 30678759 NR Description: sugar transporter family [Arabidopsis thaliana]
  misc_feature (89)..(324): Homolog of NCBI NO: 37537174 NR Description: putative sugar transporter protein
  misc_feature (122)..(323): Homolog of NCBI NO: 34897404 NR Description: putative sugar transporter protein
  misc_feature (244)..(324): Homolog of NCBI NO: 15237848 NR Description: sugar transporter family [Arabidopsis thaliana]
  misc_feature (1)..(215): Homolog of NCBI NO: 15237848 NR Description: sugar transporter family [Arabidopsis thaliana]
  misc_feature (1)..(324): Homolog of NCBI NO: 9759246 NR Description: sugar transporter-like protein [Arabidopsis
MAFAVSVQSHFAIRALKRDHFKNPSPRTFCSCFKSRPDSSYLSLKERTCFVSKPGLVTTRYRHIFQVGAETGGEFADSGEVADSLASDAPESFSWSSVILPFIFPALGGLLFGYDIGATSGATLSLQSPALSGTTWFNFSPVQLGLVVSGSLYGALLGSISVYGVADFLGRRRELIIAAVLYLLGSLITGCAPDLNILLVGRLLYGFGIGLAMHGAPLYIAETCPSQIRGTLISLKELFIVLGILLGFSVGSFQIDVVGGWRYMYGFGTPVALLMGLGMWSLPASPRWLLLRAVQGKGQLQEYKEKAMLALSKLRGRPPGDKISRSW

SEQ ID NO: 48800 - DNA, 1947 bp, Arabidopsis thaliana
  misc_feature (1)..(1947): Ceres Seq. ID no. 15175628
  misc_feature: MA Experiment ID: 108433 Result: Up-regulated in Transcription
  misc_feature: MA Experiment 108433 PARAMETER Experiment Name: At_rhl_Mutant2_cDNA_P Parameter: Age (day) Value: 7
  misc_feature: MA Experiment 108433 PARAMETER Experiment Name: At_rhl_Mutant2_cDNA_P Parameter: Organism Value: A. thaliana
  misc_feature: MA Experiment 108433 PARAMETER Experiment Name: At_rhl_Mutant2_cDNA_P Parameter: Plant Line Value: rhl Mutant vs. wt landsburg
  misc_feature: MA Experiment 108433 PARAMETER Experiment Name: At_rhl_Mutant2_cDNA_P Parameter: Tissue Value: Roots
  misc_feature: MA Experiment ID: 108572 Result: Up-regulated in Transcription
  misc_feature: MA Experiment 108572 PARAMETER Experiment Name: At_Drought_cDNA_P Parameter: Timepoint (hr) Value: 1
  misc_feature: MA Experiment 108572 PARAMETER Experiment Name: At_Drought_cDNA_P Parameter: Tissue Value: Aerial
  misc_feature: MA Experiment 108572 PARAMETER Experiment Name: At_Drought_cDNA_P Parameter: Treatment Value: Drought vs. No Drought
  misc_feature: MA Experiment ID: 108573 Result: Up-regulated in Transcription
  misc_feature: MA Experiment 108573 PARAMETER Experiment Name: At_Drought_cDNA_P Parameter: Timepoint (hr) Value: 6
  misc_feature: MA Experiment 108573 PARAMETER Experiment Name: At_Drought_cDNA_P Parameter: Tissue Value: Aerial
  misc_feature: MA Experiment 108573 PARAMETER Experiment Name: At_Drought_cDNA_P Parameter: Treatment Value: Drought vs. No Drought
  misc_feature: MA Experiment ID: 108579 Result: Up-regulated in Transcription
  misc_feature: MA Experiment 108579 PARAMETER Experiment Name: At_4deg_Cold_cDNA_P Parameter: Temperature (deg C) Value: 4 vs. 22
  misc_feature: MA Experiment 108579 PARAMETER Experiment Name: At_4deg_Cold_cDNA_P Parameter: Timepoint (hr) Value: 6
  misc_feature: MA Experiment 108579 PARAMETER Experiment Name: At_4deg_Cold_cDNA_P Parameter: Tissue Value: Aerial
  misc_feature: MA Experiment ID: 108607 Result: Up-regulated in Transcription
  misc_feature: MA Experiment 108607 PARAMETER Experiment Name: At_100uM_ABA_cDNA_P Parameter: Timepoint (hr) Value: 4
  misc_feature: MA Experiment 108607 PARAMETER Experiment Name: At_100uM_ABA_cDNA_P Parameter: Tissue Value: Aerial
  misc_feature: MA Experiment 108607 PARAMETER Experiment Name: At_100uM_ABA_cDNA_P Parameter: Treatment Value: 100uM ABA vs. No Treatment
  misc_feature: MA Experiment ID: 20000030 Result: Down-regulated in Transcription
  misc_feature: MA Experiment 20000030 PARAMETER Experiment Name: At_CS6630_Roots_cDNA_P Parameter: Plant Line Value: CS6630 vs. WS
  misc_feature: MA Experiment 20000030 PARAMETER Experiment Name: At_CS6630_Roots_cDNA_P Parameter: Tissue Value: Roots
  misc_feature: MA Experiment ID: 20000072 Result: Up-regulated in Transcription
  misc_feature: MA Experiment 20000072 PARAMETER Experiment Name: At_100uM_ABA_Mutants_cDNA_P Parameter: Plant Line Value: CS8105
  misc_feature: MA Experiment 20000072 PARAMETER Experiment Name: At_100uM_ABA_Mutants_cDNA_P Parameter: Timepoint (hr) Value: 6
  misc_feature: MA Experiment 20000072 PARAMETER Experiment Name: At_100uM_ABA_Mutants_cDNA_P Parameter: Tissue Value: Aerial
  misc_feature: MA Experiment 20000072 PARAMETER Experiment Name: At_100uM_ABA_Mutants_cDNA_P Parameter: Treatment Value: 100uM ABA vs. No Treatment
  misc_feature: MA Experiment ID: 20000111 Result: Down-regulated in Transcription
  misc_feature: MA Experiment 20000111 PARAMETER Experiment Name: At_42deg_Heat_cDNA_P Parameter: Temperature (deg C) Value: 42 vs. 22
  misc_feature: MA Experiment 20000111 PARAMETER Experiment Name: At_42deg_Heat_cDNA_P Parameter: Timepoint (hr) Value: 6
  misc_feature: MA Experiment 20000111 PARAMETER Experiment Name: At_42deg_Heat_cDNA_P Parameter: Tissue Value: Aerial
  misc_feature: MA Experiment ID: 20000112 Result: Down-regulated in Transcription
  misc_feature: MA Experiment 20000112 PARAMETER Experiment Name: At_42deg_Heat_cDNA_P Parameter: Temperature (deg C) Value: 42 vs. 22
  misc_feature: MA Experiment 20000112 PARAMETER Experiment Name: At_42deg_Heat_cDNA_P Parameter: Timepoint (hr) Value: 2
  misc_feature: MA Experiment 20000112 PARAMETER Experiment Name: At_42deg_Heat_cDNA_P Parameter: Tissue Value: Aerial
  misc_feature: MA Experiment ID: 20000144 Result: Down-regulated in Transcription
  misc_feature: MA Experiment 20000144 PARAMETER Experiment Name: At_42deg_Heat_cDNA_P Parameter: Temperature (deg C) Value: 42 vs. 22
  misc_feature: MA Experiment 20000144 PARAMETER Experiment Name: At_42deg_Heat_cDNA_P Parameter: Timepoint (hr) Value: 1
  misc_feature: MA Experiment 20000144 PARAMETER Experiment Name: At_42deg_Heat_cDNA_P Parameter: Tissue Value: Aerial
  misc_feature: MA Experiment ID: 20000171 Result: Down-regulated in Transcription
  misc_feature: MA Experiment 20000171 PARAMETER Experiment Name: At_42deg_Heat_P Parameter: Age (day) Value: 14
  misc_feature: MA Experiment 20000171 PARAMETER Experiment Name: At_42deg_Heat_P Parameter: Organism Value: A. thaliana
  misc_feature: MA Experiment 20000171 PARAMETER Experiment Name: At_42deg_Heat_P Parameter: Plant Line Value: WS
  misc_feature: MA Experiment 20000171 PARAMETER Experiment Name: At_42deg_Heat_P Parameter: Temperature (deg C) Value: 42 vs. 22
  misc_feature: MA Experiment 20000171 PARAMETER Experiment Name: At_42deg_Heat_P Parameter: Timepoint (hr) Value: 1
  misc_feature: MA Experiment 20000171 PARAMETER Experiment Name: At_42deg_Heat_P Parameter: Tissue Value: Aerial
  misc_feature: MA Experiment ID: 20000173 Result: Down-regulated in Transcription
  misc_feature: MA Experiment 20000173 PARAMETER Experiment Name: At_42deg_Heat_P Parameter: Age (day) Value: 14
  misc_feature: MA Experiment 20000173 PARAMETER Experiment Name: At_42deg_Heat_P Parameter: Organism Value: A. thaliana
  misc_feature: MA Experiment 20000173 PARAMETER Experiment Name: At_42deg_Heat_P Parameter: Plant Line Value: WS
  misc_feature: MA Experiment 20000173 PARAMETER Experiment Name: At_42deg_Heat_P Parameter: Temperature (deg C) Value: 42 vs. 22
  misc_feature: MA Experiment 20000173 PARAMETER Experiment Name: At_42deg_Heat_P Parameter: Timepoint (hr) Value: 6
  misc_feature: MA Experiment 20000173 PARAMETER Experiment Name: At_42deg_Heat_P Parameter: Tissue Value: Aerial
  misc_feature: MA Experiment ID: 20000184 Result: Up-regulated in Transcription
  misc_feature: MA Experiment 20000184 PARAMETER Experiment Name: At_Shoots__P Parameter: Age (day) Value: 7
  misc_feature: MA Experiment 20000184 PARAMETER Experiment Name: At_Shoots__P Parameter: Tissue Value: Shoots vs. Whole Plant
  misc_feature: MA Experiment ID: 20000235 Result: Up-regulated in Transcription
  misc_feature: MA Experiment 20000235 PARAMETER Experiment Name: At_Siliques_P Parameter: Age (day) Value: 21
  misc_feature: MA Experiment 20000235 PARAMETER Experiment Name: At_Siliques_P Parameter: Organism Value: A. thaliana
  misc_feature: MA Experiment 20000235 PARAMETER Experiment Name: At_Siliques_P Parameter: Plant Line Value: WS
  misc_feature: MA Experiment 20000235 PARAMETER Experiment Name: At_Siliques_P Parameter: Tissue Value: 5-10mm Siliques vs. Whole Plant
  misc_feature: MA Experiment ID: 20000286 Result: Up-regulated in Transcription
  misc_feature: MA Experiment 20000286 PARAMETER Experiment Name: At_Open_Flower_P Parameter: Age (day) Value: 21
  misc_feature: MA Experiment 20000286 PARAMETER Experiment Name: At_Open_Flower_P Parameter: Plant Line Value: WS
  misc_feature: MA Experiment 20000286 PARAMETER Experiment Name: At_Open_Flower_P Parameter: Tissue Value: Half Open vs. Whole Plant
  misc_feature: MA Experiment ID: 20000437 Result: Up-regulated in Transcription
  misc_feature: MA Experiment 20000437 PARAMETER Experiment Name: At_Drought_P Parameter: Age (day) Value: 8
  misc_feature: MA Experiment 20000437 PARAMETER Experiment Name: At_Drought_P Parameter: Organism Value: A. thaliana
  misc_feature: MA Experiment 20000437 PARAMETER Experiment Name: At_Drought_P Parameter: Plant Line Value: WS
  misc_feature: MA Experiment 20000437 PARAMETER Experiment Name: At_Drought_P Parameter: Timepoint (hr) Value: 24
  misc_feature: MA Experiment 20000437 PARAMETER Experiment Name: At_Drought_P Parameter: Tissue Value: Whole Plant
  misc_feature: MA Experiment 20000437 PARAMETER Experiment Name: At_Drought_P Parameter: Treatment Value: Drought vs. No Drought
  misc_feature: MA Experiment ID: 20000573 Result: Down-regulated in Transcription
  misc_feature: MA Experiment 20000573 PARAMETER Experiment Name: At_100uM_ABA_Mutants__P Parameter: Organism Value: A. thaliana
  misc_feature: MA Experiment 20000573 PARAMETER Experiment Name: At_100uM_ABA_Mutants__P Parameter: Plant Line Value: CS22 vs. Ler wt
  misc_feature: MA Experiment 20000573 PARAMETER Experiment Name: At_100uM_ABA_Mutants__P Parameter: Timepoint (hr) Value: N/A
  misc_feature: MA Experiment 20000573 PARAMETER Experiment Name: At_100uM_ABA_Mutants__P Parameter: Tissue Value: Whole Plant
  misc_feature: MA Experiment 20000573 PARAMETER Experiment Name: At_100uM_ABA_Mutants__P Parameter: Treatment Value: None
  misc_feature: MA Experiment ID: 20000574 Result: Down-regulated in Transcription
  misc_feature: MA Experiment 20000574 PARAMETER Experiment Name: At_100uM_ABA_Mutants__P Parameter: Organism Value: A. thaliana
  misc_feature: MA Experiment 20000574 PARAMETER Experiment Name: At_100uM_ABA_Mutants__P Parameter: Plant Line Value: CS23 vs. Ler wt
  misc_feature: MA Experiment 20000574 PARAMETER Experiment Name: At_100uM_ABA_Mutants__P Parameter: Timepoint (hr) Value: N/A
  misc_feature: MA Experiment 20000574 PARAMETER Experiment Name: At_100uM_ABA_Mutants__P Parameter: Tissue Value: Whole Plant
  misc_feature: MA Experiment 20000574 PARAMETER Experiment Name: At_100uM_ABA_Mutants__P Parameter: Treatment Value: None
  misc_feature: MA Experiment ID: 20000794 Result: Up-regulated in Transcription
  misc_feature: MA Experiment 20000794 PARAMETER Experiment Name: At_Petals_P Parameter: Age (day) Value: 23-25 days
  misc_feature: MA Experiment 20000794 PARAMETER Experiment Name: At_Petals_P Parameter: Plant Line Value: WS
  misc_feature: MA Experiment 20000794 PARAMETER Experiment Name: At_Petals_P Parameter: Tissue Value: Petals vs. Whole plant
  misc_feature: MA Experiment ID: 20001247 Result: Up-regulated in Transcription
  misc_feature: MA Experiment 20001247 PARAMETER Experiment Name: At_Far-red-induction_P Parameter: Age (day) Value: 7
  misc_feature: MA Experiment 20001247 PARAMETER Experiment Name: At_Far-red-induction_P Parameter: Light Value: Far-red vs. White
  misc_feature: MA Experiment 20001247 PARAMETER Experiment Name: At_Far-red-induction_P Parameter: Organism Value: A. thaliana
  misc_feature: MA Experiment 20001247 PARAMETER Experiment Name: At_Far-red-induction_P Parameter: Plant Line Value: Columbia
  misc_feature: MA Experiment 20001247 PARAMETER Experiment Name: At_Far-red-induction_P Parameter: Timepoint (hr) Value: 1
  misc_feature: MA Experiment 20001247 PARAMETER Experiment Name: At_Far-red-induction_P Parameter: Tissue Value: Whole Plant
  misc_feature: MA Experiment ID: 20001557 Result: Up-regulated in Transcription
  misc_feature: MA Experiment 20001557 PARAMETER Experiment Name: At_Drought_Soil_Dry_P Parameter: Age (day) Value: 27
  misc_feature: MA Experiment 20001557 PARAMETER Experiment Name: At_Drought_Soil_Dry_P Parameter: Organism Value: A. thaliana
  misc_feature: MA Experiment 20001557 PARAMETER Experiment Name: At_Drought_Soil_Dry_P Parameter: Plant Line Value: WS
  misc_feature: MA Experiment 20001557 PARAMETER Experiment Name: At_Drought_Soil_Dry_P Parameter: Post Timepoint (hr) Value: 3
  misc_feature: MA Experiment 20001557 PARAMETER Experiment Name: At_Drought_Soil_Dry_P Parameter: Post-Treatment Value: Re-Water vs. No Drought
  misc_feature: MA Experiment 20001557 PARAMETER Experiment Name: At_Drought_Soil_Dry_P Parameter: Timepoint (day) Value: 13
  misc_feature: MA Experiment 20001557 PARAMETER Experiment Name: At_Drought_Soil_Dry_P Parameter: Treatment Value: Drought vs. No Drought
  misc_feature: MA Experiment ID: 20001558 Result: Up-regulated in Transcription
  misc_feature: MA Experiment 20001558 PARAMETER Experiment Name: At_Drought_Soil_Dry_P Parameter: Age (day) Value: 27
  misc_feature: MA Experiment 20001558 PARAMETER Experiment Name: At_Drought_Soil_Dry_P Parameter: Organism Value: A. thaliana
  misc_feature: MA Experiment 20001558 PARAMETER Experiment Name: At_Drought_Soil_Dry_P Parameter: Plant Line Value: WS
  misc_feature: MA Experiment 20001558 PARAMETER Experiment Name: At_Drought_Soil_Dry_P Parameter: Post Timepoint (hr) Value: 6
  misc_feature: MA Experiment 20001558 PARAMETER Experiment Name: At_Drought_Soil_Dry_P Parameter: Post-Treatment Value: Re-Water vs. No Drought
  misc_feature: MA Experiment 20001558 PARAMETER Experiment Name: At_Drought_Soil_Dry_P Parameter: Timepoint (day) Value: 13
  misc_feature: MA Experiment 20001558 PARAMETER Experiment Name: At_Drought_Soil_Dry_P Parameter: Treatment Value: Drought vs. No Drought
  misc_feature: MA Experiment ID: 20001906 Result: Down-regulated in Transcription
  misc_feature: MA Experiment 20001906 PARAMETER Experiment Name: At_Drought_Reproduction_P Parameter: Age (day) Value: 35
  misc_feature: MA Experiment 20001906 PARAMETER Experiment Name: At_Drought_Reproduction_P Parameter: Organism Value: A. thaliana
  misc_feature: MA Experiment 20001906 PARAMETER Experiment Name: At_Drought_Reproduction_P Parameter: Plant Line Value: WS
  misc_feature: MA Experiment 20001906 PARAMETER Experiment Name: At_Drought_Reproduction_P Parameter: Timepoint (day) Value: 5
  misc_feature: MA Experiment 20001906 PARAMETER Experiment Name: At_Drought_Reproduction_P Parameter: Tissue Value: Siliques
  misc_feature: MA Experiment 20001906 PARAMETER Experiment Name: At_Drought_Reproduction_P Parameter: Treatment Value: Drought vs. No Drought
  misc_feature: MA Experiment ID: 20001908 Result: Down-regulated in Transcription
  misc_feature: MA Experiment 20001908 PARAMETER Experiment Name: At_Drought_Reproduction_P Parameter: Age (day) Value: 40
  misc_feature: MA Experiment 20001908 PARAMETER Experiment Name: At_Drought_Reproduction_P Parameter: Organism Value: A. thaliana
  misc_feature: MA Experiment 20001908 PARAMETER Experiment Name: At_Drought_Reproduction_P Parameter: Plant Line Value: WS
  misc_feature: MA Experiment 20001908 PARAMETER Experiment Name: At_Drought_Reproduction_P Parameter: Timepoint (day) Value: 10
  misc_feature: MA Experiment 20001908 PARAMETER Experiment Name: At_Drought_Reproduction_P Parameter: Tissue Value: Siliques
  misc_feature: MA Experiment 20001908 PARAMETER Experiment Name: At_Drought_Reproduction_P Parameter: Treatment Value: Drought vs. No Drought
  misc_feature: MA Experiment ID: 20001911 Result: Down-regulated in Transcription
  misc_feature: MA Experiment 20001911 PARAMETER Experiment Name: At_Drought_Reproduction_P Parameter: Age (day) Value: 40
  misc_feature: MA Experiment 20001911 PARAMETER Experiment Name: At_Drought_Reproduction_P Parameter: Organism Value: A. thaliana
  misc_feature: MA Experiment 20001911 PARAMETER Experiment Name: At_Drought_Reproduction_P Parameter: Plant Line Value: WS
  misc_feature: MA Experiment 20001911 PARAMETER Experiment Name: At_Drought_Reproduction_P Parameter: Timepoint (day) Value: 10
  misc_feature: MA Experiment 20001911 PARAMETER Experiment Name: At_Drought_Reproduction_P Parameter: Tissue Value: Flowers
  misc_feature: MA Experiment 20001911 PARAMETER Experiment Name: At_Drought_Reproduction_P Parameter: Treatment Value: Drought vs. No Drought
tctcgctaaacagatgcttcaggtaaaatatcttattattcggtttggtttaatccggtttggtcttttagactgttatgagtcgtcgtgattcgtggaagaataaaatctaggacttttcttattcgacttttaaaatttgaaagggctaatgacagctcatgattttagaaattatttaggggaattcaatagaactaccagctagaatttgcctttcaaaatttaattatttgcgtcttggtgtcacttaataaagcatttagtacacttaccagctagattttttgattaattgacttagctttcatgtcattaatacgtgctataatatttctatgacttatttgatcaaaatgtagtcactggattggtttttagttgccgacttaatatggatgcaactttattctatatgagttgtatgaaagcataaaggccaaatttacgtgtaaaagtcacgtgtctatgaaaattctgacagtgacaggctttgtagtttttaggttggtggtagttgtgaaaatggaaaaatcataatgttgtgttaaatgatcaatgttttattcattaaaggttgattacctttttttctttctcaaacataaccatctagcaaaagtattcatttattaccaaaaaatagttcatgcattaggaatttaggattgatgcataattacaaatttacattcacttttacaaacatatttaaattgtagatctaagaagcgaacgtggaaacacgtgcttgcaagtttctcgaatctctaatgtggttggcaaattgaaccaaaggtcataaatgtgctacaacataatgttgggctacttgcatagattttacttacacttgagacatatgcacacacataggtctgcatttatagatttgtgtttaatgtccaccgtataacggttgtctagtcccaaccattgttagaattttcttagattcgaaagtgttttttattttattttattttaaatattgtatacagatttttctgagagtactaataagtttgtgacaataatgcaggtgcaaccaaactcatacgcactagtggtgagcacagagaacataaccctaaactggtacttaggcaacgaccgatcaatgcttctatctaattgtatcttccgtatgggcggagccgcggtacttctctcgaaccgctcctctgatcgcagccgttcaaaatatcagctcatccataccgtccgtacccacaaaggagctgatgacaacgcattcggctgcgtttaccaacgagaagacaacaacgcagaagaaaccggcaagatcggagtctcactctctaaaaaccttatggcaatagccggagaagctctcaagacaaacatcacaactctcggaccactagtcctaccaatgtccgaacaacttctctttttcgcgactcttgtggcccgaaaagtcttcaaagtcaagaaaataaagccttacattcctgacttcaagctagctttcgagcatttctgtatccacgctggaggtagagccgtgcttgacgagattgagaagaacttggatttatccgaatggcacatggagccatcgaggatgacgttgaaccggtttggtaacacttcgagtagctcactttggtatgagcttgcgtatagtgaagctaaaggaaggattaagagaggagataggacttggcagattgcttttggatcgggttttaagtgtaacagtgcggtttggaaagctttgagaacgattgatccaatggacgagaagactaatccatggattgatgagattgatgacttccctattcaagttcctaggatcactcccattacatcgtcgtagtgtttttaaattcttttggagaactaatttgttatggtttattaaatgtaataacttatgtgatgtgatatttttttattatcttaatatatatgattgcc

SEQ ID NO: 48801 - protein, 269 aa, Arabidopsis thaliana
  peptide (1)..(269): Ceres Seq. ID no. 15175629
  misc_feature (90)..(237): Pfam Name: Chalcone and stilbene synthases, C-terminal domain Pfam Description: Chalcone and stilbene synthases, C-terminal
  misc_feature (1)..(261): Homolog of NCBI NO: 19908404 NR Description: putative fatty acid elongase [Tropaeolum majus]
  misc_feature (5)..(266): Homolog of NCBI NO: 15225767 NR Description: beta-ketoacyl-CoA synthase, putative [Arabidopsis
  misc_feature (1)..(268): Homolog of NCBI NO: 1045614 NR Description: beta-ketoacyl-CoA synthase
  misc_feature (2)..(268): Homolog of NCBI NO: 29468148 NR Description: fatty acid elongase [Persea americana]
  misc_feature (1)..(266): Homolog of NCBI NO: 9714501 NR Description: putative fatty acid elongase [Zea mays]
  misc_feature (1)..(260): Homolog of NCBI NO: 11066477 NR Description: fatty acid elongase 1-like protein [Limnanthes
  misc_feature (1)..(269): Homolog of NCBI NO: 18377979 NR Description: putative beta-ketoacyl-CoA synthase [Arabidopsis
  misc_feature (1)..(269): Homolog of NCBI NO: 15219676 NR Description: beta-ketoacyl-CoA synthase, putative [Arabidopsis
  misc_feature (1)..(269): Homolog of NCBI NO: 14334714 NR Description: putative beta-ketoacyl-CoA synthase [Arabidopsis
  misc_feature (1)..(269): Homolog of NCBI NO: 15239981 NR Description: beta-ketoacyl-CoA synthase, putative [Arabidopsis
MQVQPNSYALVVSTENITLNWYLGNDRSMLLSNCIFRMGGAAVLLSNRSSDRSRSKYQLIHTVRTHKGADDNAFGCVYQREDNNAEETGKIGVSLSKNLMAIAGEALKTNITTLGPLVLPMSEQLLFFATLVARKVFKVKKIKPYIPDFKLAFEHFCIHAGGRAVLDEIEKNLDLSEWHMEPSRMTLNRFGNTSSSSLWYELAYSEAKGRIKRGDRTWQIAFGSGFKCNSAVWKALRTIDPMDEKTNPWIDEIDDFPIQVPRITPITSS

SEQ ID NO: 48802 - protein, 241 aa, Arabidopsis thaliana
  peptide (1)..(241): Ceres Seq. ID no. 15175630
  misc_feature (62)..(209): Pfam Name: Chalcone and stilbene synthases, C-terminal domain Pfam Description: Chalcone and stilbene synthases, C-terminal
  misc_feature (1)..(233): Homolog of NCBI NO: 19908404 NR Description: putative fatty acid elongase [Tropaeolum majus]
  misc_feature (1)..(238): Homolog of NCBI NO: 15225767 NR Description: beta-ketoacyl-CoA synthase, putative [Arabidopsis
  misc_feature (1)..(240): Homolog of NCBI NO: 1045614 NR Description: beta-ketoacyl-CoA synthase
  misc_feature (1)..(240): Homolog of NCBI NO: 29468148 NR Description: fatty acid elongase [Persea americana]
  misc_feature (1)..(238): Homolog of NCBI NO: 9714501 NR Description: putative fatty acid elongase [Zea mays]
  misc_feature (1)..(232): Homolog of NCBI NO: 11066477 NR Description: fatty acid elongase 1-like protein [Limnanthes
  misc_feature (1)..(241): Homolog of NCBI NO: 18377979 NR Description: putative beta-ketoacyl-CoA synthase [Arabidopsis
  misc_feature (1)..(241): Homolog of NCBI NO: 15219676 NR Description: beta-ketoacyl-CoA synthase, putative [Arabidopsis
  misc_feature (1)..(241): Homolog of NCBI NO: 14334714 NR Description: putative beta-ketoacyl-CoA synthase [Arabidopsis
  misc_feature (1)..(241): Homolog of NCBI NO: 15239981 NR Description: beta-ketoacyl-CoA synthase, putative [Arabidopsis
MLLSNCIFRMGGAAVLLSNRSSDRSRSKYQLIHTVRTHKGADDNAFGCVYQREDNNAEETGKIGVSLSKNLMAIAGEALKTNITTLGPLVLPMSEQLLFFATLVARKVFKVKKIKPYIPDFKLAFEHFCIHAGGRAVLDEIEKNLDLSEWHMEPSRMTLNRFGNTSSSSLWYELAYSEAKGRIKRGDRTWQIAFGSGFKCNSAVWKALRTIDPMDEKTNPWIDEIDDFPIQVPRITPITSS

SEQ ID NO: 48803 - protein, 232 aa, Arabidopsis thaliana
  peptide (1)..(232): Ceres Seq. ID no. 15175631
  misc_feature (53)..(200): Pfam Name: Chalcone and stilbene synthases, C-terminal domain Pfam Description: Chalcone and stilbene synthases, C-terminal
  misc_feature (1)..(224): Homolog of NCBI NO: 19908404 NR Description: putative fatty acid elongase [Tropaeolum majus]
  misc_feature (1)..(229): Homolog of NCBI NO: 15225767 NR Description: beta-ketoacyl-CoA synthase, putative [Arabidopsis
  misc_feature (1)..(231): Homolog of NCBI NO: 1045614 NR Description: beta-ketoacyl-CoA synthase
  misc_feature (1)..(231): Homolog of NCBI NO: 29468148 NR Description: fatty acid elongase [Persea americana]
  misc_feature (1)..(229): Homolog of NCBI NO: 9714501 NR Description: putative fatty acid elongase [Zea mays]
  misc_feature (1)..(223): Homolog of NCBI NO: 11066477 NR Description: fatty acid elongase 1-like protein [Limnanthes
  misc_feature (1)..(232): Homolog of NCBI NO: 18377979 NR Description: putative beta-ketoacyl-CoA synthase [Arabidopsis
  misc_feature (1)..(232): Homolog of NCBI NO: 15219676 NR Description: beta-ketoacyl-CoA synthase, putative [Arabidopsis
  misc_feature (1)..(232): Homolog of NCBI NO: 14334714 NR Description: putative beta-ketoacyl-CoA synthase [Arabidopsis
  misc_feature (1)..(232): Homolog of NCBI NO: 15239981 NR Description: beta-ketoacyl-CoA synthase, putative [Arabidopsis
MGGAAVLLSNRSSDRSRSKYQLIHTVRTHKGADDNAFGCVYQREDNNAEETGKIGVSLSKNLMAIAGEALKTNITTLGPLVLPMSEQLLFFATLVARKVFKVKKIKPYIPDFKLAFEHFCIHAGGRAVLDEIEKNLDLSEWHMEPSRMTLNRFGNTSSSSLWYELAYSEAKGRIKRGDRTWQIAFGSGFKCNSAVWKALRTIDPMDEKTNPWIDEIDDFPIQVPRITPITSS

SEQ ID NO: 48804 - DNA, 675 bp, Arabidopsis thaliana
  misc_feature (1)..(675): Ceres Seq. ID no. 13592185
  misc_feature: MA Experiment ID: 20000306 Result: Up-regulated in Transcription
  misc_feature: MA Experiment 20000306 PARAMETER Experiment Name: At_Germinating_Seeds_Sub_P Parameter: Age (hr) Value: 6 vs. 0
  misc_feature: MA Experiment 20000306 PARAMETER Experiment Name: At_Germinating_Seeds_Sub_P Parameter: Organism Value: A. thaliana
  misc_feature: MA Experiment 20000306 PARAMETER Experiment Name: At_Germinating_Seeds_Sub_P Parameter: Plant Line Value: WS
  misc_feature: MA Experiment 20000306 PARAMETER Experiment Name: At_Germinating_Seeds_Sub_P Parameter: Tissue Value: Germinating Seeds
  misc_feature: MA Experiment ID: 20000440 Result: Up-regulated in Transcription
  misc_feature: MA Experiment 20000440 PARAMETER Experiment Name: At_Closed-Flower__Sub_P Parameter: Tissue Value: Closed Flower vs. Whole Plant
atgaataattataatatgaacccatctctcttccaaaattacacttggaacaacatcatcaacagcagcaacaacaacaacaagaatgatgatcatcatcatcaacataataatgatccaatcggtatggccatggaccagtacacacagctccatatcttcaatcctttctcttcttctcatttccctcctctctcttcttccctcacaaccaccactcttctctccggagatcaagaagacgacgaagacgaagaagaacctctagaggaactcggtgctatgaaggaaatgatgtacaagatcgcagccatgcaatcggttgacatcgacccagcaaccgtcaagaaacccaaacgccgtaacgtgaggatctccgacgaccctcagagtgtggcggctagacatcgccgtgagagaatcagtgagaggatcagaattcttcagagactcgtgccaggtggcactaaaatggatacggcttcaatgctcgatgaagctatacgctatgtcaagttcttgaaacggcagatccggctactcaataataataccggatatactcctccgccgccgcaagatcaagcttctcaggcggtgacgacgtcatgggtttcaccgccaccaccgccaagtttcggccgtgggggaagaggagtaggagaattaatctag

SEQ ID NO: 48805 - protein, 224 aa, Arabidopsis thaliana
  peptide (1)..(224): Ceres Seq. ID no. 13592186
  misc_feature (128)..(175): Pfam Name: Helix-loop-helix DNA-binding domain Pfam Description: Helix-loop-helix DNA-binding domain
  misc_feature (30)..(203): Homolog of NCBI NO: 34910410 NR Description: P0692C11.28 [Oryza sativa (japonica
  misc_feature (56)..(224): Homolog of NCBI NO: 34914234 NR Description: P0697C12.24 [Oryza sativa (japonica
  misc_feature (56)..(224): Homolog of NCBI NO: 15289790 NR Description: P0002B05.9 [Oryza sativa (japonica
  misc_feature (84)..(213): Homolog of NCBI NO: 28393737 NR Description: unknown protein [Arabidopsis thaliana]
  misc_feature (84)..(213): Homolog of NCBI NO: 15232534 NR Description: bHLH protein family [Arabidopsis thaliana]
  misc_feature (84)..(213): Homolog of NCBI NO: 9294680 NR Description: emb|CAB62312.1~gene_id:MHC9.1~similar to unknown
  misc_feature (92)..(184): Homolog of NCBI NO: 15229725 NR Description: bHLH protein family [Arabidopsis thaliana]
  misc_feature (5)..(188): Homolog of NCBI NO: 15240189 NR Description: (bHLH088) putative bHLH transcription factor
  misc_feature (82)..(190): Homolog of NCBI NO: 15236714 NR Description: bHLH protein family [Arabidopsis thaliana]
  misc_feature (1)..(224): Homolog of NCBI NO: 15242494 NR Description: bHLH protein family [Arabidopsis thaliana]
MNNYNMNPSLFQNYTWNNIINSSNNNNKNDDHHHQHNNDPIGMAMDQYTQLHIFNPFSSSHFPPLSSSLTTTTLLSGDQEDDEDEEEPLEELGAMKEMMYKIAAMQSVDIDPATVKKPKRRNVRISDDPQSVAARHRRERISERIRILQRLVPGGTKMDTASMLDEAIRYVKFLKRQIRLLNNNTGYTPPPPQDQASQAVTTSWVSPPPPPSFGRGGRGVGELI

SEQ ID NO: 48806 - protein, 219 aa, Arabidopsis thaliana
  peptide (1)..(219): Ceres Seq. ID no. 13592187
  misc_feature (123)..(170): Pfam Name: Helix-loop-helix DNA-binding domain Pfam Description: Helix-loop-helix DNA-binding domain
  misc_feature (25)..(198): Homolog of NCBI NO: 34910410 NR Description: P0692C11.28 [Oryza sativa (japonica
  misc_feature (51)..(219): Homolog of NCBI NO: 34914234 NR Description: P0697C12.24 [Oryza sativa (japonica
  misc_feature (51)..(219): Homolog of NCBI NO: 15289790 NR Description: P0002B05.9 [Oryza sativa (japonica
  misc_feature (79)..(208): Homolog of NCBI NO: 28393737 NR Description: unknown protein [Arabidopsis thaliana]
  misc_feature (79)..(208): Homolog of NCBI NO: 15232534 NR Description: bHLH protein family [Arabidopsis thaliana]
  misc_feature (79)..(208): Homolog of NCBI NO: 9294680 NR Description: emb|CAB62312.1~gene_id:MHC9.1~similar to unknown
  misc_feature (87)..(179): Homolog of NCBI NO: 15229725 NR Description: bHLH protein family [Arabidopsis thaliana]
  misc_feature (1)..(183): Homolog of NCBI NO: 15240189 NR Description: (bHLH088) putative bHLH transcription factor
  misc_feature (77)..(185): Homolog of NCBI NO: 15236714 NR Description: bHLH protein family [Arabidopsis thaliana]
  misc_feature (1)..(219): Homolog of NCBI NO: 15242494 NR Description: bHLH protein family [Arabidopsis thaliana]
MNPSLFQNYTWNNIINSSNNNNKNDDHHHQHNNDPIGMAMDQYTQLHIFNPFSSSHFPPLSSSLTTTTLLSGDQEDDEDEEEPLEELGAMKEMMYKIAAMQSVDIDPATVKKPKRRNVRISDDPQSVAARHRRERISERIRILQRLVPGGTKMDTASMLDEAIRYVKFLKRQIRLLNNNTGYTPPPPQDQASQAVTTSWVSPPPPPSFGRGGRGVGELI

SEQ ID NO: 48807 - protein, 182 aa, Arabidopsis thaliana
  peptide (1)..(182): Ceres Seq. ID no. 13592188
  misc_feature (86)..(133): Pfam Name: Helix-loop-helix DNA-binding domain Pfam Description: Helix-loop-helix DNA-binding domain
  misc_feature (1)..(161): Homolog of NCBI NO: 34910410 NR Description: P0692C11.28 [Oryza sativa (japonica
  misc_feature (14)..(182): Homolog of NCBI NO: 34914234 NR Description: P0697C12.24 [Oryza sativa (japonica
  misc_feature (14)..(182): Homolog of NCBI NO: 15289790 NR Description: P0002B05.9 [Oryza sativa (japonica
  misc_feature (42)..(171): Homolog of NCBI NO: 28393737 NR Description: unknown protein [Arabidopsis thaliana]
  misc_feature (42)..(171): Homolog of NCBI NO: 15232534 NR Description: bHLH protein family [Arabidopsis thaliana]
  misc_feature (42)..(171): Homolog of NCBI NO: 9294680 NR Description: emb|CAB62312.1~gene_id:MHC9.1~similar to unknown
  misc_feature (50)..(142): Homolog of NCBI NO: 15229725 NR Description: bHLH protein family [Arabidopsis thaliana]
  misc_feature (1)..(146): Homolog of NCBI NO: 15240189 NR Description: (bHLH088) putative bHLH transcription factor
  misc_feature (40)..(148): Homolog of NCBI NO: 15236714 NR Description: bHLH protein family [Arabidopsis thaliana]
  misc_feature (1)..(182): Homolog of NCBI NO: 15242494 NR Description: bHLH protein family [Arabidopsis thaliana]
MAMDQYTQLHIFNPFSSSHFPPLSSSLTTTTLLSGDQEDDEDEEEPLEELGAMKEMMYKIAAMQSVDIDPATVKKPKRRNVRISDDPQSVAARHRRERISERIRILQRLVPGGTKMDTASMLDEAIRYVKFLKRQIRLLNNNTGYTPPPPQDQASQAVTTSWVSPPPPPSFGRGGRGVGELI

SEQ ID NO: 48808 - DNA, 2317 bp, Arabidopsis thaliana
  misc_feature (1)..(2317): Ceres Seq. ID no. 13591984
  misc_feature: MA Experiment ID: 20000349 Result: Down-regulated in Transcription
  misc_feature: MA Experiment 20000349 PARAMETER Experiment Name: At_100uM_ABA_Sub_P Parameter: Age (day) Value: 14
  misc_feature: MA Experiment 20000349 PARAMETER Experiment Name: At_100uM_ABA_Sub_P Parameter: Organism Value: A. thaliana
  misc_feature: MA Experiment 20000349 PARAMETER Experiment Name: At_100uM_ABA_Sub_P Parameter: Plant Line Value: WS
  misc_feature: MA Experiment 20000349 PARAMETER Experiment Name: At_100uM_ABA_Sub_P Parameter: Timepoint (hr) Value: 6
  misc_feature: MA Experiment 20000349 PARAMETER Experiment Name: At_100uM_ABA_Sub_P Parameter: Tissue Value: Aerial
  misc_feature: MA Experiment 20000349 PARAMETER Experiment Name: At_100uM_ABA_Sub_P Parameter: Treatment Value: 100uM ABA vs. No Treatment
  misc_feature: MA Experiment ID: 20000355 Result: Up-regulated in Transcription
  misc_feature: MA Experiment 20000355 PARAMETER Experiment Name: At_Siliques_Sub_P Parameter: Age (day) Value: 21
  misc_feature: MA Experiment 20000355 PARAMETER Experiment Name: At_Siliques_Sub_P Parameter: Organism Value: A. thaliana
  misc_feature: MA Experiment 20000355 PARAMETER Experiment Name: At_Siliques_Sub_P Parameter: Plant Line Value: WS
  misc_feature: MA Experiment 20000355 PARAMETER Experiment Name: At_Siliques_Sub_P Parameter: Tissue Value: Less Than 5mm Siliques vs. Whole Plant
  misc_feature: MA Experiment ID: 20000440 Result: Up-regulated in Transcription
  misc_feature: MA Experiment 20000440 PARAMETER Experiment Name: At_Closed-Flower__Sub_P Parameter: Tissue Value: Closed Flower vs. Whole Plant
gacgaaccggcacggattttactccttacttttctccactccagtctctctcttttctgcgnttcctcttctctctgtggcgtagagttatagagaggaatttaggtcttcttctttggtttttcctttgctcttcattctcatactctctcgacagtgaaatcaggaatttggtatggctgctactgcttctgcaattcgttacgctcctgaggatccgaatctccctaagccatggaaaggtcttgtggatagtagaactgggtacctctacttttggaatccagaaaccaatgttactcagtacgagagaccggcttcttccgctcctcccaagcttgctgctattcccgtaagctcttcggttcagactaatcagcaatcttcttctggatttaactctggcaaggaagatgataagtatggtaggggcagtgatgggcctaagtctgactctggatcaaggtttaatgaggctggaagaactggacctatatcttctaatgatgctgctagtggactagggaatgcttcatctggtggctcatctgccagagggcctccttcttcagccgcaggaaatgaattgtccccagaggcctattgccgcaaacatgaaattactgtcagtggaggccaagtaccaccacctctaatgtcttttgaagccactggtcttcccaatgagcttctgcgggagtgtcccaattttatgccatatgcgctctcttttgtcccaggtgcgatatttgctcttggaggagctaatgtcgtacgctgtgccacttctttggggttcttgcaaattatttggagtgccctttttggtggaccaaattttttgaggtgtcctcctgctgcaggtttcaacagctatcttgtgttgcctgcaaacgggaggatggtatacagtgcaggattctcagctccatctccaattcaagctcagtcatggccaattgcgatgcaaaacagagacatagtagccattgctaaaacaggctcgggaaaaactttgggttacttgattcctggtttcatgcatctccaacggatccacaatgattcacgaatgggcccaacgatcttggtcttgtcccctactagggagttggccacacaaatccaagttgaagctctgaaatttggcaagtcatctaaaatttcgtgtgcgtgtttgtatggtggagcacccaagggtcctcagctgaaggaaatagaaagaggtgtagatattgttgttgcaactcccgggcgactgaatgatatccttgaaatgaagagaatcagtctgcatcaagtatcttaccttgtgctggacgaggcagatagaatgctggacatggggttcgaacctcagatcagaaaaattgtgaatgaggttcccactaagcgtcaaaccctcatgtacactgcaacatggccaaaggaggtgaggaaaatcgcagctgatcttcttgttaaccctgcccaggtcaatattggtaatgttgatgagcttgtggcgaacaagtccattactcagactattgaagtcttagcaccgatggagaaacatagtaggttagagcagatattgcgctctcaggaaccgggttccaagattataattttctgttcaaccaaaaggatgtgtgatcaactggcaaggaacctgacccgtacgtttggagctgctgctatacatggagacaagtcgcaggctgagagagacgacgtactgaatcaatttagaagtggtaggactcctgttcttgttgcaactgatgtagctgctcgtggacttgacgttaaggacataagggtggtggtcaactatgattttccaaatggagtagaggattatgtccatagaattggaagaactggaagagctggagcaaccggtctagcttacaccttctttggagaccaagatgcaaaacatgcttcagatctgatcaagatcttggaaggagcaaaccagaaagttcctccacaggtccgcgaaatggctacacgtggtggtggtggaatgaacaaatttcgtcgctggggtacaccttccagtggtggtggtggcggccgtggtggctatggtgattctggttatggtggtcgtggtgagtctggctatggtagtcgtggtgattctggttatggtggtcgtggtgattctggtggtagaggaagctgggctccttcacgtgacagcagtggcagctcaggatggggaagagagagaagccgtagtcctgagagattcagaggaggtccaccgtccacttcatctccgcctcgcagctttcatgaggcgatgatgatgaaaaatagataa

SEQ ID NO: 48809 - protein, 713 aa, Arabidopsis thaliana
  peptide (1)..(713): Ceres Seq. ID no. 13591985
  misc_feature (242)..(451): Pfam Name: DEAD/DEAH box helicase Pfam Description: DEAD/DEAH box helicase
  misc_feature (98)..(175): Homolog of NCBI NO: 15528719 NR Description: putative RNA helicase, DRH1
  misc_feature (227)..(676): Homolog of NCBI NO: 15528719 NR Description: putative RNA helicase, DRH1
  misc_feature (19)..(178): Homolog of NCBI NO: 6137207 NR Description: P72 DEAD box protein [Pisum sativum]
  misc_feature (226)..(689): Homolog of NCBI NO: 6137207 NR Description: P72 DEAD box protein [Pisum sativum]
  misc_feature (1)..(175): Homolog of NCBI NO: 17065030 NR Description: RNA helicase, DRH1 [Arabidopsis thaliana]
  misc_feature (226)..(676): Homolog of NCBI NO: 17065030 NR Description: RNA helicase, DRH1 [Arabidopsis thaliana]
  misc_feature (1)..(175): Homolog of NCBI NO: 30678365 NR Description: DEAD box RNA helicase (DRH1) [Arabidopsis
  misc_feature (226)..(676): Homolog of NCBI NO: 30678365 NR Description: DEAD box RNA helicase (DRH1) [Arabidopsis
  misc_feature (1)..(175): Homolog of NCBI NO: 18395852 NR Description: DEAD box RNA helicase (DRH1) [Arabidopsis
  misc_feature (226)..(676): Homolog of NCBI NO: 18395852 NR Description: DEAD box RNA helicase (DRH1) [Arabidopsis
MAATASAIRYAPEDPNLPKPWKGLVDSRTGYLYFWNPETNVTQYERPASSAPPKLAAIPVSSSVQTNQQSSSGFNSGKEDDKYGRGSDGPKSDSGSRFNEAGRTGPISSNDAASGLGNASSGGSSARGPPSSAAGNELSPEAYCRKHEITVSGGQVPPPLMSFEATGLPNELLRECPNFMPYALSFVPGAIFALGGANVVRCATSLGFLQIIWSALFGGPNFLRCPPAAGFNSYLVLPANGRMVYSAGFSAPSPIQAQSWPIAMQNRDIVAIAKTGSGKTLGYLIPGFMHLQRIHNDSRMGPTILVLSPTRELATQIQVEALKFGKSSKISCACLYGGAPKGPQLKEIERGVDIVVATPGRLNDILEMKRISLHQVSYLVLDEADRMLDMGFEPQIRKIVNEVPTKRQTLMYTATWPKEVRKIAADLLVNPAQVNIGNVDELVANKSITQTIEVLAPMEKHSRLEQILRSQEPGSKIIIFCSTKRMCDQLARNLTRTFGAAAIHGDKSQAERDDVLNQFRSGRTPVLVATDVAARGLDVKDIRVVVNYDFPNGVEDYVHRIGRTGRAGATGLAYTFFGDQDAKHASDLIKILEGANQKVPPQVREMATRGGGGMNKFRRWGTPSSGGGGGRGGYGDSGYGGRGESGYGSRGDSGYGGRGDSGGRGSWAPSRDSSGSSGWGRERSRSPERFRGGPPSTSSPPRSFHEAMMMKNR

SEQ ID NO: 48810 - protein, 553 aa, Arabidopsis thaliana
  peptide (1)..(553): Ceres Seq. ID no. 13591986
  misc_feature (82)..(291): Pfam Name: DEAD/DEAH box helicase Pfam Description: DEAD/DEAH box helicase
  misc_feature (1)..(15): Homolog of NCBI NO: 15528719 NR Description: putative RNA helicase, DRH1
  misc_feature (67)..(516): Homolog of NCBI NO: 15528719 NR Description: putative RNA helicase, DRH1
  misc_feature (1)..(18): Homolog of NCBI NO: 6137207 NR Description: P72 DEAD box protein [Pisum sativum]
  misc_feature (66)..(529): Homolog of NCBI NO: 6137207 NR Description: P72 DEAD box protein [Pisum sativum]
  misc_feature (1)..(15): Homolog of NCBI NO: 17065030 NR Description: RNA helicase, DRH1 [Arabidopsis thaliana]
  misc_feature (66)..(516): Homolog of NCBI NO: 17065030 NR Description: RNA helicase, DRH1 [Arabidopsis thaliana]
  misc_feature (1)..(15): Homolog of NCBI NO: 30678365 NR Description: DEAD box RNA helicase (DRH1) [Arabidopsis
  misc_feature (66)..(516): Homolog of NCBI NO: 30678365 NR Description: DEAD box RNA helicase (DRH1) [Arabidopsis
  misc_feature (1)..(15): Homolog of NCBI NO: 18395852 NR Description: DEAD box RNA helicase (DRH1) [Arabidopsis
  misc_feature (66)..(516): Homolog of NCBI NO: 18395852 NR Description: DEAD box RNA helicase (DRH1) [Arabidopsis
MSFEATGLPNELLRECPNFMPYALSFVPGAIFALGGANVVRCATSLGFLQIIWSALFGGPNFLRCPPAAGFNSYLVLPANGRMVYSAGFSAPSPIQAQSWPIAMQNRDIVAIAKTGSGKTLGYLIPGFMHLQRIHNDSRMGPTILVLSPTRELATQIQVEALKFGKSSKISCACLYGGAPKGPQLKEIERGVDIVVATPGRLNDILEMKRISLHQVSYLVLDEADRMLDMGFEPQIRKIVNEVPTKRQTLMYTATWPKEVRKIAADLLVNPAQVNIGNVDELVANKSITQTIEVLAPMEKHSRLEQILRSQEPGSKIIIFCSTKRMCDQLARNLTRTFGAAAIHGDKSQAERDDVLNQFRSGRTPVLVATDVAARGLDVKDIRVVVNYDFPNGVEDYVHRIGRTGRAGATGLAYTFFGDQDAKHASDLIKILEGANQKVPPQVREMATRGGGGMNKFRRWGTPSSGGGGGRGGYGDSGYGGRGESGYGSRGDSGYGGRGDSGGRGSWAPSRDSSGSSGWGRERSRSPERFRGGPPSTSSPPRSFHEAMMMKNR

SEQ ID NO: 48811 - protein, 534 aa, Arabidopsis thaliana
  peptide (1)..(534): Ceres Seq. ID no. 13591987
  misc_feature (63)..(272): Pfam Name: DEAD/DEAH box helicase Pfam Description: DEAD/DEAH box helicase
  misc_feature (51)..(452): Homolog of NCBI NO: 34903586 NR Description: putative ethylene-responsive RNA helicase
  misc_feature (88)..(497): Homolog of NCBI NO: 23397305 NR Description: putative RNA helicase, DRH1 [Arabidopsis thaliana]
  misc_feature (48)..(525): Homolog of NCBI NO: 34913856 NR Description: putative RNA helicase, DRH1
  misc_feature (49)..(506): Homolog of NCBI NO: 1169228 NR Description: RNA helicase-like protein DB10
  misc_feature (48)..(504): Homolog of NCBI NO: 15230730 NR Description: DEAD box RNA helicase, putative [Arabidopsis
  misc_feature (48)..(497): Homolog of NCBI NO: 15528719 NR Description: putative RNA helicase, DRH1
  misc_feature (47)..(510): Homolog of NCBI NO: 6137207 NR Description: P72 DEAD box protein [Pisum sativum]
  misc_feature (47)..(497): Homolog of NCBI NO: 17065030 NR Description: RNA helicase, DRH1 [Arabidopsis thaliana]
  misc_feature (47)..(497): Homolog of NCBI NO: 30678365 NR Description: DEAD box RNA helicase (DRH1) [Arabidopsis
  misc_feature (47)..(497): Homolog of NCBI NO: 18395852 NR Description: DEAD box RNA helicase (DRH1) [Arabidopsis
MPYALSFVPGAIFALGGANVVRCATSLGFLQIIWSALFGGPNFLRCPPAAGFNSYLVLPANGRMVYSAGFSAPSPIQAQSWPIAMQNRDIVAIAKTGSGKTLGYLIPGFMHLQRIHNDSRMGPTILVLSPTRELATQIQVEALKFGKSSKISCACLYGGAPKGPQLKEIERGVDIVVATPGRLNDILEMKRISLHQVSYLVLDEADRMLDMGFEPQIRKIVNEVPTKRQTLMYTATWPKEVRKIAADLLVNPAQVNIGNVDELVANKSITQTIEVLAPMEKHSRLEQILRSQEPGSKIIIFCSTKRMCDQLARNLTRTFGAAAIHGDKSQAERDDVLNQFRSGRTPVLVATDVAARGLDVKDIRVVVNYDFPNGVEDYVHRIGRTGRAGATGLAYTFFGDQDAKHASDLIKILEGANQKVPPQVREMATRGGGGMNKFRRWGTPSSGGGGGRGGYGDSGYGGRGESGYGSRGDSGYGGRGDSGGRGSWAPSRDSSGSSGWGRERSRSPERFRGGPPSTSSPPRSFHEAMMMKNR

SEQ ID NO: 48812 - DNA, 2925 bp, Arabidopsis thaliana
  misc_feature (1)..(2925): Ceres Seq. ID no. 13578886
  misc_feature: MA Experiment ID: 20000171 Result: Down-regulated in Transcription
  misc_feature: MA Experiment 20000171 PARAMETER Experiment Name: At_42deg_Heat_P Parameter: Age (day) Value: 14
  misc_feature: MA Experiment 20000171 PARAMETER Experiment Name: At_42deg_Heat_P Parameter: Organism Value: A. thaliana
  misc_feature: MA Experiment 20000171 PARAMETER Experiment Name: At_42deg_Heat_P Parameter: Plant Line Value: WS
  misc_feature: MA Experiment 20000171 PARAMETER Experiment Name: At_42deg_Heat_P Parameter: Temperature (deg C) Value: 42 vs. 22
  misc_feature: MA Experiment 20000171 PARAMETER Experiment Name: At_42deg_Heat_P Parameter: Timepoint (hr) Value: 1
  misc_feature: MA Experiment 20000171 PARAMETER Experiment Name: At_42deg_Heat_P Parameter: Tissue Value: Aerial
  misc_feature: MA Experiment ID: 20000173 Result: Down-regulated in Transcription
  misc_feature: MA Experiment 20000173 PARAMETER Experiment Name: At_42deg_Heat_P Parameter: Age (day) Value: 14
  misc_feature: MA Experiment 20000173 PARAMETER Experiment Name: At_42deg_Heat_P Parameter: Organism Value: A. thaliana
  misc_feature: MA Experiment 20000173 PARAMETER Experiment Name: At_42deg_Heat_P Parameter: Plant Line Value: WS
  misc_feature: MA Experiment 20000173 PARAMETER Experiment Name: At_42deg_Heat_P Parameter: Temperature (deg C) Value: 42 vs. 22
  misc_feature: MA Experiment 20000173 PARAMETER Experiment Name: At_42deg_Heat_P Parameter: Timepoint (hr) Value: 6
  misc_feature: MA Experiment 20000173 PARAMETER Experiment Name: At_42deg_Heat_P Parameter: Tissue Value: Aerial
  misc_feature: MA Experiment ID: 20000184 Result: Up-regulated in Transcription
  misc_feature: MA Experiment 20000184 PARAMETER Experiment Name: At_Shoots__P Parameter: Age (day) Value: 7
  misc_feature: MA Experiment 20000184 PARAMETER Experiment Name: At_Shoots__P Parameter: Tissue Value: Shoots vs. Whole Plant
  misc_feature: MA Experiment ID: 20000185 Result: Up-regulated in Transcription
  misc_feature: MA Experiment 20000185 PARAMETER Experiment Name: At_Roots__P Parameter: Age (day) Value: 7 vs. 21
  misc_feature: MA Experiment 20000185 PARAMETER Experiment Name: At_Roots__P Parameter: Organism Value: A. thaliana
  misc_feature: MA Experiment 20000185 PARAMETER Experiment Name: At_Roots__P Parameter: Tissue Value: Roots vs. Whole Plant
  misc_feature: MA Experiment ID: 20000234 Result: Up-regulated in Transcription
  misc_feature: MA Experiment 20000234 PARAMETER Experiment Name: At_Siliques_P Parameter: Age (day) Value: 21
  misc_feature: MA Experiment 20000234 PARAMETER Experiment Name: At_Siliques_P Parameter: Organism Value: A. thaliana
  misc_feature: MA Experiment 20000234 PARAMETER Experiment Name: At_Siliques_P Parameter: Plant Line Value: WS
  misc_feature: MA Experiment 20000234 PARAMETER Experiment Name: At_Siliques_P Parameter: Tissue Value: Less Than 5mm Siliques vs. Whole Plant
  misc_feature: MA Experiment ID: 20000264 Result: Up-regulated in Transcription
  misc_feature: MA Experiment 20000264 PARAMETER Experiment Name: At_Open_Flower_P Parameter: Age (day) Value: 21
  misc_feature: MA Experiment 20000264 PARAMETER Experiment Name: At_Open_Flower_P Parameter: Plant Line Value: WS
  misc_feature: MA Experiment 20000264 PARAMETER Experiment Name: At_Open_Flower_P Parameter: Tissue Value: Open Flower vs. Whole Plant
  misc_feature: MA Experiment ID: 20000286 Result: Up-regulated in Transcription
  misc_feature: MA Experiment 20000286 PARAMETER Experiment Name: At_Open_Flower_P Parameter: Age (day) Value: 21
  misc_feature: MA Experiment 20000286 PARAMETER Experiment Name: At_Open_Flower_P Parameter: Plant Line Value: WS
  misc_feature: MA Experiment 20000286 PARAMETER Experiment Name: At_Open_Flower_P Parameter: Tissue Value: Half Open vs. Whole Plant
  misc_feature: MA Experiment ID: 20000438 Result: Up-regulated in Transcription
  misc_feature: MA Experiment 20000438 PARAMETER Experiment Name: At_Shoots__P Parameter: Age (day) Value: 14
  misc_feature: MA Experiment 20000438 PARAMETER Experiment Name: At_Shoots__P Parameter: Tissue Value: Shoots vs. Whole Plant
  misc_feature: MA Experiment ID: 20000439 Result: Up-regulated in Transcription
  misc_feature: MA Experiment 20000439 PARAMETER Experiment Name: At_Roots__P Parameter: Age (day) Value: 14 vs. 21
  misc_feature: MA Experiment 20000439 PARAMETER Experiment Name: At_Roots__P Parameter: Organism Value: A. thaliana
  misc_feature: MA Experiment 20000439 PARAMETER Experiment Name: At_Roots__P Parameter: Tissue Value: Roots vs. Whole Plant
  misc_feature: MA Experiment ID: 20001451 Result: Down-regulated in Transcription
  misc_feature: MA Experiment 20001451 PARAMETER Experiment Name: At_Far-red-induction_P Parameter: Age (day) Value: 7
  misc_feature: MA Experiment 20001451 PARAMETER Experiment Name: At_Far-red-induction_P Parameter: Light Value: Far-red vs. White
  misc_feature: MA Experiment 20001451 PARAMETER Experiment Name: At_Far-red-induction_P Parameter: Organism Value: A. thaliana
  misc_feature: MA Experiment 20001451 PARAMETER Experiment Name: At_Far-red-induction_P Parameter: Plant Line Value: Columbia
  misc_feature: MA Experiment 20001451 PARAMETER Experiment Name: At_Far-red-induction_P Parameter: Timepoint (hr) Value: 24
  misc_feature: MA Experiment 20001451 PARAMETER Experiment Name: At_Far-red-induction_P Parameter: Tissue Value: Whole Plant
gaaaagtgcaagtgacacatcttttacaacttctctcactgatgatacctttcttcctcttcctctgcctttgcttctctctctgagtcactacactctctcaccaacccatccttctctctgtcattctctaaaaaaagaggtccactataaatgagccttgagctgtggatgcttctttgtctggttttttagaatataataaaaaacaaaatgggtctctagatttcagatttctgggatctgggtgttagattaatctctttctcttccattattagtagagaaagctcactcctttcactcaaagtttctacctttttgttttcctgaaaatgggttgtgtttgaaatctcacactttgagatttgggtgtttattttgggatccttcttaccacatttagaaatttcagctagggttttcgatttctctacttctcagaggagattttagaggcaaaagatggctccaaggttggatttttcagattggtgggcgaaagacacgaggaaaggaacaccagttgtggtgaaaatggagaatcctaattactctgtagttgaaatcgacggtccagattcggcttttagaccagtggagaagagcagaggcaagaacgctaagcaagtcacttgggttttgcttctcaaagctcatagagctgttggatgtctcacttggctcgccactgtcttttggtctctccttggtgccatcaagaaacggcttagtttcactcacccacttggctctgagaaattaggcagagacagatggcttttcactgccattaagctcttcttagctgtttccttagtgattctcggctttgagattgttgcttattttagaggatggcattactttcaaagccctagtcttcacatccccactagcacacttgagatccagagcctgtttcatcttgtgtatgttggttggttaacccttagagctgattatattgctcctcccatcaaagctctctccaagttttgtattgtgctgttccttatacagtcagtagatcgtttggtactttgcttgggttgtttttggatcaagtataagaaaattaagccgagatttgatgaggaacctttccgtaatgatgatgctgagggatctggatctgagtatccaatggttcttgttcagattccaatgtgcaatgagagagaggtgtatgaacaatctatatctgccgtgtgtcaacttgactggccgaaagatcgaatactggttcaggttctcgatgattcgaatgatgaaagcatccaacagttaattaaagctgaggttgccaaatggagccaaaagggagtcaacataatctacaggcatcgcttggttagaactggatataaagctggtaacctcaaatcagcaatgagctgtgattacgttgaagcatacgagtatgtcgcaatctttgatgccgatttccagcctactccggatttccttaaactaacagttccacatttcaaggataacccagagttaggtctagttcaagctagatggacatttgtgaacaaagacgagaacttgttgacccgtcttcagaacatcaatctgtgttttcactttgaggtggagcagcaagtgaacggcgtgttcttgaacttctttggtttcaatggaacagctggagtatggagaatcaaagcccttgaggaatctggtggttggcttgaaaggactactgtggaggatatggacatagcagtccgcgctcatcttcatggatggaagttcatatatcttaatgacgtcaaggtcctttgcgaagttcctgagtcctacgaggcatataagaagcagcaacaccgttggcattcgggacctatgcagcttttccgcttgtgtcttggttcaatcttgacctctaagatagcgatatggaagaaggcgaatctgatacttctcttctttcttcttaggaaactcatacttcctttctactccttcactttgttctgcataatccttccactcaccatgtttgttccagaagctgagctccctgtttgggtcatctgctacataccagttttcatgtctttcctcaaccttcttccatctccaaaatcttttcctttcatcgttccttatctcttattcgagaacacaatgtctgtcaccaagttcaatgcgatggtgtccggattattccaattgggtagctcttacgagtggattgtcacaaagaaagctggaagatcatcagagtcagatcttttatctatcaccgagaaagagacaccaaccaagaaaagtcaattgcttaggggagtttccgacagcgaacttttggagctgagccaacttgaagaacagaaacaagcggtttcaaagaaacctgtcaagaaaaccaacaagatataccacaaagagctcgcattggcctttcttttgctcactgcagcgcttaggagtctcttggcagcacaaggagtgcatttctacttcctgttattccaaggtgttacctttcttcttgtgggtctcgatctcataggcgagcagatgagctgagaagaacaaaagaagattcataactcgggtcaataaatcagtgagtttgaatttccacttcctctatgttcagtggtatcctctgtaatgagattgttggaaccatagtggtaggcattaattgattttccgtttcgtttgtttgtttgttatgttggtttgattcctccattgttagggatagagtgtgagccagagattcatacatgtatacaatatctgtaaagttggaacatgttgttggcagttaaaagagcttctgtcttgaactaatttcaaggatcatgtcaaatcactgcagagaatttatgtaatttaaagtccaacctttgtggaaagagattgtaactgtaaataactaacaagaaccagttttctgac

SEQ ID NO: 48813 - protein, 692 aa, Arabidopsis thaliana; identical to SEQ ID NO: 42432
  peptide (1)..(692): Ceres Seq. ID no. 13578887
  misc_feature (230)..(405): Pfam Name: Glycosyl transferase Pfam Description: Glycosyl transferase
  misc_feature (96)..(691): Homolog of NCBI NO: 16974749 NR Description: CSLC9 [Oryza sativa]
  misc_feature (6)..(692): Homolog of NCBI NO: 15231448 NR Description: glycosyltransferase family 2 [Arabidopsis
  misc_feature (18)..(691): Homolog of NCBI NO: 28201308 NR Description: putative CSLC9(cellulose synthase-like)
  misc_feature (21)..(692): Homolog of NCBI NO: 18405677 NR Description: glycosyltransferase family 2 [Arabidopsis
  misc_feature (1)..(691): Homolog of NCBI NO: 15235900 NR Description: glycosyltransferase family 2 [Arabidopsis
  misc_feature (11)..(691): Homolog of NCBI NO: 34419218 NR Description: TPA: cellulose synthase-like C2
  misc_feature (607)..(692): Homolog of NCBI NO: 34419220 NR Description: TPA: cellulose synthase-like C3
  misc_feature (1)..(137): Homolog of NCBI NO: 34419220 NR Description: TPA: cellulose synthase-like C3
  misc_feature (140)..(632): Homolog of NCBI NO: 34419220 NR Description: TPA: cellulose synthase-like C3
  misc_feature (102)..(692): Homolog of NCBI NO: 7635490 NR Description: putative glucosyltransferase [Cicer arietinum]

SEQ ID NO: 48814 - protein, 668 aa, Arabidopsis thaliana; identical to SEQ ID NO: 42433
  peptide (1)..(668): Ceres Seq. ID no. 13578888
  misc_feature (206)..(381): Pfam Name: Glycosyl transferase Pfam Description: Glycosyl transferase
  misc_feature (72)..(667): Homolog of NCBI NO: 16974749 NR Description: CSLC9 [Oryza sativa]
  misc_feature (1)..(668): Homolog of NCBI NO: 15231448 NR Description: glycosyltransferase family 2 [Arabidopsis
  misc_feature (1)..(667): Homolog of NCBI NO: 28201308 NR Description: putative CSLC9(cellulose synthase-like)
  misc_feature (1)..(668): Homolog of NCBI NO: 18405677 NR Description: glycosyltransferase family 2 [Arabidopsis
  misc_feature (1)..(667): Homolog of NCBI NO: 15235900 NR Description: glycosyltransferase family 2 [Arabidopsis
  misc_feature (1)..(667): Homolog of NCBI NO: 34419218 NR Description: TPA: cellulose synthase-like C2
  misc_feature (583)..(668): Homolog of NCBI NO: 34419220 NR Description: TPA: cellulose synthase-like C3
  misc_feature (1)..(113): Homolog of NCBI NO: 34419220 NR Description: TPA: cellulose synthase-like C3
  misc_feature (116)..(608): Homolog of NCBI NO: 34419220 NR Description: TPA: cellulose synthase-like C3
  misc_feature (78)..(668): Homolog of NCBI NO: 7635490 NR Description: putative glucosyltransferase [Cicer arietinum]

SEQ ID NO: 48815 - protein, 465 aa, Arabidopsis thaliana; identical to SEQ ID NO: 42434
  peptide (1)..(465): Ceres Seq. ID no. 13578889
  misc_feature (3)..(178): Pfam Name: Glycosyl transferase Pfam Description: Glycosyl transferase
  misc_feature (1)..(464): Homolog of NCBI NO: 17385963 NR Description: CSLC9 [Oryza sativa]
  misc_feature (1)..(464): Homolog of NCBI NO: 16974749 NR Description: CSLC9 [Oryza sativa]
  misc_feature (1)..(465): Homolog of NCBI NO: 15231448 NR Description: glycosyltransferase family 2 [Arabidopsis
  misc_feature (1)..(464): Homolog of NCBI NO: 28201308 NR Description: putative CSLC9(cellulose synthase-like)
  misc_feature (1)..(465): Homolog of NCBI NO: 18405677 NR Description: glycosyltransferase family 2 [Arabidopsis
  misc_feature (1)..(464): Homolog of NCBI NO: 15235900 NR Description: glycosyltransferase family 2 [Arabidopsis
  misc_feature (1)..(464): Homolog of NCBI NO: 34419218 NR Description: TPA: cellulose synthase-like C2
  misc_feature (380)..(465): Homolog of NCBI NO: 34419220 NR Description: TPA: cellulose synthase-like C3
  misc_feature (1)..(405): Homolog of NCBI NO: 34419220 NR Description: TPA: cellulose synthase-like C3
  misc_feature (1)..(465): Homolog of NCBI NO: 7635490 NR Description: putative glucosyltransferase [Cicer arietinum]

SEQ ID NO: 48816 - DNA, 2611 bp, Arabidopsis thaliana; identical to SEQ ID NO: 44956
  misc_feature (1)..(2611): Ceres Seq. ID no. 13591498
  misc_feature: MA Experiment ID: 20000179 Result: Down-regulated in Transcription
  misc_feature: MA Experiment 20000179 PARAMETER Experiment Name: At_Germinating_Seeds_P Parameter: Age (hr) Value: 6 vs. 0
  misc_feature: MA Experiment 20000179 PARAMETER Experiment Name: At_Germinating_Seeds_P Parameter: Tissue Value: Germinating Seeds
  misc_feature: MA Experiment ID: 20000180 Result: Down-regulated in Transcription
  misc_feature: MA Experiment 20000180 PARAMETER Experiment Name: At_Germinating_Seeds_P Parameter: Age (hr) Value: 24 vs. 0
  misc_feature: MA Experiment 20000180 PARAMETER Experiment Name: At_Germinating_Seeds_P Parameter: Tissue Value: Germinating Seeds
  misc_feature: MA Experiment ID: 20000184 Result: Up-regulated in Transcription
  misc_feature: MA Experiment 20000184 PARAMETER Experiment Name: At_Shoots__P Parameter: Age (day) Value: 7
  misc_feature: MA Experiment 20000184 PARAMETER Experiment Name: At_Shoots__P Parameter: Tissue Value: Shoots vs. Whole Plant
  misc_feature: MA Experiment ID: 20000234 Result: Up-regulated in Transcription
  misc_feature: MA Experiment 20000234 PARAMETER Experiment Name: At_Siliques_P Parameter: Age (day) Value: 21
  misc_feature: MA Experiment 20000234 PARAMETER Experiment Name: At_Siliques_P Parameter: Organism Value: A. thaliana
  misc_feature: MA Experiment 20000234 PARAMETER Experiment Name: At_Siliques_P Parameter: Plant Line Value: WS
  misc_feature: MA Experiment 20000234 PARAMETER Experiment Name: At_Siliques_P Parameter: Tissue Value: Less Than 5mm Siliques vs. Whole Plant
  misc_feature: MA Experiment ID: 20000235 Result: Up-regulated in Transcription
  misc_feature: MA Experiment 20000235 PARAMETER Experiment Name: At_Siliques_P Parameter: Age (day) Value: 21
  misc_feature: MA Experiment 20000235 PARAMETER Experiment Name: At_Siliques_P Parameter: Organism Value: A. thaliana
  misc_feature: MA Experiment 20000235 PARAMETER Experiment Name: At_Siliques_P Parameter: Plant Line Value: WS
  misc_feature: MA Experiment 20000235 PARAMETER Experiment Name: At_Siliques_P Parameter: Tissue Value: 5-10mm Siliques vs. Whole Plant
  misc_feature: MA Experiment ID: 20000794 Result: Up-regulated in Transcription
  misc_feature: MA Experiment 20000794 PARAMETER Experiment Name: At_Petals_P Parameter: Age (day) Value: 23-25 days
  misc_feature: MA Experiment 20000794 PARAMETER Experiment Name: At_Petals_P Parameter: Plant Line Value: WS
  misc_feature: MA Experiment 20000794 PARAMETER Experiment Name: At_Petals_P Parameter: Tissue Value: Petals vs. Whole plant
  misc_feature: MA Experiment ID: 20001757 Result: Down-regulated in Transcription
  misc_feature: MA Experiment 20001757 PARAMETER Experiment Name: At_50mM_NH4NO3_L-to-H_P Parameter: Timepoint (hr) Value: 6
  misc_feature: MA Experiment 20001757 PARAMETER Experiment Name: At_50mM_NH4NO3_L-to-H_P Parameter: Tissue Value: Leaf
  misc_feature: MA Experiment 20001757 PARAMETER Experiment Name: At_50mM_NH4NO3_L-to-H_P Parameter: Treatment Value: 50mM NH4NO3 vs 100mM Mannitol

SEQ ID NO: 48817 - protein, 798 aa, Arabidopsis thaliana; identical to SEQ ID NO: 44957
  peptide (1)..(798): Ceres Seq. ID no. 13591499
  misc_feature (403)..(502): Pfam Name: PA domain Pfam Description: PA domain
  misc_feature (403)..(502): Pfam Name: PA domain Pfam Description: PA domain
  misc_feature (403)..(502): Pfam Name: PA domain Pfam Description: PA domain
  misc_feature (403)..(502): Pfam Name: PA domain Pfam Description: PA domain
  misc_feature (403)..(502): Pfam Name: PA domain Pfam Description: PA domain
  misc_feature (106)..(796): Homolog of NCBI NO: 24414066 NR Description: OJ1136_A10.14 [Oryza sativa (japonica
  misc_feature (35)..(795): Homolog of NCBI NO: 30697281 NR Description: subtilisin-like serine protease [Arabidopsis
  misc_feature (46)..(797): Homolog of NCBI NO: 30678198 NR Description: subtilisin-like serine protease, putative
  misc_feature (243)..(798): Homolog of NCBI NO: 29786399 NR Description: putative serine protease [Populus euramericana]
  misc_feature (42)..(797): Homolog of NCBI NO: 7435656 NR Description: subtilisin-like proteinase (EC 3.4.21.-) 2 -
  misc_feature (106)..(796): Homolog of NCBI NO: 24414066 NR Description: OJ1136_A10.14 [Oryza sativa (japonica
  misc_feature (46)..(797): Homolog of NCBI NO: 30678198 NR Description: subtilisin-like serine protease, putative
  misc_feature (42)..(797): Homolog of NCBI NO: 7435656 NR Description: subtilisin-like proteinase (EC 3.4.21.-) 2 -
  misc_feature (243)..(798): Homolog of NCBI NO: 29786399 NR Description: putative serine protease [Populus euramericana]
  misc_feature (46)..(797): Homolog of NCBI NO: 30678198 NR Description: subtilisin-like serine protease, putative
  misc_feature (35)..(795): Homolog of NCBI NO: 30697281 NR Description: subtilisin-like serine protease [Arabidopsis
  misc_feature (106)..(796): Homolog of NCBI NO: 24414066 NR Description: OJ1136_A10.14 [Oryza sativa (japonica
  misc_feature (52)..(798): Homolog of NCBI NO: 7435657 NR Description: subtilisin-like proteinase (EC 3.4.21.-) 1 -
  misc_feature (69)..(798): Homolog of NCBI NO: 14488360 NR Description: putative serine protease [Oryza sativa (japonica
  misc_feature (42)..(797): Homolog of NCBI NO: 18396193 NR Description: subtilisin-like serine protease, putative
  misc_feature (42)..(797): Homolog of NCBI NO: 22331076 NR Description: subtilisin-like serine protease, putative
  misc_feature (68)..(797): Homolog of NCBI NO: 18423316 NR Description: subtilisin-like serine protease [Arabidopsis
  misc_feature (106)..(796): Homolog of NCBI NO: 24414066 NR Description: OJ1136_A10.14 [Oryza sativa (japonica
  misc_feature (52)..(798): Homolog of NCBI NO: 7435657 NR Description: subtilisin-like proteinase (EC 3.4.21.-) 1 -
  misc_feature (69)..(798): Homolog of NCBI NO: 14488360 NR Description: putative serine protease [Oryza sativa (japonica
  misc_feature (42)..(797): Homolog of NCBI NO: 18396193 NR Description: subtilisin-like serine protease, putative
  misc_feature (42)..(797): Homolog of NCBI NO: 22331076 NR Description: subtilisin-like serine protease, putative
  misc_feature (68)..(797): Homolog of NCBI NO: 18423316 NR Description: subtilisin-like serine protease [Arabidopsis
  misc_feature (42)..(797): Homolog of NCBI NO: 7435656 NR Description: subtilisin-like proteinase (EC 3.4.21.-) 2 -
  misc_feature (243)..(798): Homolog of NCBI NO: 29786399 NR Description: putative serine protease [Populus euramericana]
  misc_feature (46)..(797): Homolog of NCBI NO: 30678198 NR Description: subtilisin-like serine protease, putative
  misc_feature (52)..(798): Homolog of NCBI NO: 7435657 NR Description: subtilisin-like proteinase (EC 3.4.21.-) 1 -
  misc_feature (69)..(798): Homolog of NCBI NO: 14488360 NR Description: putative serine protease [Oryza sativa (japonica
  misc_feature (42)..(797): Homolog of NCBI NO: 18396193 NR Description: subtilisin-like serine protease, putative
  misc_feature (42)..(797): Homolog of NCBI NO: 22331076 NR Description: subtilisin-like serine protease, putative
  misc_feature (68)..(797): Homolog of NCBI NO: 18423316 NR Description: subtilisin-like serine protease [Arabidopsis
  misc_feature (42)..(797): Homolog of NCBI NO: 7435656 NR Description: subtilisin-like proteinase (EC 3.4.21.-) 2 -
  misc_feature (243)..(798): Homolog of NCBI NO: 29786399 NR Description: putative serine protease [Populus euramericana]
  misc_feature (46)..(797): Homolog of NCBI NO: 30678198 NR Description: subtilisin-like serine protease, putative
  misc_feature (35)..(795): Homolog of NCBI NO: 30697281 NR Description: subtilisin-like serine protease [Arabidopsis
  misc_feature (35)..(795): Homolog of NCBI NO: 30697281 NR Description: subtilisin-like serine protease [Arabidopsis
  misc_feature (106)..(796): Homolog of NCBI NO: 24414066 NR Description: OJ1136_A10.14 [Oryza sativa (japonica
  misc_feature (52)..(798): Homolog of NCBI NO: 7435657 NR Description: subtilisin-like proteinase (EC 3.4.21.-) 1 -
  misc_feature (69)..(798): Homolog of NCBI NO: 14488360 NR Description: putative serine protease [Oryza sativa (japonica
  misc_feature (42)..(797): Homolog of NCBI NO: 18396193 NR Description: subtilisin-like serine protease, putative
  misc_feature (42)..(797): Homolog of NCBI NO: 22331076 NR Description: subtilisin-like serine protease, putative
  misc_feature (68)..(797): Homolog of NCBI NO: 18423316 NR Description: subtilisin-like serine protease [Arabidopsis
  misc_feature (42)..(797): Homolog of NCBI NO: 7435656 NR Description: subtilisin-like proteinase (EC 3.4.21.-) 2 -
  misc_feature (243)..(798): Homolog of NCBI NO: 29786399 NR Description: putative serine protease [Populus euramericana]
  misc_feature (35)..(795): Homolog of NCBI NO: 30697281 NR Description: subtilisin-like serine protease [Arabidopsis
  misc_feature (68)..(797): Homolog of NCBI NO: 18423316 NR Description: subtilisin-like serine protease [Arabidopsis
  misc_feature (42)..(797): Homolog of NCBI NO: 22331076 NR Description: subtilisin-like serine protease, putative
  misc_feature (42)..(797): Homolog of NCBI NO: 18396193 NR Description: subtilisin-like serine protease, putative
  misc_feature (69)..(798): Homolog of NCBI NO: 14488360 NR Description: putative serine protease [Oryza sativa (japonica
  misc_feature (52)..(798): Homolog of NCBI NO: 7435657 NR Description: subtilisin-like proteinase (EC 3.4.21.-) 1 -

SEQ ID NO: 48818 - protein, 757 aa, Arabidopsis thaliana; identical to SEQ ID NO: 44958
  peptide (1)..(757): Ceres Seq. ID no. 13591500
  misc_feature (362)..(461): Pfam Name: PA domain Pfam Description: PA domain
  misc_feature (362)..(461): Pfam Name: PA domain Pfam Description: PA domain
  misc_feature (362)..(461): Pfam Name: PA domain Pfam Description: PA domain
  misc_feature (362)..(461): Pfam Name: PA domain Pfam Description: PA domain
  misc_feature (362)..(461): Pfam Name: PA domain Pfam Description: PA domain
  misc_feature (65)..(755): Homolog of NCBI NO: 24414066 NR Description: OJ1136_A10.14 [Oryza sativa (japonica
  misc_feature (1)..(754): Homolog of NCBI NO: 30697281 NR Description: subtilisin-like serine protease [Arabidopsis
  misc_feature (5)..(756): Homolog of NCBI NO: 30678198 NR Description: subtilisin-like serine protease, putative
  misc_feature (202)..(757): Homolog of NCBI NO: 29786399 NR Description: putative serine protease [Populus euramericana]
  misc_feature (1)..(756): Homolog of NCBI NO: 7435656 NR Description: subtilisin-like proteinase (EC 3.4.21.-) 2 -
  misc_feature (65)..(755): Homolog of NCBI NO: 24414066 NR Description: OJ1136_A10.14 [Oryza sativa (japonica
  misc_feature (5)..(756): Homolog of NCBI NO: 30678198 NR Description: subtilisin-like serine protease, putative
  misc_feature (1)..(756): Homolog of NCBI NO: 7435656 NR Description: subtilisin-like proteinase (EC 3.4.21.-) 2 -
  misc_feature (202)..(757): Homolog of NCBI NO: 29786399 NR Description: putative serine protease [Populus euramericana]
  misc_feature (5)..(756): Homolog of NCBI NO: 30678198 NR Description: subtilisin-like serine protease, putative
  misc_feature (1)..(754): Homolog of NCBI NO: 30697281 NR Description: subtilisin-like serine protease [Arabidopsis
  misc_feature (65)..(755): Homolog of NCBI NO: 24414066 NR Description: OJ1136_A10.14 [Oryza sativa (japonica
  misc_feature (11)..(757): Homolog of NCBI NO: 7435657 NR Description: subtilisin-like proteinase (EC 3.4.21.-) 1 -
  misc_feature (28)..(757): Homolog of NCBI NO: 14488360 NR Description: putative serine protease [Oryza sativa (japonica
  misc_feature (1)..(756): Homolog of NCBI NO: 18396193 NR Description: subtilisin-like serine protease, putative
  misc_feature (1)..(756): Homolog of NCBI NO: 22331076 NR Description: subtilisin-like serine protease, putative
  misc_feature (27)..(756): Homolog of NCBI NO: 18423316 NR Description: subtilisin-like serine protease [Arabidopsis
  misc_feature (65)..(755): Homolog of NCBI NO: 24414066 NR Description: OJ1136_A10.14 [Oryza sativa (japonica
  misc_feature (11)..(757): Homolog of NCBI NO: 7435657 NR Description: subtilisin-like proteinase (EC 3.4.21.-) 1 -
  misc_feature (28)..(757): Homolog of NCBI NO: 14488360 NR Description: putative serine protease [Oryza sativa (japonica
  misc_feature (1)..(756): Homolog of NCBI NO: 18396193 NR Description: subtilisin-like serine protease, putative
  misc_feature (1)..(756): Homolog of NCBI NO: 22331076 NR Description: subtilisin-like serine protease, putative
  misc_feature (27)..(756): Homolog of NCBI NO: 18423316 NR Description: subtilisin-like serine protease [Arabidopsis
  misc_feature (1)..(756): Homolog of NCBI NO: 7435656 NR Description: subtilisin-like proteinase (EC 3.4.21.-) 2 -
  misc_feature (202)..(757): Homolog of NCBI NO: 29786399 NR Description: putative serine protease [Populus euramericana]
  misc_feature (5)..(756): Homolog of NCBI NO: 30678198 NR Description: subtilisin-like serine protease, putative
  misc_feature (11)..(757): Homolog of NCBI NO: 7435657 NR Description: subtilisin-like proteinase (EC 3.4.21.-) 1 -
  misc_feature (28)..(757): Homolog of NCBI NO: 14488360 NR Description: putative serine protease [Oryza sativa (japonica
  misc_feature (1)..(756): Homolog of NCBI NO: 18396193 NR Description: subtilisin-like serine protease, putative
  misc_feature (1)..(756): Homolog of NCBI NO: 22331076 NR Description: subtilisin-like serine protease, putative
  misc_feature (27)..(756): Homolog of NCBI NO: 18423316 NR Description: subtilisin-like serine protease [Arabidopsis
  misc_feature (1)..(756): Homolog of NCBI NO: 7435656 NR Description: subtilisin-like proteinase (EC 3.4.21.-) 2 -
  misc_feature (202)..(757): Homolog of NCBI NO: 29786399 NR Description: putative serine protease [Populus euramericana]
  misc_feature (5)..(756): Homolog of NCBI NO: 30678198 NR Description: subtilisin-like serine protease, putative
  misc_feature (1)..(754): Homolog of NCBI NO: 30697281 NR Description: subtilisin-like serine protease [Arabidopsis
  misc_feature (1)..(754): Homolog of NCBI NO: 30697281 NR Description: subtilisin-like serine protease [Arabidopsis
  misc_feature (65)..(755): Homolog of NCBI NO: 24414066 NR Description: OJ1136_A10.14 [Oryza sativa (japonica
  misc_feature (11)..(757): Homolog of NCBI NO: 7435657 NR Description: subtilisin-like proteinase (EC 3.4.21.-) 1 -
  misc_feature (28)..(757): Homolog of NCBI NO: 14488360 NR Description: putative serine protease [Oryza sativa (japonica
  misc_feature (1)..(756): Homolog of NCBI NO: 18396193 NR Description: subtilisin-like serine protease, putative
  misc_feature (1)..(756): Homolog of NCBI NO: 22331076 NR Description: subtilisin-like serine protease, putative
  misc_feature (27)..(756): Homolog of NCBI NO: 18423316 NR Description: subtilisin-like serine protease [Arabidopsis
  misc_feature (1)..(756): Homolog of NCBI NO: 7435656 NR Description: subtilisin-like proteinase (EC 3.4.21.-) 2 -
  misc_feature (202)..(757): Homolog of NCBI NO: 29786399 NR Description: putative serine protease [Populus euramericana]
  misc_feature (1)..(754): Homolog of NCBI NO: 30697281 NR Description: subtilisin-like serine protease [Arabidopsis
  misc_feature (27)..(756): Homolog of NCBI NO: 18423316 NR Description: subtilisin-like serine protease [Arabidopsis
  misc_feature (1)..(756): Homolog of NCBI NO: 22331076 NR Description: subtilisin-like serine protease, putative
  misc_feature (1)..(756): Homolog of NCBI NO: 18396193 NR Description: subtilisin-like serine protease, putative
  misc_feature (28)..(757): Homolog of NCBI NO: 14488360 NR Description: putative serine protease [Oryza sativa (japonica
  misc_feature (11)..(757): Homolog of NCBI NO: 7435657 NR Description: subtilisin-like proteinase (EC 3.4.21.-) 1 -

SEQ ID NO: 48819 - protein, 722 aa, Arabidopsis thaliana; identical to SEQ ID NO: 44959
  peptide (1)..(722): Ceres Seq. ID no. 13591501
  misc_feature (327)..(426): Pfam Name: PA domain Pfam Description: PA domain
  misc_feature (327)..(426): Pfam Name: PA domain Pfam Description: PA domain
  misc_feature (327)..(426): Pfam Name: PA domain Pfam Description: PA domain
  misc_feature (327)..(426): Pfam Name: PA domain Pfam Description: PA domain
  misc_feature (327)..(426): Pfam Name: PA domain Pfam Description: PA domain
  misc_feature (30)..(720): Homolog of NCBI NO: 24414066 NR Description: OJ1136_A10.14 [Oryza sativa (japonica
  misc_feature (1)..(719): Homolog of NCBI NO: 30697281 NR Description: subtilisin-like serine protease [Arabidopsis
  misc_feature (1)..(721): Homolog of NCBI NO: 30678198 NR Description: subtilisin-like serine protease, putative
  misc_feature (167)..(722): Homolog of NCBI NO: 29786399 NR Description: putative serine protease [Populus euramericana]
  misc_feature (1)..(721): Homolog of NCBI NO: 7435656 NR Description: subtilisin-like proteinase (EC 3.4.21.-) 2 -
  misc_feature (30)..(720): Homolog of NCBI NO: 24414066 NR Description: OJ1136_A10.14 [Oryza sativa (japonica
  misc_feature (1)..(721): Homolog of NCBI NO: 30678198 NR Description: subtilisin-like serine protease, putative
  misc_feature (1)..(721): Homolog of NCBI NO: 7435656 NR Description: subtilisin-like proteinase (EC 3.4.21.-) 2 -
  misc_feature (167)..(722): Homolog of NCBI NO: 29786399 NR Description: putative serine protease [Populus euramericana]
  misc_feature (1)..(721): Homolog of NCBI NO: 30678198 NR Description: subtilisin-like serine protease, putative
  misc_feature (1)..(719): Homolog of NCBI NO: 30697281 NR Description: subtilisin-like serine protease [Arabidopsis
  misc_feature (30)..(720): Homolog of NCBI NO: 24414066 NR Description: OJ1136_A10.14 [Oryza sativa (japonica
  misc_feature (1)..(722): Homolog of NCBI NO: 7435657 NR Description: subtilisin-like proteinase (EC 3.4.21.-) 1 -
  misc_feature (1)..(722): Homolog of NCBI NO: 14488360 NR Description: putative serine protease [Oryza sativa (japonica
  misc_feature (1)..(721): Homolog of NCBI NO: 18396193 NR Description: subtilisin-like serine protease, putative
  misc_feature (1)..(721): Homolog of NCBI NO: 22331076 NR Description: subtilisin-like serine protease, putative
  misc_feature (1)..(721): Homolog of NCBI NO: 18423316 NR Description: subtilisin-like serine protease [Arabidopsis
  misc_feature (30)..(720): Homolog of NCBI NO: 24414066 NR Description: OJ1136_A10.14 [Oryza sativa (japonica
  misc_feature (1)..(722): Homolog of NCBI NO: 7435657 NR Description: subtilisin-like proteinase (EC 3.4.21.-) 1 -
  misc_feature (1)..(722): Homolog of NCBI NO: 14488360 NR Description: putative serine protease [Oryza sativa (japonica
  misc_feature (1)..(721): Homolog of NCBI NO: 18396193 NR Description: subtilisin-like serine protease, putative
  misc_feature (1)..(721): Homolog of NCBI NO: 22331076 NR Description: subtilisin-like serine protease, putative
  misc_feature (1)..(721): Homolog of NCBI NO: 18423316 NR Description: subtilisin-like serine protease [Arabidopsis
  misc_feature (1)..(721): Homolog of NCBI NO: 7435656 NR Description: subtilisin-like proteinase (EC 3.4.21.-) 2 -
  misc_feature (167)..(722): Homolog of NCBI NO: 29786399 NR Description: putative serine protease [Populus euramericana]
  misc_feature (1)..(721): Homolog of NCBI NO: 30678198 NR Description: subtilisin-like serine protease, putative
  misc_feature (1)..(722): Homolog of NCBI NO: 7435657 NR Description: subtilisin-like proteinase (EC 3.4.21.-) 1 -
  misc_feature (1)..(722): Homolog of NCBI NO: 14488360 NR Description: putative serine protease [Oryza sativa (japonica
  misc_feature (1)..(721): Homolog of NCBI NO: 18396193 NR Description: subtilisin-like serine protease, putative
  misc_feature (1)..(721): Homolog of NCBI NO: 22331076 NR Description: subtilisin-like serine protease, putative
  misc_feature (1)..(721): Homolog of NCBI NO: 18423316 NR Description: subtilisin-like serine protease [Arabidopsis
  misc_feature (1)..(721): Homolog of NCBI NO: 7435656 NR Description: subtilisin-like proteinase (EC 3.4.21.-) 2 -
  misc_feature (167)..(722): Homolog of NCBI NO: 29786399 NR Description: putative serine protease [Populus euramericana]
  misc_feature (1)..(721): Homolog of NCBI NO: 30678198 NR Description: subtilisin-like serine protease, putative
  misc_feature (1)..(719): Homolog of NCBI NO: 30697281 NR Description: subtilisin-like serine protease [Arabidopsis
  misc_feature (1)..(719): Homolog of NCBI NO: 30697281 NR Description: subtilisin-like serine protease [Arabidopsis
  misc_feature (30)..(720): Homolog of NCBI NO: 24414066 NR Description: OJ1136_A10.14 [Oryza sativa (japonica
  misc_feature (1)..(722): Homolog of NCBI NO: 7435657 NR Description: subtilisin-like proteinase (EC 3.4.21.-) 1 -
  misc_feature (1)..(722): Homolog of NCBI NO: 14488360 NR Description: putative serine protease [Oryza sativa (japonica
  misc_feature (1)..(721): Homolog of NCBI NO: 18396193 NR Description: subtilisin-like serine protease, putative
  misc_feature (1)..(721): Homolog of NCBI NO: 22331076 NR Description: subtilisin-like serine protease, putative
  misc_feature (1)..(721): Homolog of NCBI NO: 18423316 NR Description: subtilisin-like serine protease [Arabidopsis
  misc_feature (1)..(721): Homolog of NCBI NO: 7435656 NR Description: subtilisin-like proteinase (EC 3.4.21.-) 2 -
  misc_feature (167)..(722): Homolog of NCBI NO: 29786399 NR Description: putative serine protease [Populus euramericana]
  misc_feature (1)..(719): Homolog of NCBI NO: 30697281 NR Description: subtilisin-like serine protease [Arabidopsis
  misc_feature (1)..(721): Homolog of NCBI NO: 18423316 NR Description: subtilisin-like serine protease [Arabidopsis
  misc_feature (1)..(721): Homolog of NCBI NO: 22331076 NR Description: subtilisin-like serine protease, putative
  misc_feature (1)..(721): Homolog of NCBI NO: 18396193 NR Description: subtilisin-like serine protease, putative
  misc_feature (1)..(722): Homolog of NCBI NO: 14488360 NR Description: putative serine protease [Oryza sativa (japonica
  misc_feature (1)..(722): Homolog of NCBI NO: 7435657 NR Description: subtilisin-like proteinase (EC 3.4.21.-) 1 -

SEQ ID NO: 48820 - DNA, 1755 bp, Arabidopsis thaliana
  misc_feature (1)..(1755): Ceres Seq. ID no. 12575509
  misc_feature: MA Experiment ID: 20000184 Result: Down-regulated in Transcription
  misc_feature: MA Experiment 20000184 PARAMETER Experiment Name: At_Shoots__P Parameter: Age (day) Value: 7
  misc_feature: MA Experiment 20000184 PARAMETER Experiment Name: At_Shoots__P Parameter: Tissue Value: Shoots vs. Whole Plant
  misc_feature: MA Experiment ID: 20000794 Result: Up-regulated in Transcription
  misc_feature: MA Experiment 20000794 PARAMETER Experiment Name: At_Petals_P Parameter: Age (day) Value: 23-25 days
  misc_feature: MA Experiment 20000794 PARAMETER Experiment Name: At_Petals_P Parameter: Plant Line Value: WS
  misc_feature: MA Experiment 20000794 PARAMETER Experiment Name: At_Petals_P Parameter: Tissue Value: Petals vs. Whole plant
atgacgaagaggaagaaggaagtaatagatgtcgattgctccgagaagaaagattttgtgattgattggtcttccgctatggataaggaagacgaagttcccgagctcgagattgttaataccaccaaacctactcctccgccaccgccaacgtttttctccgacgatcaaaccgattctccgaaactcctaaccgatcgtgacctcgacgagcagctagagcgtaaaaaagcgatcctgacattaggtccgggcttacccgacaagggtgagaaaattcgactcaaaatcgctgatctcgaagaggagaagcagcgtagagttttagaaggctcgaaaatggaggtggacagaagttctaaggtcgtgtcttcgactagctcaggttcagatgttttaccgcaaggaaatgcagtttcaaaagatacctctagagggaatgcagactcaaaagacacctctagacaagggaatgcagattcaaaagaagtctcacggtcaacattttctgcggttttcagtaaaccaaaaacggattctcagtcaaagaaagcctttggtaaagaactagaagatctgggatgtgaaaggaggaaacacaaggctggtagaaagcctgtaacaaggctgagcaacgggtggcggttgttgccagatgtagggaaagctgagcacagtgcaaagcagtttgattctggacttaaagaatcaaaagggaataagaaatccaaggaaccttatggaaagaaaaggcccatggaatcttcgacttattctctgattgatgatgatgatgatgatgatgatgatgatgacaacgacaccagtggccatgaaactcctagggagtggtcttgggaaaaatctccatcacaaagttcaaggcgccgtaagaaatcagaggacacagtgataaatgtggatgaagaagaagctcagccttcaacagtggcggagcaagcggctgaactgcctgaaggcttacaggaagatatatgctacccaacaagggatgatcctcactttgttcaagtttgtcttaaagatcttgaatgccttgcacctcgagaatatctgacatcgccggttatgaatttctacatgaggttcttgcagcagcagatatcatcatcgaatcaaatctctgctgattgtcacttctttaatacctatttctacaagaagctcagtgacgctgttacgtacaaggggaatgacaaggatgccttctttgtgaggttcaggcggtggtggaagggtattgatctatttcgtaaggcttatattttcataccaatacatgaagatctccactggagccttgtgatagtttgcatccctgataagaaagatgaatcggggttgactatacttcaccttgattctctaggacttcactcgagaaaatcaattgttgaaaatgtaaaaaggtttctaaaagacgaatggaattatttgaatcaagatgactattccttggatctgcctatctcagaaaaagtatggaaaaacctccctcgtaggatcagcgaagctgttgttcaggttccgcagcagaaaaacgattttgattgtggtccgtttgtgctcttcttcattaaacggttcattgaagaggcgcctcaaaggctgaaaaggaaagacctgggaatgttcgacaagaagtggtttagacccgatgaagcctctgctctgagaatcaaaatccgaaacacgctcatcgagctattccgtgtcagtgaccagacagagtaa

SEQ ID NO: 48821 - protein, 584 aa, Arabidopsis thaliana
  peptide (1)..(584): Ceres Seq. ID no. 12575510
  misc_feature (478)..(576): Homolog of NCBI NO: 15218250 NR Description: unknown protein; protein id: At1g09730.1
  misc_feature (282)..(434): Homolog of NCBI NO: 15218250 NR Description: unknown protein; protein id: At1g09730.1
  misc_feature (283)..(581): Homolog of NCBI NO: 30689748 NR Description: Ulp1 protease family [Arabidopsis thaliana]
  misc_feature (1)..(337): Homolog of NCBI NO: 7486914 NR Description: hypothetical protein T13D8.11 - Arabidopsis
  misc_feature (288)..(583): Homolog of NCBI NO: 34909336 NR Description: OSJNBb0021A09.14 [Oryza sativa (japonica
  misc_feature (4)..(584): Homolog of NCBI NO: 5091551 NR Description: T10O24.20 [Arabidopsis thaliana]
  misc_feature (4)..(584): Homolog of NCBI NO: 22329476 NR Description: putative protein-tyrosine phosphatase 2
  misc_feature (99)..(584): Homolog of NCBI NO: 7486914 NR Description: hypothetical protein T13D8.11 - Arabidopsis
  misc_feature (1)..(116): Homolog of NCBI NO: 15219025 NR Description: hypothetical protein; protein id: At1g60220.1
  misc_feature (163)..(584): Homolog of NCBI NO: 15219025 NR Description: hypothetical protein; protein id: At1g60220.1
MTKRKKEVIDVDCSEKKDFVIDWSSAMDKEDEVPELEIVNTTKPTPPPPPTFFSDDQTDSPKLLTDRDLDEQLERKKAILTLGPGLPDKGEKIRLKIADLEEEKQRRVLEGSKMEVDRSSKVVSSTSSGSDVLPQGNAVSKDTSRGNADSKDTSRQGNADSKEVSRSTFSAVFSKPKTDSQSKKAFGKELEDLGCERRKHKAGRKPVTRLSNGWRLLPDVGKAEHSAKQFDSGLKESKGNKKSKEPYGKKRPMESSTYSLIDDDDDDDDDDDNDTSGHETPREWSWEKSPSQSSRRRKKSEDTVINVDEEEAQPSTVAEQAAELPEGLQEDICYPTRDDPHFVQVCLKDLECLAPREYLTSPVMNFYMRFLQQQISSSNQISADCHFFNTYFYKKLSDAVTYKGNDKDAFFVRFRRWWKGIDLFRKAYIFIPIHEDLHWSLVIVCIPDKKDESGLTILHLDSLGLHSRKSIVENVKRFLKDEWNYLNQDDYSLDLPISEKVWKNLPRRISEAVVQVPQQKNDFDCGPFVLFFIKRFIEEAPQRLKRKDLGMFDKKWFRPDEASALRIKIRNTLIELFRVSDQTE

SEQ ID NO: 48822 - protein, 558 aa, Arabidopsis thaliana
  peptide (1)..(558): Ceres Seq. ID no. 12575511
  misc_feature (452)..(550): Homolog of NCBI NO: 15218250 NR Description: unknown protein; protein id: At1g09730.1
  misc_feature (256)..(408): Homolog of NCBI NO: 15218250 NR Description: unknown protein; protein id: At1g09730.1
  misc_feature (257)..(555): Homolog of NCBI NO: 30689748 NR Description: Ulp1 protease family [Arabidopsis thaliana]
  misc_feature (1)..(311): Homolog of NCBI NO: 7486914 NR Description: hypothetical protein T13D8.11 - Arabidopsis
  misc_feature (262)..(557): Homolog of NCBI NO: 34909336 NR Description: OSJNBb0021A09.14 [Oryza sativa (japonica
  misc_feature (1)..(558): Homolog of NCBI NO: 5091551 NR Description: T10O24.20 [Arabidopsis thaliana]
  misc_feature (1)..(558): Homolog of NCBI NO: 22329476 NR Description: putative protein-tyrosine phosphatase 2
  misc_feature (73)..(558): Homolog of NCBI NO: 7486914 NR Description: hypothetical protein T13D8.11 - Arabidopsis
  misc_feature (1)..(90): Homolog of NCBI NO: 15219025 NR Description: hypothetical protein; protein id: At1g60220.1
  misc_feature (137)..(558): Homolog of NCBI NO: 15219025 NR Description: hypothetical protein; protein id: At1g60220.1
MDKEDEVPELEIVNTTKPTPPPPPTFFSDDQTDSPKLLTDRDLDEQLERKKAILTLGPGLPDKGEKIRLKIADLEEEKQRRVLEGSKMEVDRSSKVVSSTSSGSDVLPQGNAVSKDTSRGNADSKDTSRQGNADSKEVSRSTFSAVFSKPKTDSQSKKAFGKELEDLGCERRKHKAGRKPVTRLSNGWRLLPDVGKAEHSAKQFDSGLKESKGNKKSKEPYGKKRPMESSTYSLIDDDDDDDDDDDNDTSGHETPREWSWEKSPSQSSRRRKKSEDTVINVDEEEAQPSTVAEQAAELPEGLQEDICYPTRDDPHFVQVCLKDLECLAPREYLTSPVMNFYMRFLQQQISSSNQISADCHFFNTYFYKKLSDAVTYKGNDKDAFFVRFRRWWKGIDLFRKAYIFIPIHEDLHWSLVIVCIPDKKDESGLTILHLDSLGLHSRKSIVENVKRFLKDEWNYLNQDDYSLDLPISEKVWKNLPRRISEAVVQVPQQKNDFDCGPFVLFFIKRFIEEAPQRLKRKDLGMFDKKWFRPDEASALRIKIRNTLIELFRVSDQTE

SEQ ID NO: 48823 - protein, 471 aa, Arabidopsis thaliana
  peptide (1)..(471): Ceres Seq. ID no. 12575512
  misc_feature (217)..(353): Homolog of NCBI NO: 7487082 NR Description: hypothetical protein T16L1.110 - Arabidopsis
  misc_feature (365)..(463): Homolog of NCBI NO: 15218250 NR Description: unknown protein; protein id: At1g09730.1
  misc_feature (169)..(321): Homolog of NCBI NO: 15218250 NR Description: unknown protein; protein id: At1g09730.1
  misc_feature (170)..(468): Homolog of NCBI NO: 30689748 NR Description: Ulp1 protease family [Arabidopsis thaliana]
  misc_feature (1)..(224): Homolog of NCBI NO: 7486914 NR Description: hypothetical protein T13D8.11 - Arabidopsis
  misc_feature (175)..(470): Homolog of NCBI NO: 34909336 NR Description: OSJNBb0021A09.14 [Oryza sativa (japonica
  misc_feature (1)..(471): Homolog of NCBI NO: 5091551 NR Description: T10O24.20 [Arabidopsis thaliana]
  misc_feature (1)..(471): Homolog of NCBI NO: 22329476 NR Description: putative protein-tyrosine phosphatase 2
  misc_feature (1)..(471): Homolog of NCBI NO: 7486914 NR Description: hypothetical protein T13D8.11 - Arabidopsis
  misc_feature (50)..(471): Homolog of NCBI NO: 15219025 NR Description: hypothetical protein; protein id: At1g60220.1
MEVDRSSKVVSSTSSGSDVLPQGNAVSKDTSRGNADSKDTSRQGNADSKEVSRSTFSAVFSKPKTDSQSKKAFGKELEDLGCERRKHKAGRKPVTRLSNGWRLLPDVGKAEHSAKQFDSGLKESKGNKKSKEPYGKKRPMESSTYSLIDDDDDDDDDDDNDTSGHETPREWSWEKSPSQSSRRRKKSEDTVINVDEEEAQPSTVAEQAAELPEGLQEDICYPTRDDPHFVQVCLKDLECLAPREYLTSPVMNFYMRFLQQQISSSNQISADCHFFNTYFYKKLSDAVTYKGNDKDAFFVRFRRWWKGIDLFRKAYIFIPIHEDLHWSLVIVCIPDKKDESGLTILHLDSLGLHSRKSIVENVKRFLKDEWNYLNQDDYSLDLPISEKVWKNLPRRISEAVVQVPQQKNDFDCGPFVLFFIKRFIEEAPQRLKRKDLGMFDKKWFRPDEASALRIKIRNTLIELFRVSDQTE

SEQ ID NO: 48824 - DNA, 1768 bp, Arabidopsis thaliana; identical to SEQ ID NO: 45403
  misc_feature (1)..(1768): Ceres Seq. ID no. 12639286
  misc_feature: MA Experiment ID: 20000169 Result: Down-regulated in Transcription
  misc_feature: MA Experiment 20000169 PARAMETER Experiment Name: At_100uM_ABA_P Parameter: Age (day) Value: 14
  misc_feature: MA Experiment 20000169 PARAMETER Experiment Name: At_100uM_ABA_P Parameter: Organism Value: A. thaliana
  misc_feature: MA Experiment 20000169 PARAMETER Experiment Name: At_100uM_ABA_P Parameter: Plant Line Value: WS
  misc_feature: MA Experiment 20000169 PARAMETER Experiment Name: At_100uM_ABA_P Parameter: Timepoint (hr) Value: 6
  misc_feature: MA Experiment 20000169 PARAMETER Experiment Name: At_100uM_ABA_P Parameter: Tissue Value: Aerial
  misc_feature: MA Experiment 20000169 PARAMETER Experiment Name: At_100uM_ABA_P Parameter: Treatment Value: 100uM ABA vs. No Treatment
  misc_feature: MA Experiment ID: 20000173 Result: Down-regulated in Transcription
  misc_feature: MA Experiment 20000173 PARAMETER Experiment Name: At_42deg_Heat_P Parameter: Age (day) Value: 14
  misc_feature: MA Experiment 20000173 PARAMETER Experiment Name: At_42deg_Heat_P Parameter: Organism Value: A. thaliana
  misc_feature: MA Experiment 20000173 PARAMETER Experiment Name: At_42deg_Heat_P Parameter: Plant Line Value: WS
  misc_feature: MA Experiment 20000173 PARAMETER Experiment Name: At_42deg_Heat_P Parameter: Temperature (deg C) Value: 42 vs. 22
  misc_feature: MA Experiment 20000173 PARAMETER Experiment Name: At_42deg_Heat_P Parameter: Timepoint (hr) Value: 6
  misc_feature: MA Experiment 20000173 PARAMETER Experiment Name: At_42deg_Heat_P Parameter: Tissue Value: Aerial
  misc_feature: MA Experiment ID: 20000227 Result: Up-regulated in Transcription
  misc_feature: MA Experiment 20000227 PARAMETER Experiment Name: At_Root-Tips-vs-Tops_P Parameter: Tissue Value: Root Tips vs. Root Tops
  misc_feature: MA Experiment ID: 20000234 Result: Up-regulated in Transcription
  misc_feature: MA Experiment 20000234 PARAMETER Experiment Name: At_Siliques_P Parameter: Age (day) Value: 21
  misc_feature: MA Experiment 20000234 PARAMETER Experiment Name: At_Siliques_P Parameter: Organism Value: A. thaliana
  misc_feature: MA Experiment 20000234 PARAMETER Experiment Name: At_Siliques_P Parameter: Plant Line Value: WS
  misc_feature: MA Experiment 20000234 PARAMETER Experiment Name: At_Siliques_P Parameter: Tissue Value: Less Than 5mm Siliques vs. Whole Plant
  misc_feature: MA Experiment ID: 20000264 Result: Up-regulated in Transcription
  misc_feature: MA Experiment 20000264 PARAMETER Experiment Name: At_Open_Flower_P Parameter: Age (day) Value: 21
  misc_feature: MA Experiment 20000264 PARAMETER Experiment Name: At_Open_Flower_P Parameter: Plant Line Value: WS
  misc_feature: MA Experiment 20000264 PARAMETER Experiment Name: At_Open_Flower_P Parameter: Tissue Value: Open Flower vs. Whole Plant
  misc_feature: MA Experiment ID: 20000265 Result: Up-regulated in Transcription
  misc_feature: MA Experiment 20000265 PARAMETER Experiment Name: At_Open_Flower_P Parameter: Age (day) Value: 21
  misc_feature: MA Experiment 20000265 PARAMETER Experiment Name: At_Open_Flower_P Parameter: Plant Line Value: WS
  misc_feature: MA Experiment 20000265 PARAMETER Experiment Name: At_Open_Flower_P Parameter: Tissue Value: Closed Flower vs. Whole Plant
  misc_feature: MA Experiment ID: 20000286 Result: Up-regulated in Transcription
  misc_feature: MA Experiment 20000286 PARAMETER Experiment Name: At_Open_Flower_P Parameter: Age (day) Value: 21
  misc_feature: MA Experiment 20000286 PARAMETER Experiment Name: At_Open_Flower_P Parameter: Plant Line Value: WS
  misc_feature: MA Experiment 20000286 PARAMETER Experiment Name: At_Open_Flower_P Parameter: Tissue Value: Half Open vs. Whole Plant
  misc_feature: MA Experiment ID: 20000437 Result: Down-regulated in Transcription
  misc_feature: MA Experiment 20000437 PARAMETER Experiment Name: At_Drought_P Parameter: Age (day) Value: 8
  misc_feature: MA Experiment 20000437 PARAMETER Experiment Name: At_Drought_P Parameter: Organism Value: A. thaliana
  misc_feature: MA Experiment 20000437 PARAMETER Experiment Name: At_Drought_P Parameter: Plant Line Value: WS
  misc_feature: MA Experiment 20000437 PARAMETER Experiment Name: At_Drought_P Parameter: Timepoint (hr) Value: 24
  misc_feature: MA Experiment 20000437 PARAMETER Experiment Name: At_Drought_P Parameter: Tissue Value: Whole Plant
  misc_feature: MA Experiment 20000437 PARAMETER Experiment Name: At_Drought_P Parameter: Treatment Value: Drought vs. No Drought
  misc_feature: MA Experiment ID: 20000455 Result: Down-regulated in Transcription
  misc_feature: MA Experiment 20000455 PARAMETER Experiment Name: At_100uM_ABA_P Parameter: Age (day) Value: 16
  misc_feature: MA Experiment 20000455 PARAMETER Experiment Name: At_100uM_ABA_P Parameter: Organism Value: A. thaliana
  misc_feature: MA Experiment 20000455 PARAMETER Experiment Name: At_100uM_ABA_P Parameter: Plant Line Value: WS
  misc_feature: MA Experiment 20000455 PARAMETER Experiment Name: At_100uM_ABA_P Parameter: Timepoint (hr) Value: 48
  misc_feature: MA Experiment 20000455 PARAMETER Experiment Name: At_100uM_ABA_P Parameter: Tissue Value: Aerial
  misc_feature: MA Experiment 20000455 PARAMETER Experiment Name: At_100uM_ABA_P Parameter: Treatment Value: 100uM ABA vs. No Treatment
  misc_feature: MA Experiment ID: 20001450 Result: Down-regulated in Transcription
  misc_feature: MA Experiment 20001450 PARAMETER Experiment Name: At_Far-red-induction_P Parameter: Age (day) Value: 7
  misc_feature: MA Experiment 20001450 PARAMETER Experiment Name: At_Far-red-induction_P Parameter: Light Value: Far-red vs. White
  misc_feature: MA Experiment 20001450 PARAMETER Experiment Name: At_Far-red-induction_P Parameter: Organism Value: A. thaliana
  misc_feature: MA Experiment 20001450 PARAMETER Experiment Name: At_Far-red-induction_P Parameter: Plant Line Value: Columbia
  misc_feature: MA Experiment 20001450 PARAMETER Experiment Name: At_Far-red-induction_P Parameter: Timepoint (hr) Value: 8
  misc_feature: MA Experiment 20001450 PARAMETER Experiment Name: At_Far-red-induction_P Parameter: Tissue Value: Whole Plant
  misc_feature: MA Experiment ID: 20001904 Result: Down-regulated in Transcription
  misc_feature: MA Experiment 20001904 PARAMETER Experiment Name: At_Drought_Reproduction_P Parameter: Age (day) Value: 37
  misc_feature: MA Experiment 20001904 PARAMETER Experiment Name: At_Drought_Reproduction_P Parameter: Organism Value: A. thaliana
  misc_feature: MA Experiment 20001904 PARAMETER Experiment Name: At_Drought_Reproduction_P Parameter: Plant Line Value: WS
  misc_feature: MA Experiment 20001904 PARAMETER Experiment Name: At_Drought_Reproduction_P Parameter: Timepoint (day) Value: 7
  misc_feature: MA Experiment 20001904 PARAMETER Experiment Name: At_Drought_Reproduction_P Parameter: Tissue Value: Rosettes
  misc_feature: MA Experiment 20001904 PARAMETER Experiment Name: At_Drought_Reproduction_P Parameter: Treatment Value: Drought vs. No Drought

SEQ ID NO: 48825 - protein, 583 aa, Arabidopsis thaliana; identical to SEQ ID NO: 45404
  peptide (1)..(583): Ceres Seq. ID no. 12639287
  misc_feature (28)..(496): Pfam Name: Myosin tail Pfam Description: Myosin tail
  misc_feature (28)..(496): Pfam Name: Myosin tail Pfam Description: Myosin tail
  misc_feature (89)..(471): Homolog of NCBI NO: 22331765 NR Description: putative protein
  misc_feature (89)..(471): Homolog of NCBI NO: 17978993 NR Description: AT3g53350/F4P12_50 [Arabidopsis thaliana]
  misc_feature (68)..(446): Homolog of NCBI NO: 34908020 NR Description: P0460C04.20 [Oryza sativa (japonica
  misc_feature (1)..(316): Homolog of NCBI NO: 11357801 NR Description: hypothetical protein F4P12.50 - Arabidopsis
  misc_feature (1)..(316): Homolog of NCBI NO: 17978993 NR Description: AT3g53350/F4P12_50 [Arabidopsis thaliana]
  misc_feature (89)..(471): Homolog of NCBI NO: 22331765 NR Description: putative protein
  misc_feature (68)..(446): Homolog of NCBI NO: 34908020 NR Description: P0460C04.20 [Oryza sativa (japonica
  misc_feature (1)..(316): Homolog of NCBI NO: 17978993 NR Description: AT3g53350/F4P12_50 [Arabidopsis thaliana]
  misc_feature (1)..(583): Homolog of NCBI NO: 15228082 NR Description: putative myosin heavy chain; protein id:
  misc_feature (3)..(583): Homolog of NCBI NO: 18076679 NR Description: P70 protein [Nicotiana tabacum]
  misc_feature (1)..(567): Homolog of NCBI NO: 8885572 NR Description: myosin heavy chain-like [Arabidopsis thaliana]
  misc_feature (7)..(567): Homolog of NCBI NO: 30697347 NR Description: expressed protein [Arabidopsis thaliana]
  misc_feature (1)..(316): Homolog of NCBI NO: 22331765 NR Description: putative protein
  misc_feature (1)..(316): Homolog of NCBI NO: 11357801 NR Description: hypothetical protein F4P12.50 - Arabidopsis
  misc_feature (89)..(471): Homolog of NCBI NO: 17978993 NR Description: AT3g53350/F4P12_50 [Arabidopsis thaliana]
  misc_feature (1)..(316): Homolog of NCBI NO: 22331765 NR Description: putative protein
  misc_feature (7)..(567): Homolog of NCBI NO: 30697347 NR Description: expressed protein [Arabidopsis thaliana]
  misc_feature (1)..(567): Homolog of NCBI NO: 8885572 NR Description: myosin heavy chain-like [Arabidopsis thaliana]
  misc_feature (3)..(583): Homolog of NCBI NO: 18076679 NR Description: P70 protein [Nicotiana tabacum]
  misc_feature (1)..(583): Homolog of NCBI NO: 15228082 NR Description: putative myosin heavy chain; protein id:

SEQ ID NO: 48826 - protein, 465 aa, Arabidopsis thaliana; identical to SEQ ID NO: 45405
  peptide (1)..(465): Ceres Seq. ID no. 12639288
  misc_feature (1)..(378): Pfam Name: Myosin tail Pfam Description: Myosin tail
  misc_feature (1)..(378): Pfam Name: Myosin tail Pfam Description: Myosin tail
  misc_feature (1)..(353): Homolog of NCBI NO: 22331765 NR Description: putative protein
  misc_feature (1)..(353): Homolog of NCBI NO: 17978993 NR Description: AT3g53350/F4P12_50 [Arabidopsis thaliana]
  misc_feature (1)..(328): Homolog of NCBI NO: 34908020 NR Description: P0460C04.20 [Oryza sativa (japonica
  misc_feature (1)..(198): Homolog of NCBI NO: 11357801 NR Description: hypothetical protein F4P12.50 - Arabidopsis
  misc_feature (1)..(198): Homolog of NCBI NO: 17978993 NR Description: AT3g53350/F4P12_50 [Arabidopsis thaliana]
  misc_feature (1)..(353): Homolog of NCBI NO: 22331765 NR Description: putative protein
  misc_feature (1)..(328): Homolog of NCBI NO: 34908020 NR Description: P0460C04.20 [Oryza sativa (japonica
  misc_feature (1)..(198): Homolog of NCBI NO: 17978993 NR Description: AT3g53350/F4P12_50 [Arabidopsis thaliana]
  misc_feature (1)..(465): Homolog of NCBI NO: 15228082 NR Description: putative myosin heavy chain; protein id:
  misc_feature (1)..(465): Homolog of NCBI NO: 18076679 NR Description: P70 protein [Nicotiana tabacum]
  misc_feature (1)..(449): Homolog of NCBI NO: 8885572 NR Description: myosin heavy chain-like [Arabidopsis thaliana]
  misc_feature (1)..(449): Homolog of NCBI NO: 30697347 NR Description: expressed protein [Arabidopsis thaliana]
  misc_feature (1)..(198): Homolog of NCBI NO: 22331765 NR Description: putative protein
  misc_feature (1)..(198): Homolog of NCBI NO: 11357801 NR Description: hypothetical protein F4P12.50 - Arabidopsis
  misc_feature (1)..(353): Homolog of NCBI NO: 17978993 NR Description: AT3g53350/F4P12_50 [Arabidopsis thaliana]
  misc_feature (1)..(198): Homolog of NCBI NO: 22331765 NR Description: putative protein
  misc_feature (1)..(449): Homolog of NCBI NO: 30697347 NR Description: expressed protein [Arabidopsis thaliana]
  misc_feature (1)..(449): Homolog of NCBI NO: 8885572 NR Description: myosin heavy chain-like [Arabidopsis thaliana]
  misc_feature (1)..(465): Homolog of NCBI NO: 18076679 NR Description: P70 protein [Nicotiana tabacum]
  misc_feature (1)..(465): Homolog of NCBI NO: 15228082 NR Description: putative myosin heavy chain; protein id:

SEQ ID NO: 48827 - protein, 434 aa, Arabidopsis thaliana; identical to SEQ ID NO: 45406
  peptide (1)..(434): Ceres Seq. ID no. 12639289
  misc_feature (1)..(347): Pfam Name: Myosin tail Pfam Description: Myosin tail
  misc_feature (1)..(347): Pfam Name: Myosin tail Pfam Description: Myosin tail
  misc_feature (1)..(322): Homolog of NCBI NO: 22331765 NR Description: putative protein
  misc_feature (1)..(322): Homolog of NCBI NO: 17978993 NR Description: AT3g53350/F4P12_50 [Arabidopsis thaliana]
  misc_feature (1)..(297): Homolog of NCBI NO: 34908020 NR Description: P0460C04.20 [Oryza sativa (japonica
  misc_feature (1)..(167): Homolog of NCBI NO: 11357801 NR Description: hypothetical protein F4P12.50 - Arabidopsis
  misc_feature (1)..(167): Homolog of NCBI NO: 17978993 NR Description: AT3g53350/F4P12_50 [Arabidopsis thaliana]
  misc_feature (1)..(322): Homolog of NCBI NO: 22331765 NR Description: putative protein
  misc_feature (1)..(297): Homolog of NCBI NO: 34908020 NR Description: P0460C04.20 [Oryza sativa (japonica
  misc_feature (1)..(167): Homolog of NCBI NO: 17978993 NR Description: AT3g53350/F4P12_50 [Arabidopsis thaliana]
  misc_feature (1)..(434): Homolog of NCBI NO: 15228082 NR Description: putative myosin heavy chain; protein id:
  misc_feature (1)..(434): Homolog of NCBI NO: 18076679 NR Description: P70 protein [Nicotiana tabacum]
  misc_feature (1)..(418): Homolog of NCBI NO: 8885572 NR Description: myosin heavy chain-like [Arabidopsis thaliana]
  misc_feature (1)..(418): Homolog of NCBI NO: 30697347 NR Description: expressed protein [Arabidopsis thaliana]
  misc_feature (1)..(167): Homolog of NCBI NO: 22331765 NR Description: putative protein
  misc_feature (1)..(167): Homolog of NCBI NO: 11357801 NR Description: hypothetical protein F4P12.50 - Arabidopsis
  misc_feature (1)..(322): Homolog of NCBI NO: 17978993 NR Description: AT3g53350/F4P12_50 [Arabidopsis thaliana]
  misc_feature (1)..(167): Homolog of NCBI NO: 22331765 NR Description: putative protein
  misc_feature (1)..(418): Homolog of NCBI NO: 30697347 NR Description: expressed protein [Arabidopsis thaliana]
  misc_feature (1)..(418): Homolog of NCBI NO: 8885572 NR Description: myosin heavy chain-like [Arabidopsis thaliana]
  misc_feature (1)..(434): Homolog of NCBI NO: 18076679 NR Description: P70 protein [Nicotiana tabacum]
  misc_feature (1)..(434): Homolog of NCBI NO: 15228082 NR Description: putative myosin heavy chain; protein id:

SEQ ID NO: 48828 - DNA, 3207 bp, Arabidopsis thaliana
  misc_feature (1)..(3207): Ceres Seq. ID no. 12601419
  misc_feature: MA Experiment ID: 20000173 Result: Down-regulated in Transcription
  misc_feature: MA Experiment 20000173 PARAMETER Experiment Name: At_42deg_Heat_P Parameter: Age (day) Value: 14
  misc_feature: MA Experiment 20000173 PARAMETER Experiment Name: At_42deg_Heat_P Parameter: Organism Value: A. thaliana
  misc_feature: MA Experiment 20000173 PARAMETER Experiment Name: At_42deg_Heat_P Parameter: Plant Line Value: WS
  misc_feature: MA Experiment 20000173 PARAMETER Experiment Name: At_42deg_Heat_P Parameter: Temperature (deg C) Value: 42 vs. 22
  misc_feature: MA Experiment 20000173 PARAMETER Experiment Name: At_42deg_Heat_P Parameter: Timepoint (hr) Value: 6
  misc_feature: MA Experiment 20000173 PARAMETER Experiment Name: At_42deg_Heat_P Parameter: Tissue Value: Aerial
  misc_feature: MA Experiment ID: 20000180 Result: Up-regulated in Transcription
  misc_feature: MA Experiment 20000180 PARAMETER Experiment Name: At_Germinating_Seeds_P Parameter: Age (hr) Value: 24 vs. 0
  misc_feature: MA Experiment 20000180 PARAMETER Experiment Name: At_Germinating_Seeds_P Parameter: Tissue Value: Germinating Seeds
  misc_feature: MA Experiment ID: 20000234 Result: Up-regulated in Transcription
  misc_feature: MA Experiment 20000234 PARAMETER Experiment Name: At_Siliques_P Parameter: Age (day) Value: 21
  misc_feature: MA Experiment 20000234 PARAMETER Experiment Name: At_Siliques_P Parameter: Organism Value: A. thaliana
  misc_feature: MA Experiment 20000234 PARAMETER Experiment Name: At_Siliques_P Parameter: Plant Line Value: WS
  misc_feature: MA Experiment 20000234 PARAMETER Experiment Name: At_Siliques_P Parameter: Tissue Value: Less Than 5mm Siliques vs. Whole Plant
  misc_feature: MA Experiment ID: 20000264 Result: Up-regulated in Transcription
  misc_feature: MA Experiment 20000264 PARAMETER Experiment Name: At_Open_Flower_P Parameter: Age (day) Value: 21
  misc_feature: MA Experiment 20000264 PARAMETER Experiment Name: At_Open_Flower_P Parameter: Plant Line Value: WS
  misc_feature: MA Experiment 20000264 PARAMETER Experiment Name: At_Open_Flower_P Parameter: Tissue Value: Open Flower vs. Whole Plant
  misc_feature: MA Experiment ID: 20000265 Result: Up-regulated in Transcription
  misc_feature: MA Experiment 20000265 PARAMETER Experiment Name: At_Open_Flower_P Parameter: Age (day) Value: 21
  misc_feature: MA Experiment 20000265 PARAMETER Experiment Name: At_Open_Flower_P Parameter: Plant Line Value: WS
  misc_feature: MA Experiment 20000265 PARAMETER Experiment Name: At_Open_Flower_P Parameter: Tissue Value: Closed Flower vs. Whole Plant
  misc_feature: MA Experiment ID: 20000286 Result: Up-regulated in Transcription
  misc_feature: MA Experiment 20000286 PARAMETER Experiment Name: At_Open_Flower_P Parameter: Age (day) Value: 21
  misc_feature: MA Experiment 20000286 PARAMETER Experiment Name: At_Open_Flower_P Parameter: Plant Line Value: WS
  misc_feature: MA Experiment 20000286 PARAMETER Experiment Name: At_Open_Flower_P Parameter: Tissue Value: Half Open vs. Whole Plant
  misc_feature: MA Experiment ID: 20000437 Result: Down-regulated in Transcription
  misc_feature: MA Experiment 20000437 PARAMETER Experiment Name: At_Drought_P Parameter: Age (day) Value: 8
  misc_feature: MA Experiment 20000437 PARAMETER Experiment Name: At_Drought_P Parameter: Organism Value: A. thaliana
  misc_feature: MA Experiment 20000437 PARAMETER Experiment Name: At_Drought_P Parameter: Plant Line Value: WS
  misc_feature: MA Experiment 20000437 PARAMETER Experiment Name: At_Drought_P Parameter: Timepoint (hr) Value: 24
  misc_feature: MA Experiment 20000437 PARAMETER Experiment Name: At_Drought_P Parameter: Tissue Value: Whole Plant
  misc_feature: MA Experiment 20000437 PARAMETER Experiment Name: At_Drought_P Parameter: Treatment Value: Drought vs. No Drought
  misc_feature: MA Experiment ID: 20000439 Result: Up-regulated in Transcription
  misc_feature: MA Experiment 20000439 PARAMETER Experiment Name: At_Roots__P Parameter: Age (day) Value: 14 vs. 21
  misc_feature: MA Experiment 20000439 PARAMETER Experiment Name: At_Roots__P Parameter: Organism Value: A. thaliana
  misc_feature: MA Experiment 20000439 PARAMETER Experiment Name: At_Roots__P Parameter: Tissue Value: Roots vs. Whole Plant
  misc_feature: MA Experiment ID: 20000495 Result: Up-regulated in Transcription
  misc_feature: MA Experiment 20000495 PARAMETER Experiment Name: At_Guard_Cells_P Parameter: Harvest Date Value: 8/2/2002
  misc_feature: MA Experiment 20000495 PARAMETER Experiment Name: At_Guard_Cells_P Parameter: Organism Value: A. thaliana
  misc_feature: MA Experiment 20000495 PARAMETER Experiment Name: At_Guard_Cells_P Parameter: Tissue Value: Guard Cells vs. Leaves
  misc_feature: MA Experiment ID: 20001450 Result: Down-regulated in Transcription
  misc_feature: MA Experiment 20001450 PARAMETER Experiment Name: At_Far-red-induction_P Parameter: Age (day) Value: 7
  misc_feature: MA Experiment 20001450 PARAMETER Experiment Name: At_Far-red-induction_P Parameter: Light Value: Far-red vs. White
  misc_feature: MA Experiment 20001450 PARAMETER Experiment Name: At_Far-red-induction_P Parameter: Organism Value: A. thaliana
  misc_feature: MA Experiment 20001450 PARAMETER Experiment Name: At_Far-red-induction_P Parameter: Plant Line Value: Columbia
  misc_feature: MA Experiment 20001450 PARAMETER Experiment Name: At_Far-red-induction_P Parameter: Timepoint (hr) Value: 8
  misc_feature: MA Experiment 20001450 PARAMETER Experiment Name: At_Far-red-induction_P Parameter: Tissue Value: Whole Plant
atggatgatgttcagatcgatgatacttttccggtggatctaaatggggttacgtcactttgttcaccggagattcctagtttcgatttcgttagtgatgaaacagagaaattagagatcggagatacttccattgatgactgtgacgatgcattgggcgactccatggattcgggattttattcatttcgcctaattctgggtgaagatggatttaatctgatgttaacgaggagagttaggtttctaattcaatatgagacaattatgttcataaatgctggaggagatgattcaaaggtattagattctgaattgaatatctccagagatgactatttcgaaggaggagatgtgttgagaacagaagagtctatagttgaagctggagactttccgttcatttatcagtcagcacgtgttgggaacttttgttaccagttaaacaatcttcttccgggagagtacttgatcgatttccatttcgcggagattattaacaccaatggacctaaagggataagggttttcaacgtctatgttcaagatgagaaggcaactgagtttgatatattctcggttgttggcgcaaataggccactcctgttggttgacttaagggtcatggtgatggatgatggattgattagggtaaggtttgaaggaataaatggaagtccagtggtttgtgggatttgtcttaggaaagcgccacaggtttcagttccaaggacatcacaagattttattaagtgtgagaattgtgctaccgaaatcgagatttctcctactcggaagagacttatgcgagccaaagctcatgacaagtatgagaagaaaatagcagagctttctgaacgatatgaacataagacaaatgagtgccacgaagcatggatgtcactgacctctgccaatgagcaactagagaaagtgatgatggaactcaacaataagatatatcaggcacgctctctagaccaaactgtgataacacaagctgattgtttgaagagtatcactagaaagtatgagaatgacaagagacattgggccacagcaattgattctctacaggagaaaatagagataatgaaaagggaacaatctcagctatcacaggaagcacatgaatgcgttgaagggatccccgaactgtataaaatggttggtggagttcaggcactcgtttcacagtgtgaagatctaaagcagaagtacagtgaagagcaagcaaaacgaaaggagctgtacaaccatatacaggagacgaaaggcaatattagggtcttttgtcgctgccgccctttgaatacggaggagacatcaaccaagtctgccacaattgttgactttgatggagcaaaagatggagagcttggtgttattacaggaaataattccaagaaaagtttcaagtttgacagagtttatacaccgaaagatggtcaagttgatgtcttcgccgatgcttctccgatggttgtttcagtcctagacggctacaatgtttgtatttttgcctacggacaaacaggaacaggaaagacgtttacaatggaaggtactccgcagaacaggggtgtcaattatagaaccgtcgagcaattgtttgaagttgctagagaaaggagagagaccatttcatataacatatcggttagtgtccttgaggtctacaatgaacaaataagagacttgttggcaacatcaccagggtcaaagaagttggagataaaacaatcctctgatggctctcatcacgttcctggattagtagaagcaaatgtggaaaatataaatgaagtctggaatgtgcttcaagctgggagcaacgcaagatcagttggatcaaataatgtgaacgagcatagcagccgctctcactgcatgctctctataatggtgaaagcaaagaacctgatgaatggtgattgcacaaaaagcaagctttggcttgtagatttagctggaagtgagagattggcaaagacggatgtgcaaggtgagcgtctgaaggaagcacaaaacatcaacaggtcactctcagctctgggggatgtgatttatgctttggcaacaaagagtagtcatattccatacagtccatctgagcatgatgtgagtgaaactctaagttcacttaactttgcaactcgtgtaagaggggttgaattgggtcctgcaaggaagcaagttgataccggtgagatccagaagttgaaagcaatggtggagaaagcaagacaagaaagccgatctaaagatgaatccataaagaaaatggaggagaacattcagaatctggaaggtaagaacaaaggaagagacaactcatacagaagtctccaggaaaaaaacaaagaccttcaaaaccaacttgattcagtccacaaccaatcagaaaaacaatatgcacagcttcaagagagactaaagagcagagatgagatttgtagcaatcttcaacaaaaggtcaaggagctagagtgcaagctacgggagagacaccaatcagattctgcagctaacaaccagaaggttaaggatcttgagaataatttgaaagaatctgaaggaagctcccttgtgtggcaacagaaggttaaggattacgagaataagttgaaagagtctgaaggaaactctcttgtgtggcaacagaagattaaagagttggagataaaacacaaagacgagcagagccaagaagcagtgttactacgacaaaagatcaaagaacttgagatgaggctaaaggagcaagagaagcatatacaggaaatggcaacaactagagaattccctgaagttgcaaacgctacgcctaatgaagtgaaaacttgcttcaaagaagataactttggcaatgagaatatggaatccaacaccaacatcctgagaacatcaaaccgtctcaagactaaaagacacgattcattaaatctcaatgagatgactagaaagaagagggcctcgagaagcggcgaaacagagaacaatggtgatgatcctcaaatgaaggagaaacggatcagaaaatcagacccaccaaaagttttctccagagtagtcagaccaactagaacagcttctggttcatcaagccaagtccctgtggctcagaagagagttattaaaagagaacaacaagaagttccggtcgtgaaagagagagactccaagaagaagatttggtcaagataa

SEQ ID NO: 48829 - protein, 1068 aa, Arabidopsis thaliana
  peptide (1)..(1068): Ceres Seq. ID no. 12601420
  misc_feature (264)..(928): Pfam Name: Myosin tail Pfam Description: Myosin tail
  misc_feature (258)..(749): Homolog of NCBI NO: 12597627 NR Description: kinesin family member C3 [Mus musculus]
  misc_feature (699)..(736): Homolog of NCBI NO: 34098378 NR Description: Kinesin-like protein KIFC3
  misc_feature (258)..(749): Homolog of NCBI NO: 34098378 NR Description: Kinesin-like protein KIFC3
  misc_feature (699)..(736): Homolog of NCBI NO: 16359321 NR Description: Similar to kinesin family member C3 [Mus musculus]
  misc_feature (258)..(749): Homolog of NCBI NO: 16359321 NR Description: Similar to kinesin family member C3 [Mus musculus]
  misc_feature (699)..(736): Homolog of NCBI NO: 34851230 NR Description: similar to kinesin motor protein KIFC3 [Rattus
  misc_feature (258)..(749): Homolog of NCBI NO: 34851230 NR Description: similar to kinesin motor protein KIFC3 [Rattus
  misc_feature (403)..(829): Homolog of NCBI NO: 15240982 NR Description: kinesin-related protein; protein id: At5g27550.1
  misc_feature (190)..(879): Homolog of NCBI NO: 15218418 NR Description: kinesin-related protein; protein id: At1g72250.1
  misc_feature (87)..(1042): Homolog of NCBI NO: 27476088 NR Description: Hypothetical protein [Oryza sativa (japonica
MDDVQIDDTFPVDLNGVTSLCSPEIPSFDFVSDETEKLEIGDTSIDDCDDALGDSMDSGFYSFRLILGEDGFNLMLTRRVRFLIQYETIMFINAGGDDSKVLDSELNISRDDYFEGGDVLRTEESIVEAGDFPFIYQSARVGNFCYQLNNLLPGEYLIDFHFAEIINTNGPKGIRVFNVYVQDEKATEFDIFSVVGANRPLLLVDLRVMVMDDGLIRVRFEGINGSPVVCGICLRKAPQVSVPRTSQDFIKCENCATEIEISPTRKRLMRAKAHDKYEKKIAELSERYEHKTNECHEAWMSLTSANEQLEKVMMELNNKIYQARSLDQTVITQADCLKSITRKYENDKRHWATAIDSLQEKIEIMKREQSQLSQEAHECVEGIPELYKMVGGVQALVSQCEDLKQKYSEEQAKRKELYNHIQETKGNIRVFCRCRPLNTEETSTKSATIVDFDGAKDGELGVITGNNSKKSFKFDRVYTPKDGQVDVFADASPMVVSVLDGYNVCIFAYGQTGTGKTFTMEGTPQNRGVNYRTVEQLFEVARERRETISYNISVSVLEVYNEQIRDLLATSPGSKKLEIKQSSDGSHHVPGLVEANVENINEVWNVLQAGSNARSVGSNNVNEHSSRSHCMLSIMVKAKNLMNGDCTKSKLWLVDLAGSERLAKTDVQGERLKEAQNINRSLSALGDVIYALATKSSHIPYSPSEHDVSETLSSLNFATRVRGVELGPARKQVDTGEIQKLKAMVEKARQESRSKDESIKKMEENIQNLEGKNKGRDNSYRSLQEKNKDLQNQLDSVHNQSEKQYAQLQERLKSRDEICSNLQQKVKELECKLRERHQSDSAANNQKVKDLENNLKESEGSSLVWQQKVKDYENKLKESEGNSLVWQQKIKELEIKHKDEQSQEAVLLRQKIKELEMRLKEQEKHIQEMATTREFPEVANATPNEVKTCFKEDNFGNENMESNTNILRTSNRLKTKRHDSLNLNEMTRKKRASRSGETENNGDDPQMKEKRIRKSDPPKVFSRVVRPTRTASGSSSQVPVAQKRVIKREQQEVPVVKERDSKKKIWSR

SEQ ID NO: 48830 - protein, 1013 aa, Arabidopsis thaliana
  peptide (1)..(1013): Ceres Seq. ID no. 12601421
  misc_feature (209)..(873): Pfam Name: Myosin tail Pfam Description: Myosin tail
  misc_feature (203)..(694): Homolog of NCBI NO: 12597627 NR Description: kinesin family member C3 [Mus musculus]
  misc_feature (644)..(681): Homolog of NCBI NO: 34098378 NR Description: Kinesin-like protein KIFC3
  misc_feature (203)..(694): Homolog of NCBI NO: 34098378 NR Description: Kinesin-like protein KIFC3
  misc_feature (644)..(681): Homolog of NCBI NO: 16359321 NR Description: Similar to kinesin family member C3 [Mus musculus]
  misc_feature (203)..(694): Homolog of NCBI NO: 16359321 NR Description: Similar to kinesin family member C3 [Mus musculus]
  misc_feature (644)..(681): Homolog of NCBI NO: 34851230 NR Description: similar to kinesin motor protein KIFC3 [Rattus
  misc_feature (203)..(694): Homolog of NCBI NO: 34851230 NR Description: similar to kinesin motor protein KIFC3 [Rattus
  misc_feature (348)..(774): Homolog of NCBI NO: 15240982 NR Description: kinesin-related protein; protein id: At5g27550.1
  misc_feature (135)..(824): Homolog of NCBI NO: 15218418 NR Description: kinesin-related protein; protein id: At1g72250.1
  misc_feature (32)..(987): Homolog of NCBI NO: 27476088 NR Description: Hypothetical protein [Oryza sativa (japonica
MDSGFYSFRLILGEDGFNLMLTRRVRFLIQYETIMFINAGGDDSKVLDSELNISRDDYFEGGDVLRTEESIVEAGDFPFIYQSARVGNFCYQLNNLLPGEYLIDFHFAEIINTNGPKGIRVFNVYVQDEKATEFDIFSVVGANRPLLLVDLRVMVMDDGLIRVRFEGINGSPVVCGICLRKAPQVSVPRTSQDFIKCENCATEIEISPTRKRLMRAKAHDKYEKKIAELSERYEHKTNECHEAWMSLTSANEQLEKVMMELNNKIYQARSLDQTVITQADCLKSITRKYENDKRHWATAIDSLQEKIEIMKREQSQLSQEAHECVEGIPELYKMVGGVQALVSQCEDLKQKYSEEQAKRKELYNHIQETKGNIRVFCRCRPLNTEETSTKSATIVDFDGAKDGELGVITGNNSKKSFKFDRVYTPKDGQVDVFADASPMVVSVLDGYNVCIFAYGQTGTGKTFTMEGTPQNRGVNYRTVEQLFEVARERRETISYNISVSVLEVYNEQIRDLLATSPGSKKLEIKQSSDGSHHVPGLVEANVENINEVWNVLQAGSNARSVGSNNVNEHSSRSHCMLSIMVKAKNLMNGDCTKSKLWLVDLAGSERLAKTDVQGERLKEAQNINRSLSALGDVIYALATKSSHIPYSPSEHDVSETLSSLNFATRVRGVELGPARKQVDTGEIQKLKAMVEKARQESRSKDESIKKMEENIQNLEGKNKGRDNSYRSLQEKNKDLQNQLDSVHNQSEKQYAQLQERLKSRDEICSNLQQKVKELECKLRERHQSDSAANNQKVKDLENNLKESEGSSLVWQQKVKDYENKLKESEGNSLVWQQKIKELEIKHKDEQSQEAVLLRQKIKELEMRLKEQEKHIQEMATTREFPEVANATPNEVKTCFKEDNFGNENMESNTNILRTSNRLKTKRHDSLNLNEMTRKKRASRSGETENNGDDPQMKEKRIRKSDPPKVFSRVVRPTRTASGSSSQVPVAQKRVIKREQQEVPVVKERDSKKKIWSR

SEQ ID NO: 48831 - protein, 994 aa, Arabidopsis thaliana
  peptide (1)..(994): Ceres Seq. ID no. 12601422
  misc_feature (190)..(854): Pfam Name: Myosin tail Pfam Description: Myosin tail
  misc_feature (184)..(675): Homolog of NCBI NO: 12597627 NR Description: kinesin family member C3 [Mus musculus]
  misc_feature (625)..(662): Homolog of NCBI NO: 34098378 NR Description: Kinesin-like protein KIFC3
  misc_feature (184)..(675): Homolog of NCBI NO: 34098378 NR Description: Kinesin-like protein KIFC3
  misc_feature (625)..(662): Homolog of NCBI NO: 16359321 NR Description: Similar to kinesin family member C3 [Mus musculus]
  misc_feature (184)..(675): Homolog of NCBI NO: 16359321 NR Description: Similar to kinesin family member C3 [Mus musculus]
  misc_feature (625)..(662): Homolog of NCBI NO: 34851230 NR Description: similar to kinesin motor protein KIFC3 [Rattus
  misc_feature (184)..(675): Homolog of NCBI NO: 34851230 NR Description: similar to kinesin motor protein KIFC3 [Rattus
  misc_feature (329)..(755): Homolog of NCBI NO: 15240982 NR Description: kinesin-related protein; protein id: At5g27550.1
  misc_feature (116)..(805): Homolog of NCBI NO: 15218418 NR Description: kinesin-related protein; protein id: At1g72250.1
  misc_feature (13)..(968): Homolog of NCBI NO: 27476088 NR Description: Hypothetical protein [Oryza sativa (japonica
MLTRRVRFLIQYETIMFINAGGDDSKVLDSELNISRDDYFEGGDVLRTEESIVEAGDFPFIYQSARVGNFCYQLNNLLPGEYLIDFHFAEIINTNGPKGIRVFNVYVQDEKATEFDIFSVVGANRPLLLVDLRVMVMDDGLIRVRFEGINGSPVVCGICLRKAPQVSVPRTSQDFIKCENCATEIEISPTRKRLMRAKAHDKYEKKIAELSERYEHKTNECHEAWMSLTSANEQLEKVMMELNNKIYQARSLDQTVITQADCLKSITRKYENDKRHWATAIDSLQEKIEIMKREQSQLSQEAHECVEGIPELYKMVGGVQALVSQCEDLKQKYSEEQAKRKELYNHIQETKGNIRVFCRCRPLNTEETSTKSATIVDFDGAKDGELGVITGNNSKKSFKFDRVYTPKDGQVDVFADASPMVVSVLDGYNVCIFAYGQTGTGKTFTMEGTPQNRGVNYRTVEQLFEVARERRETISYNISVSVLEVYNEQIRDLLATSPGSKKLEIKQSSDGSHHVPGLVEANVENINEVWNVLQAGSNARSVGSNNVNEHSSRSHCMLSIMVKAKNLMNGDCTKSKLWLVDLAGSERLAKTDVQGERLKEAQNINRSLSALGDVIYALATKSSHIPYSPSEHDVSETLSSLNFATRVRGVELGPARKQVDTGEIQKLKAMVEKARQESRSKDESIKKMEENIQNLEGKNKGRDNSYRSLQEKNKDLQNQLDSVHNQSEKQYAQLQERLKSRDEICSNLQQKVKELECKLRERHQSDSAANNQKVKDLENNLKESEGSSLVWQQKVKDYENKLKESEGNSLVWQQKIKELEIKHKDEQSQEAVLLRQKIKELEMRLKEQEKHIQEMATTREFPEVANATPNEVKTCFKEDNFGNENMESNTNILRTSNRLKTKRHDSLNLNEMTRKKRASRSGETENNGDDPQMKEKRIRKSDPPKVFSRVVRPTRTASGSSSQVPVAQKRVIKREQQEVPVVKERDSKKKIWSR

SEQ ID NO: 48832 - DNA, 1530 bp, Arabidopsis thaliana
  misc_feature (1)..(1530): Ceres Seq. ID no. 15175971
  misc_feature: MA Experiment ID: 108595 Result: Down-regulated in Transcription
  misc_feature: MA Experiment 108595 PARAMETER Experiment Name: At_Ler-pi_Ovule_cDNA_P Parameter: Plant Line Value: null
  misc_feature: MA Experiment ID: 20000071 Result: Down-regulated in Transcription
  misc_feature: MA Experiment 20000071 PARAMETER Experiment Name: At_100uM_ABA_Mutants_cDNA_P Parameter: Plant Line Value: CS8104
  misc_feature: MA Experiment 20000071 PARAMETER Experiment Name: At_100uM_ABA_Mutants_cDNA_P Parameter: Timepoint (hr) Value: 6
  misc_feature: MA Experiment 20000071 PARAMETER Experiment Name: At_100uM_ABA_Mutants_cDNA_P Parameter: Tissue Value: Aerial
  misc_feature: MA Experiment 20000071 PARAMETER Experiment Name: At_100uM_ABA_Mutants_cDNA_P Parameter: Treatment Value: 100uM ABA vs. No Treatment
  misc_feature: MA Experiment ID: 20000180 Result: Down-regulated in Transcription
  misc_feature: MA Experiment 20000180 PARAMETER Experiment Name: At_Germinating_Seeds_P Parameter: Age (hr) Value: 24 vs. 0
  misc_feature: MA Experiment 20000180 PARAMETER Experiment Name: At_Germinating_Seeds_P Parameter: Tissue Value: Germinating Seeds
  misc_feature: MA Experiment ID: 20000184 Result: Up-regulated in Transcription
  misc_feature: MA Experiment 20000184 PARAMETER Experiment Name: At_Shoots__P Parameter: Age (day) Value: 7
  misc_feature: MA Experiment 20000184 PARAMETER Experiment Name: At_Shoots__P Parameter: Tissue Value: Shoots vs. Whole Plant
  misc_feature: MA Experiment ID: 20000234 Result: Up-regulated in Transcription
  misc_feature: MA Experiment 20000234 PARAMETER Experiment Name: At_Siliques_P Parameter: Age (day) Value: 21
  misc_feature: MA Experiment 20000234 PARAMETER Experiment Name: At_Siliques_P Parameter: Organism Value: A. thaliana
  misc_feature: MA Experiment 20000234 PARAMETER Experiment Name: At_Siliques_P Parameter: Plant Line Value: WS
  misc_feature: MA Experiment 20000234 PARAMETER Experiment Name: At_Siliques_P Parameter: Tissue Value: Less Than 5mm Siliques vs. Whole Plant
  misc_feature: MA Experiment ID: 20001451 Result: Down-regulated in Transcription
  misc_feature: MA Experiment 20001451 PARAMETER Experiment Name: At_Far-red-induction_P Parameter: Age (day) Value: 7
  misc_feature: MA Experiment 20001451 PARAMETER Experiment Name: At_Far-red-induction_P Parameter: Light Value: Far-red vs. White
  misc_feature: MA Experiment 20001451 PARAMETER Experiment Name: At_Far-red-induction_P Parameter: Organism Value: A. thaliana
  misc_feature: MA Experiment 20001451 PARAMETER Experiment Name: At_Far-red-induction_P Parameter: Plant Line Value: Columbia
  misc_feature: MA Experiment 20001451 PARAMETER Experiment Name: At_Far-red-induction_P Parameter: Timepoint (hr) Value: 24
  misc_feature: MA Experiment 20001451 PARAMETER Experiment Name: At_Far-red-induction_P Parameter: Tissue Value: Whole Plant
  misc_feature: MA Experiment ID: 20001557 Result: Up-regulated in Transcription
  misc_feature: MA Experiment 20001557 PARAMETER Experiment Name: At_Drought_Soil_Dry_P Parameter: Age (day) Value: 27
  misc_feature: MA Experiment 20001557 PARAMETER Experiment Name: At_Drought_Soil_Dry_P Parameter: Organism Value: A. thaliana
  misc_feature: MA Experiment 20001557 PARAMETER Experiment Name: At_Drought_Soil_Dry_P Parameter: Plant Line Value: WS
  misc_feature: MA Experiment 20001557 PARAMETER Experiment Name: At_Drought_Soil_Dry_P Parameter: Post Timepoint (hr) Value: 3
  misc_feature: MA Experiment 20001557 PARAMETER Experiment Name: At_Drought_Soil_Dry_P Parameter: Post-Treatment Value: Re-Water vs. No Drought
  misc_feature: MA Experiment 20001557 PARAMETER Experiment Name: At_Drought_Soil_Dry_P Parameter: Timepoint (day) Value: 13
  misc_feature: MA Experiment 20001557 PARAMETER Experiment Name: At_Drought_Soil_Dry_P Parameter: Treatment Value: Drought vs. No Drought
  misc_feature: MA Experiment ID: 20001558 Result: Up-regulated in Transcription
  misc_feature: MA Experiment 20001558 PARAMETER Experiment Name: At_Drought_Soil_Dry_P Parameter: Age (day) Value: 27
  misc_feature: MA Experiment 20001558 PARAMETER Experiment Name: At_Drought_Soil_Dry_P Parameter: Organism Value: A. thaliana
  misc_feature: MA Experiment 20001558 PARAMETER Experiment Name: At_Drought_Soil_Dry_P Parameter: Plant Line Value: WS
  misc_feature: MA Experiment 20001558 PARAMETER Experiment Name: At_Drought_Soil_Dry_P Parameter: Post Timepoint (hr) Value: 6
  misc_feature: MA Experiment 20001558 PARAMETER Experiment Name: At_Drought_Soil_Dry_P Parameter: Post-Treatment Value: Re-Water vs. No Drought
  misc_feature: MA Experiment 20001558 PARAMETER Experiment Name: At_Drought_Soil_Dry_P Parameter: Timepoint (day) Value: 13
  misc_feature: MA Experiment 20001558 PARAMETER Experiment Name: At_Drought_Soil_Dry_P Parameter: Treatment Value: Drought vs. No Drought
  misc_feature: MA Experiment ID: 20001757 Result: Up-regulated in Transcription
  misc_feature: MA Experiment 20001757 PARAMETER Experiment Name: At_50mM_NH4NO3_L-to-H_P Parameter: Timepoint (hr) Value: 6
  misc_feature: MA Experiment 20001757 PARAMETER Experiment Name: At_50mM_NH4NO3_L-to-H_P Parameter: Tissue Value: Leaf
  misc_feature: MA Experiment 20001757 PARAMETER Experiment Name: At_50mM_NH4NO3_L-to-H_P Parameter: Treatment Value: 50mM NH4NO3 vs 100mM Mannitol
ggtagaagagctactacttcatcaaccacaaccactatctcctcaaaatctctctctaccgatcgatggaagcagcagtgccacgtctcgtctattgcggaccggagccaattcgattctccgtctcctcccgccgctccttcgtctccgggattcctcaccgtaataaacgctctcgccagattctagccgtcgctactgatcctaaacctacacagactagtccacccaagtccaccaccgtaaacggatcttcttctccatcgtctgcgtcaaaagtagtcaacaacaatgtttccactagaattaacgatgtatcaaaagagattaaaagagtacgagctcaaatggaagaagatgaacagttatctgtgttgatgagagggcttcgtggccagaatttgaaggattcggtttttgctgatgataatattcagctaaggcttgttgagactggtgaaagcagtgagttcttacctttggtatatgatccggagaccatttctgcctattggggagagagagagagagagagagagctcactagtccccccccccccccccccgacgccgctcatttttagggtttcagatataggcagattctcacatttgcaaacatgacgactcagatcagcaagaagagaaagtttgtagcggacggtgtgttctacgctgaattgaatgaggttcttacaagagagctagcagaggatggttactctggtgttgaggttagggttactcctatgaggactgagattatcatcagagctacacgtactcagaatgttctcggtgagaaggggaggagaattagggaattgacttcccttgttcagaagagattcaagtttccagttgacagtgttgagctttatgccgagaaggttaacaaaagaggtctctgtgccatcgctcaggctgagtctttacgttacaagcttcttggtggtctcgctgttcgtagggcttgctatggtgtgttgaggtttgttatggagagtggagctaagggatgcgaggttatcgtgagtggaaagcttcgtgctgccagagccaagtctatgaagttcaaagatggctacatggtgtcatctggtcaaccaactaaggaatacatagactctgcagtgagacatgttttgcttagacaaggtgtgttgggaatcaaggtgaaggttatgcttgattgggaccctaagggcatatcaggaccaaagacaccattgcctgatgttgtgatcattcattctcctaaagaagaagaggccatctacgcacctgctcaggttgctgccccggctgctctcgtagcagatgcaccactcacagccgtagattaccctgcgatgatcccagtcgcctaaaagaatcctttgtactagtcgatgtgattttgttttcaactgttcttgctcttttgacagattatagcttctcgtatcttcgaatcagacacgtttcctctgttcttattcgaaaattatctcaagtttccattgttgaaaaagccctttttagtttcat

SEQ ID NO: 48833 - protein, 249 aa, Arabidopsis thaliana
  peptide (1)..(249): Ceres Seq. ID no. 15175972
  misc_feature (104)..(188): Pfam Name: Ribosomal protein S3, C-terminal domain Pfam Description: Ribosomal protein S3, C-terminal domain
  misc_feature (1)..(216): Homolog of NCBI NO: 12848978 NR Description: unnamed protein product [Mus musculus]
  misc_feature (1)..(216): Homolog of NCBI NO: 6755372 NR Description: ribosomal protein S3 [Mus musculus]
  misc_feature (1)..(249): Homolog of NCBI NO: 133940 NR Description: 40S ribosomal protein S3A (S1A)
  misc_feature (1)..(216): Homolog of NCBI NO: 12847921 NR Description: unnamed protein product [Mus musculus]
  misc_feature (1)..(249): Homolog of NCBI NO: 38512247 NR Description: Ribosomal protein S3 [Silurana tropicalis]
  misc_feature (1)..(225): Homolog of NCBI NO: 22204124 NR Description: putative 40S ribosomal protein S3 [Triticum
  misc_feature (3)..(230): Homolog of NCBI NO: 14192875 NR Description: Putative 40S ribosomal protein; contains
  misc_feature (1)..(249): Homolog of NCBI NO: 15238533 NR Description: 40S ribosomal protein S3 (RPS3C) [Arabidopsis
  misc_feature (1)..(247): Homolog of NCBI NO: 15225107 NR Description: 40S ribosomal protein S3 (RPS3A) [Arabidopsis
  misc_feature (1)..(249): Homolog of NCBI NO: 15232352 NR Description: 40S ribosomal protein S3 (RPS3B) [Arabidopsis
MTTQISKKRKFVADGVFYAELNEVLTRELAEDGYSGVEVRVTPMRTEIIIRATRTQNVLGEKGRRIRELTSLVQKRFKFPVDSVELYAEKVNKRGLCAIAQAESLRYKLLGGLAVRRACYGVLRFVMESGAKGCEVIVSGKLRAARAKSMKFKDGYMVSSGQPTKEYIDSAVRHVLLRQGVLGIKVKVMLDWDPKGISGPKTPLPDVVIIHSPKEEEAIYAPAQVAAPAALVADAPLTAVDYPAMIPVA

SEQ ID NO: 48834 - protein, 206 aa, Arabidopsis thaliana
  peptide (1)..(206): Ceres Seq. ID no. 15175973
  misc_feature (61)..(145): Pfam Name: Ribosomal protein S3, C-terminal domain Pfam Description: Ribosomal protein S3, C-terminal domain
  misc_feature (1)..(173): Homolog of NCBI NO: 12848978 NR Description: unnamed protein product [Mus musculus]
  misc_feature (1)..(173): Homolog of NCBI NO: 6755372 NR Description: ribosomal protein S3 [Mus musculus]
  misc_feature (1)..(206): Homolog of NCBI NO: 133940 NR Description: 40S ribosomal protein S3A (S1A)
  misc_feature (1)..(173): Homolog of NCBI NO: 12847921 NR Description: unnamed protein product [Mus musculus]
  misc_feature (1)..(206): Homolog of NCBI NO: 38512247 NR Description: Ribosomal protein S3 [Silurana tropicalis]
  misc_feature (1)..(182): Homolog of NCBI NO: 22204124 NR Description: putative 40S ribosomal protein S3 [Triticum
  misc_feature (1)..(187): Homolog of NCBI NO: 14192875 NR Description: Putative 40S ribosomal protein; contains
  misc_feature (1)..(206): Homolog of NCBI NO: 15238533 NR Description: 40S ribosomal protein S3 (RPS3C) [Arabidopsis
  misc_feature (1)..(204): Homolog of NCBI NO: 15225107 NR Description: 40S ribosomal protein S3 (RPS3A) [Arabidopsis
  misc_feature (1)..(206): Homolog of NCBI NO: 15232352 NR Description: 40S ribosomal protein S3 (RPS3B) [Arabidopsis
MRTEIIIRATRTQNVLGEKGRRIRELTSLVQKRFKFPVDSVELYAEKVNKRGLCAIAQAESLRYKLLGGLAVRRACYGVLRFVMESGAKGCEVIVSGKLRAARAKSMKFKDGYMVSSGQPTKEYIDSAVRHVLLRQGVLGIKVKVMLDWDPKGISGPKTPLPDVVIIHSPKEEEAIYAPAQVAAPAALVADAPLTAVDYPAMIPVA

SEQ ID NO: 48835 - protein, 172 aa, Arabidopsis thaliana
  peptide (1)..(172): Ceres Seq. ID no. 15175974
  misc_feature (1)..(155): Homolog of NCBI NO: 18404075 NR Description: expressed protein [Arabidopsis thaliana]
MEAAVPRLVYCGPEPIRFSVSSRRSFVSGIPHRNKRSRQILAVATDPKPTQTSPPKSTTVNGSSSPSSASKVVNNNVSTRINDVSKEIKRVRAQMEEDEQLSVLMRGLRGQNLKDSVFADDNIQLRLVETGESSEFLPLVYDPETISAYWGERERERELTSPPPPPPDAAHF

SEQ ID NO: 48836 - DNA, 1635 bp, Arabidopsis thaliana
  misc_feature (1)..(1635): Ceres Seq. ID no. 15168814
  misc_feature: MA Experiment ID: 20000171 Result: Up-regulated in Transcription
  misc_feature: MA Experiment 20000171 PARAMETER Experiment Name: At_42deg_Heat_P Parameter: Age (day) Value: 14
  misc_feature: MA Experiment 20000171 PARAMETER Experiment Name: At_42deg_Heat_P Parameter: Organism Value: A. thaliana
  misc_feature: MA Experiment 20000171 PARAMETER Experiment Name: At_42deg_Heat_P Parameter: Plant Line Value: WS
  misc_feature: MA Experiment 20000171 PARAMETER Experiment Name: At_42deg_Heat_P Parameter: Temperature (deg C) Value: 42 vs. 22
  misc_feature: MA Experiment 20000171 PARAMETER Experiment Name: At_42deg_Heat_P Parameter: Timepoint (hr) Value: 1
  misc_feature: MA Experiment 20000171 PARAMETER Experiment Name: At_42deg_Heat_P Parameter: Tissue Value: Aerial
  misc_feature: MA Experiment ID: 20000234 Result: Down-regulated in Transcription
  misc_feature: MA Experiment 20000234 PARAMETER Experiment Name: At_Siliques_P Parameter: Age (day) Value: 21
  misc_feature: MA Experiment 20000234 PARAMETER Experiment Name: At_Siliques_P Parameter: Organism Value: A. thaliana
  misc_feature: MA Experiment 20000234 PARAMETER Experiment Name: At_Siliques_P Parameter: Plant Line Value: WS
  misc_feature: MA Experiment 20000234 PARAMETER Experiment Name: At_Siliques_P Parameter: Tissue Value: Less Than 5mm Siliques vs. Whole Plant
  misc_feature: MA Experiment ID: 20000235 Result: Down-regulated in Transcription
  misc_feature: MA Experiment 20000235 PARAMETER Experiment Name: At_Siliques_P Parameter: Age (day) Value: 21
  misc_feature: MA Experiment 20000235 PARAMETER Experiment Name: At_Siliques_P Parameter: Organism Value: A. thaliana
  misc_feature: MA Experiment 20000235 PARAMETER Experiment Name: At_Siliques_P Parameter: Plant Line Value: WS
  misc_feature: MA Experiment 20000235 PARAMETER Experiment Name: At_Siliques_P Parameter: Tissue Value: 5-10mm Siliques vs. Whole Plant
  misc_feature: MA Experiment ID: 20000264 Result: Down-regulated in Transcription
  misc_feature: MA Experiment 20000264 PARAMETER Experiment Name: At_Open_Flower_P Parameter: Age (day) Value: 21
  misc_feature: MA Experiment 20000264 PARAMETER Experiment Name: At_Open_Flower_P Parameter: Plant Line Value: WS
  misc_feature: MA Experiment 20000264 PARAMETER Experiment Name: At_Open_Flower_P Parameter: Tissue Value: Open Flower vs. Whole Plant
  misc_feature: MA Experiment ID: 20000437 Result: Down-regulated in Transcription
  misc_feature: MA Experiment 20000437 PARAMETER Experiment Name: At_Drought_P Parameter: Age (day) Value: 8
  misc_feature: MA Experiment 20000437 PARAMETER Experiment Name: At_Drought_P Parameter: Organism Value: A. thaliana
  misc_feature: MA Experiment 20000437 PARAMETER Experiment Name: At_Drought_P Parameter: Plant Line Value: WS
  misc_feature: MA Experiment 20000437 PARAMETER Experiment Name: At_Drought_P Parameter: Timepoint (hr) Value: 24
  misc_feature: MA Experiment 20000437 PARAMETER Experiment Name: At_Drought_P Parameter: Tissue Value: Whole Plant
  misc_feature: MA Experiment 20000437 PARAMETER Experiment Name: At_Drought_P Parameter: Treatment Value: Drought vs. No Drought
  misc_feature: MA Experiment ID: 20000445 Result: Up-regulated in Transcription
  misc_feature: MA Experiment 20000445 PARAMETER Experiment Name: At_100uM_NAA__P Parameter: Age (day) Value: 14
  misc_feature: MA Experiment 20000445 PARAMETER Experiment Name: At_100uM_NAA__P Parameter: Organism Value: A. thaliana
  misc_feature: MA Experiment 20000445 PARAMETER Experiment Name: At_100uM_NAA__P Parameter: Plant Line Value: WS
  misc_feature: MA Experiment 20000445 PARAMETER Experiment Name: At_100uM_NAA__P Parameter: Timepoint (hr) Value: 6
  misc_feature: MA Experiment 20000445 PARAMETER Experiment Name: At_100uM_NAA__P Parameter: Tissue Value: Aerial
  misc_feature: MA Experiment 20000445 PARAMETER Experiment Name: At_100uM_NAA__P Parameter: Treatment Value: 100uM NAA vs. No Treatment
  misc_feature: MA Experiment ID: 20000495 Result: Down-regulated in Transcription
  misc_feature: MA Experiment 20000495 PARAMETER Experiment Name: At_Guard_Cells_P Parameter: Harvest Date Value: 8/2/2002
  misc_feature: MA Experiment 20000495 PARAMETER Experiment Name: At_Guard_Cells_P Parameter: Organism Value: A. thaliana
  misc_feature: MA Experiment 20000495 PARAMETER Experiment Name: At_Guard_Cells_P Parameter: Tissue Value: Guard Cells vs. Leaves
  misc_feature: MA Experiment ID: 20001247 Result: Up-regulated in Transcription
  misc_feature: MA Experiment 20001247 PARAMETER Experiment Name: At_Far-red-induction_P Parameter: Age (day) Value: 7
  misc_feature: MA Experiment 20001247 PARAMETER Experiment Name: At_Far-red-induction_P Parameter: Light Value: Far-red vs. White
  misc_feature: MA Experiment 20001247 PARAMETER Experiment Name: At_Far-red-induction_P Parameter: Organism Value: A. thaliana
  misc_feature: MA Experiment 20001247 PARAMETER Experiment Name: At_Far-red-induction_P Parameter: Plant Line Value: Columbia
  misc_feature: MA Experiment 20001247 PARAMETER Experiment Name: At_Far-red-induction_P Parameter: Timepoint (hr) Value: 1
  misc_feature: MA Experiment 20001247 PARAMETER Experiment Name: At_Far-red-induction_P Parameter: Tissue Value: Whole Plant
  misc_feature: MA Experiment ID: 20001451 Result: Down-regulated in Transcription
  misc_feature: MA Experiment 20001451 PARAMETER Experiment Name: At_Far-red-induction_P Parameter: Age (day) Value: 7
  misc_feature: MA Experiment 20001451 PARAMETER Experiment Name: At_Far-red-induction_P Parameter: Light Value: Far-red vs. White
  misc_feature: MA Experiment 20001451 PARAMETER Experiment Name: At_Far-red-induction_P Parameter: Organism Value: A. thaliana
  misc_feature: MA Experiment 20001451 PARAMETER Experiment Name: At_Far-red-induction_P Parameter: Plant Line Value: Columbia
  misc_feature: MA Experiment 20001451 PARAMETER Experiment Name: At_Far-red-induction_P Parameter: Timepoint (hr) Value: 24
  misc_feature: MA Experiment 20001451 PARAMETER Experiment Name: At_Far-red-induction_P Parameter: Tissue Value: Whole Plant
  misc_feature: MA Experiment ID: 20001557 Result: Up-regulated in Transcription
  misc_feature: MA Experiment 20001557 PARAMETER Experiment Name: At_Drought_Soil_Dry_P Parameter: Age (day) Value: 27
  misc_feature: MA Experiment 20001557 PARAMETER Experiment Name: At_Drought_Soil_Dry_P Parameter: Organism Value: A. thaliana
  misc_feature: MA Experiment 20001557 PARAMETER Experiment Name: At_Drought_Soil_Dry_P Parameter: Plant Line Value: WS
  misc_feature: MA Experiment 20001557 PARAMETER Experiment Name: At_Drought_Soil_Dry_P Parameter: Post Timepoint (hr) Value: 3
  misc_feature: MA Experiment 20001557 PARAMETER Experiment Name: At_Drought_Soil_Dry_P Parameter: Post-Treatment Value: Re-Water vs. No Drought
  misc_feature: MA Experiment 20001557 PARAMETER Experiment Name: At_Drought_Soil_Dry_P Parameter: Timepoint (day) Value: 13
  misc_feature: MA Experiment 20001557 PARAMETER Experiment Name: At_Drought_Soil_Dry_P Parameter: Treatment Value: Drought vs. No Drought
  misc_feature: MA Experiment ID: 20001558 Result: Up-regulated in Transcription
  misc_feature: MA Experiment 20001558 PARAMETER Experiment Name: At_Drought_Soil_Dry_P Parameter: Age (day) Value: 27
  misc_feature: MA Experiment 20001558 PARAMETER Experiment Name: At_Drought_Soil_Dry_P Parameter: Organism Value: A. thaliana
  misc_feature: MA Experiment 20001558 PARAMETER Experiment Name: At_Drought_Soil_Dry_P Parameter: Plant Line Value: WS
  misc_feature: MA Experiment 20001558 PARAMETER Experiment Name: At_Drought_Soil_Dry_P Parameter: Post Timepoint (hr) Value: 6
  misc_feature: MA Experiment 20001558 PARAMETER Experiment Name: At_Drought_Soil_Dry_P Parameter: Post-Treatment Value: Re-Water vs. No Drought
  misc_feature: MA Experiment 20001558 PARAMETER Experiment Name: At_Drought_Soil_Dry_P Parameter: Timepoint (day) Value: 13
  misc_feature: MA Experiment 20001558 PARAMETER Experiment Name: At_Drought_Soil_Dry_P Parameter: Treatment Value: Drought vs. No Drought
  misc_feature: MA Experiment ID: 20001560 Result: Up-regulated in Transcription
  misc_feature: MA Experiment 20001560 PARAMETER Experiment Name: At_Drought_Soil_Dry_P Parameter: Age (day) Value: 28
  misc_feature: MA Experiment 20001560 PARAMETER Experiment Name: At_Drought_Soil_Dry_P Parameter: Organism Value: A. thaliana
  misc_feature: MA Experiment 20001560 PARAMETER Experiment Name: At_Drought_Soil_Dry_P Parameter: Plant Line Value: WS
  misc_feature: MA Experiment 20001560 PARAMETER Experiment Name: At_Drought_Soil_Dry_P Parameter: Post Timepoint (hr) Value: None
  misc_feature: MA Experiment 20001560 PARAMETER Experiment Name: At_Drought_Soil_Dry_P Parameter: Post-Treatment Value: None
  misc_feature: MA Experiment 20001560 PARAMETER Experiment Name: At_Drought_Soil_Dry_P Parameter: Timepoint (day) Value: 14
  misc_feature: MA Experiment 20001560 PARAMETER Experiment Name: At_Drought_Soil_Dry_P Parameter: Treatment Value: Drought vs. No Drought
  misc_feature: MA Experiment ID: 20001757 Result: Down-regulated in Transcription
  misc_feature: MA Experiment 20001757 PARAMETER Experiment Name: At_50mM_NH4NO3_L-to-H_P Parameter: Timepoint (hr) Value: 6
  misc_feature: MA Experiment 20001757 PARAMETER Experiment Name: At_50mM_NH4NO3_L-to-H_P Parameter: Tissue Value: Leaf
  misc_feature: MA Experiment 20001757 PARAMETER Experiment Name: At_50mM_NH4NO3_L-to-H_P Parameter: Treatment Value: 50mM NH4NO3 vs 100mM Mannitol
gaaaaatgccaatgtttcagccttctaagaacggtgggtttgatgggcatatcttagatctacactcggcggttaaagacggtgttcttggcggcggagatgggaaatttctggtggttgttaccgatgagaagaagaaattggatttgaaggagatgatttctgagctggaattacctgaaataccctctgttttcatctgtcctatctctctagagccgatgcaagatccagtgaccttgtgtactggtcaaacctacgagaggtccaacattctcaaatggttcaatatagggcattgtacttgcccaacgacgatgcaagagctttgggatgatttggtcactcctaacaagactcttcaccaattgatctacacttggttttcacagaagtatgttttgatgaagaaacgatctgaagatgtgcaaggacgtgctattgagattctgggtacgttgagaaaggctaaagggaaagcaaaggttcatgctttaagcgagctaaagcaagttgtgatggctcacgctattgctaagaagactgttgttgatgaaggtggagtcttagtgatctcttctcttttaagtccttttacttctcacgctgttggatctgaggctatagctattcttgttaatcttgagcttgactctgattccaaagctggattgatgcaaccagctagggtctcgttgatggttgatatgttgaatgatggttcgattgaaactaagatcaattgtgctagattgattggaaggttggtggaggagaaaggttttagagcagagcttgtttctagtcatagtttgcttgttggattaatgagattggttaaagataggagacgaagaaacggcgtttcgcctgcgttaacgctgctcaaatcggtttctgttcataaacaagttaggaacttgttggttaggattggtgcagttcctcaattggttgatgttttgccatgtttggatgtggagtgtttagagtcagctcttttcgtgttggattcgttatgtttagaaagcgaaggcagaattgctttgaaagattcggttaacacgattccgcataccgttaggttactgatgaaggtatcagagaaatgcacaaactatgcgatatcgattctttggtcagtttgcaaattagcttctgaagaatgttcatctcttgctgttgaagttggtttggctgcaaagcttttgcttgtgatacaaagtggatgtgatccagctttgaagcaacgttcagctgagctattgaagttatgtagtctacattattcagactcaatgtttatctccaaatgtaaactcacaagaactatccaataaaagactgatcaagttttcacctttcgggtcaaaatcacacaacggatctgccccatcttgttgatgtatatagaaatgaagaagctcaaggagtatgagagtaagaaacgagtttcgatgtgttgaattctattttgcaatgttatttgaataataatagttaagtagaagtaaactgtataaatctttttgttgtggttggttcattattcagtagaagaatagattgaagaaaggaatcatttttttggcctcttgtaagttactagctgtttgtgagtcataataattggag

SEQ ID NO: 48837 - protein, 445 aa, Arabidopsis thaliana
  peptide (1)..(445): Ceres Seq. ID no. 15168815
  misc_feature (60)..(134): Pfam Name: U-box domain Pfam Description: U-box domain
  misc_feature (60)..(437): Homolog of NCBI NO: 30686609 NR Description: expressed protein [Arabidopsis thaliana]
  misc_feature (60)..(437): Homolog of NCBI NO: 25408431 NR Description: hypothetical protein At2g35930 [imported] -
  misc_feature (61)..(423): Homolog of NCBI NO: 13539578 NR Description: photoperiod responsive protein [Solanum tuberosum
  misc_feature (2)..(444): Homolog of NCBI NO: 20330772 NR Description: Unknown protein [Oryza sativa (japonica
  misc_feature (2)..(417): Homolog of NCBI NO: 11358045 NR Description: hypothetical protein T16K5.160 - Arabidopsis
  misc_feature (2)..(445): Homolog of NCBI NO: 21536926 NR Description: unknown [Arabidopsis thaliana]
  misc_feature (2)..(445): Homolog of NCBI NO: 18408953 NR Description: expressed protein [Arabidopsis thaliana]
  misc_feature (1)..(437): Homolog of NCBI NO: 7486518 NR Description: hypothetical protein F6H11.10 - Arabidopsis
  misc_feature (2)..(445): Homolog of NCBI NO: 17064800 NR Description: Unknown protein [Arabidopsis thaliana]
  misc_feature (2)..(445): Homolog of NCBI NO: 15239204 NR Description: expressed protein [Arabidopsis thaliana]
KMPMFQPSKNGGFDGHILDLHSAVKDGVLGGGDGKFLVVVTDEKKKLDLKEMISELELPEIPSVFICPISLEPMQDPVTLCTGQTYERSNILKWFNIGHCTCPTTMQELWDDLVTPNKTLHQLIYTWFSQKYVLMKKRSEDVQGRAIEILGTLRKAKGKAKVHALSELKQVVMAHAIAKKTVVDEGGVLVISSLLSPFTSHAVGSEAIAILVNLELDSDSKAGLMQPARVSLMVDMLNDGSIETKINCARLIGRLVEEKGFRAELVSSHSLLVGLMRLVKDRRRRNGVSPALTLLKSVSVHKQVRNLLVRIGAVPQLVDVLPCLDVECLESALFVLDSLCLESEGRIALKDSVNTIPHTVRLLMKVSEKCTNYAISILWSVCKLASEECSSLAVEVGLAAKLLLVIQSGCDPALKQRSAELLKLCSLHYSDSMFISKCKLTRTIQ

SEQ ID NO: 48838 - protein, 444 aa, Arabidopsis thaliana
  peptide (1)..(444): Ceres Seq. ID no. 15168816
  misc_feature (59)..(133): Pfam Name: U-box domain Pfam Description: U-box domain
  misc_feature (59)..(436): Homolog of NCBI NO: 30686609 NR Description: expressed protein [Arabidopsis thaliana]
  misc_feature (59)..(436): Homolog of NCBI NO: 25408431 NR Description: hypothetical protein At2g35930 [imported] -
  misc_feature (60)..(422): Homolog of NCBI NO: 13539578 NR Description: photoperiod responsive protein [Solanum tuberosum
  misc_feature (1)..(443): Homolog of NCBI NO: 20330772 NR Description: Unknown protein [Oryza sativa (japonica
  misc_feature (1)..(416): Homolog of NCBI NO: 11358045 NR Description: hypothetical protein T16K5.160 - Arabidopsis
  misc_feature (1)..(444): Homolog of NCBI NO: 21536926 NR Description: unknown [Arabidopsis thaliana]
  misc_feature (1)..(444): Homolog of NCBI NO: 18408953 NR Description: expressed protein [Arabidopsis thaliana]
  misc_feature (1)..(436): Homolog of NCBI NO: 7486518 NR Description: hypothetical protein F6H11.10 - Arabidopsis
  misc_feature (1)..(444): Homolog of NCBI NO: 17064800 NR Description: Unknown protein [Arabidopsis thaliana]
  misc_feature (1)..(444): Homolog of NCBI NO: 15239204 NR Description: expressed protein [Arabidopsis thaliana]
MPMFQPSKNGGFDGHILDLHSAVKDGVLGGGDGKFLVVVTDEKKKLDLKEMISELELPEIPSVFICPISLEPMQDPVTLCTGQTYERSNILKWFNIGHCTCPTTMQELWDDLVTPNKTLHQLIYTWFSQKYVLMKKRSEDVQGRAIEILGTLRKAKGKAKVHALSELKQVVMAHAIAKKTVVDEGGVLVISSLLSPFTSHAVGSEAIAILVNLELDSDSKAGLMQPARVSLMVDMLNDGSIETKINCARLIGRLVEEKGFRAELVSSHSLLVGLMRLVKDRRRRNGVSPALTLLKSVSVHKQVRNLLVRIGAVPQLVDVLPCLDVECLESALFVLDSLCLESEGRIALKDSVNTIPHTVRLLMKVSEKCTNYAISILWSVCKLASEECSSLAVEVGLAAKLLLVIQSGCDPALKQRSAELLKLCSLHYSDSMFISKCKLTRTIQ

SEQ ID NO: 48839 - protein, 442 aa, Arabidopsis thaliana
  peptide (1)..(442): Ceres Seq. ID no. 15168817
  misc_feature (57)..(131): Pfam Name: U-box domain Pfam Description: U-box domain
  misc_feature (57)..(434): Homolog of NCBI NO: 30686609 NR Description: expressed protein [Arabidopsis thaliana]
  misc_feature (57)..(434): Homolog of NCBI NO: 25408431 NR Description: hypothetical protein At2g35930 [imported] -
  misc_feature (58)..(420): Homolog of NCBI NO: 13539578 NR Description: photoperiod responsive protein [Solanum tuberosum
  misc_feature (1)..(441): Homolog of NCBI NO: 20330772 NR Description: Unknown protein [Oryza sativa (japonica
  misc_feature (1)..(414): Homolog of NCBI NO: 11358045 NR Description: hypothetical protein T16K5.160 - Arabidopsis
  misc_feature (1)..(442): Homolog of NCBI NO: 21536926 NR Description: unknown [Arabidopsis thaliana]
  misc_feature (1)..(442): Homolog of NCBI NO: 18408953 NR Description: expressed protein [Arabidopsis thaliana]
  misc_feature (1)..(434): Homolog of NCBI NO: 7486518 NR Description: hypothetical protein F6H11.10 - Arabidopsis
  misc_feature (1)..(442): Homolog of NCBI NO: 17064800 NR Description: Unknown protein [Arabidopsis thaliana]
  misc_feature (1)..(442): Homolog of NCBI NO: 15239204 NR Description: expressed protein [Arabidopsis thaliana]
MFQPSKNGGFDGHILDLHSAVKDGVLGGGDGKFLVVVTDEKKKLDLKEMISELELPEIPSVFICPISLEPMQDPVTLCTGQTYERSNILKWFNIGHCTCPTTMQELWDDLVTPNKTLHQLIYTWFSQKYVLMKKRSEDVQGRAIEILGTLRKAKGKAKVHALSELKQVVMAHAIAKKTVVDEGGVLVISSLLSPFTSHAVGSEAIAILVNLELDSDSKAGLMQPARVSLMVDMLNDGSIETKINCARLIGRLVEEKGFRAELVSSHSLLVGLMRLVKDRRRRNGVSPALTLLKSVSVHKQVRNLLVRIGAVPQLVDVLPCLDVECLESALFVLDSLCLESEGRIALKDSVNTIPHTVRLLMKVSEKCTNYAISILWSVCKLASEECSSLAVEVGLAAKLLLVIQSGCDPALKQRSAELLKLCSLHYSDSMFISKCKLTRTIQ

SEQ ID NO: 48840 - DNA, 1917 bp, Arabidopsis thaliana
  misc_feature (1)..(1917): Ceres Seq. ID no. 12575011
  misc_feature: MA Experiment ID: 20000173 Result: Down-regulated in Transcription
  misc_feature: MA Experiment 20000173 PARAMETER Experiment Name: At_42deg_Heat_P Parameter: Age (day) Value: 14
  misc_feature: MA Experiment 20000173 PARAMETER Experiment Name: At_42deg_Heat_P Parameter: Organism Value: A. thaliana
  misc_feature: MA Experiment 20000173 PARAMETER Experiment Name: At_42deg_Heat_P Parameter: Plant Line Value: WS
  misc_feature: MA Experiment 20000173 PARAMETER Experiment Name: At_42deg_Heat_P Parameter: Temperature (deg C) Value: 42 vs. 22
  misc_feature: MA Experiment 20000173 PARAMETER Experiment Name: At_42deg_Heat_P Parameter: Timepoint (hr) Value: 6
  misc_feature: MA Experiment 20000173 PARAMETER Experiment Name: At_42deg_Heat_P Parameter: Tissue Value: Aerial
  misc_feature: MA Experiment ID: 20000179 Result: Down-regulated in Transcription
  misc_feature: MA Experiment 20000179 PARAMETER Experiment Name: At_Germinating_Seeds_P Parameter: Age (hr) Value: 6 vs. 0
  misc_feature: MA Experiment 20000179 PARAMETER Experiment Name: At_Germinating_Seeds_P Parameter: Tissue Value: Germinating Seeds
  misc_feature: MA Experiment ID: 20000180 Result: Down-regulated in Transcription
  misc_feature: MA Experiment 20000180 PARAMETER Experiment Name: At_Germinating_Seeds_P Parameter: Age (hr) Value: 24 vs. 0
  misc_feature: MA Experiment 20000180 PARAMETER Experiment Name: At_Germinating_Seeds_P Parameter: Tissue Value: Germinating Seeds
  misc_feature: MA Experiment ID: 20000184 Result: Down-regulated in Transcription
  misc_feature: MA Experiment 20000184 PARAMETER Experiment Name: At_Shoots__P Parameter: Age (day) Value: 7
  misc_feature: MA Experiment 20000184 PARAMETER Experiment Name: At_Shoots__P Parameter: Tissue Value: Shoots vs. Whole Plant
  misc_feature: MA Experiment ID: 20000234 Result: Up-regulated in Transcription
  misc_feature: MA Experiment 20000234 PARAMETER Experiment Name: At_Siliques_P Parameter: Age (day) Value: 21
  misc_feature: MA Experiment 20000234 PARAMETER Experiment Name: At_Siliques_P Parameter: Organism Value: A. thaliana
  misc_feature: MA Experiment 20000234 PARAMETER Experiment Name: At_Siliques_P Parameter: Plant Line Value: WS
  misc_feature: MA Experiment 20000234 PARAMETER Experiment Name: At_Siliques_P Parameter: Tissue Value: Less Than 5mm Siliques vs. Whole Plant
  misc_feature: MA Experiment ID: 20000265 Result: Up-regulated in Transcription
  misc_feature: MA Experiment 20000265 PARAMETER Experiment Name: At_Open_Flower_P Parameter: Age (day) Value: 21
  misc_feature: MA Experiment 20000265 PARAMETER Experiment Name: At_Open_Flower_P Parameter: Plant Line Value: WS
  misc_feature: MA Experiment 20000265 PARAMETER Experiment Name: At_Open_Flower_P Parameter: Tissue Value: Closed Flower vs. Whole Plant
  misc_feature: MA Experiment ID: 20000286 Result: Up-regulated in Transcription
  misc_feature: MA Experiment 20000286 PARAMETER Experiment Name: At_Open_Flower_P Parameter: Age (day) Value: 21
  misc_feature: MA Experiment 20000286 PARAMETER Experiment Name: At_Open_Flower_P Parameter: Plant Line Value: WS
  misc_feature: MA Experiment 20000286 PARAMETER Experiment Name: At_Open_Flower_P Parameter: Tissue Value: Half Open vs. Whole Plant
  misc_feature: MA Experiment ID: 20000437 Result: Up-regulated in Transcription
  misc_feature: MA Experiment 20000437 PARAMETER Experiment Name: At_Drought_P Parameter: Age (day) Value: 8
  misc_feature: MA Experiment 20000437 PARAMETER Experiment Name: At_Drought_P Parameter: Organism Value: A. thaliana
  misc_feature: MA Experiment 20000437 PARAMETER Experiment Name: At_Drought_P Parameter: Plant Line Value: WS
  misc_feature: MA Experiment 20000437 PARAMETER Experiment Name: At_Drought_P Parameter: Timepoint (hr) Value: 24
  misc_feature: MA Experiment 20000437 PARAMETER Experiment Name: At_Drought_P Parameter: Tissue Value: Whole Plant
  misc_feature: MA Experiment 20000437 PARAMETER Experiment Name: At_Drought_P Parameter: Treatment Value: Drought vs. No Drought
  misc_feature: MA Experiment ID: 20000794 Result: Up-regulated in Transcription
  misc_feature: MA Experiment 20000794 PARAMETER Experiment Name: At_Petals_P Parameter: Age (day) Value: 23-25 days
  misc_feature: MA Experiment 20000794 PARAMETER Experiment Name: At_Petals_P Parameter: Plant Line Value: WS
  misc_feature: MA Experiment 20000794 PARAMETER Experiment Name: At_Petals_P Parameter: Tissue Value: Petals vs. Whole plant
agaccgaaacctaaataatattgagtaagtttattcgaagaagagatgaagagacaaagagcaatcgagttagatcgagtgaagaagacaatgttgaacatagattgggacgatgctttgggcgatgaggaagttcccgagctcgagatcatcgctactgacaaaattccgccgcgtgaacctactctttccggctatgaacccgccgtctctgtgcgatccctcagggataacgaactcgacgatcatctgaagcgtcagagatcacttcttactcgtctcggtgataagttggcagacaagggcgagaaaatccgaaacagaatcggagagctcgagtacgagaagcagcgaaggatgttccaacaacggaccaaaatgcaggatgcagacaacggatgtcagattctcgagaaaccaaaaagctcagatgtgtttatgcgagcgagtacagcctcaaaagacacctctggacaagggacttcgggatcgaaagacgtgtctcggtcaacatttgctgctcattttagtgacaatctcaaaatgggacctcaaccagtgaaactagttaatgacaaactacaagatttgggacgtggaagctggataagcaaagctaatagagactcaataatagagaaaaataatgtgtggcggtcgctgccaagattaagcaagtgtaaggtcagtttaaagaacttttattctgagtctaaggatcctaaaggggatcgaagacccaatgaagcttatggtaagggaaagccaaatgaatcttccccttatttacttgtcgacgatgatgatggcgatgacgacaaagtcattggttatgaaactcccaggcattggagtttaaaagcatcgccactacagagttcaagctgcaggaagaaatcagatgataaagtgattaatttggatgaagatgaacctctgtctccaatggtagtagaggaagcatgtgaacttcctgaagggttaccagaagatatttactacccatcaagtgatcaaagtgatgggcgagaccttgttcaagtatctcttaaagatctgaaatgcctttcacctggggaatatcttacatcgccagttataaatttctacatcaggtacgtgcaacatcacgtgttttcagctgataagactgctgctaattgtcatttcttcaatacgtttttctacaagaagctcacagaagctgtttcatacaagggtaatgacagggatgcatattttgtgaagttcaggcggtggtggaagggttttgatctattctgtaaatcatatatatttataccaatacatgaagatcttcactggagcttagtcataatttgcatcccagacaaggaggacgaatcgggattgactataattcacttggattcattgggacttcacccaagaaatttgattttcaataatgtcaaaagatttctgagagaggaatggaactatctaaatcaagatgctccattggatttaccaatttcagcaaaagtatggagagaccttcccaatatgatcaacgaagctgaagtgcaggttccacaacagaagaacgatttcgactgtggtctgtttctgctcttcttcataagacgtttcatcgaagaggctcctcaaaggctgacattgcaggatttgaaaatgattcacaagaagtggtttaaaccggaagaagcttccgctttgaggatcaaaatctggaacatactcgttgatctattccgcaagggtaaccaaacagattaaagctgtatagaacagtgtcaagtttggtcactctaattaaggaatgaaatgaaagatacgtttttgttaacaatcattttgttcaagtcctgtaataaactaaggagcatgacataatcagaacaaatcaacaaggtaataataacgtatccgaat

SEQ ID NO: 48841 - protein, 571 aa, Arabidopsis thaliana
  peptide (1)..(571): Ceres Seq. ID no. 12575012
  misc_feature (331)..(551): Pfam Name: Ulp1 protease family, C-terminal catalytic domain Pfam Description: Ulp1 protease family, C-terminal catalytic
  misc_feature (456)..(563): Homolog of NCBI NO: 15218250 NR Description: unknown protein; protein id: At1g09730.1
  misc_feature (283)..(569): Homolog of NCBI NO: 24641610 NR Description: CG12717-PA [Drosophila melanogaster]
  misc_feature (249)..(568): Homolog of NCBI NO: 30689748 NR Description: Ulp1 protease family [Arabidopsis thaliana]
  misc_feature (2)..(313): Homolog of NCBI NO: 7486914 NR Description: hypothetical protein T13D8.11 - Arabidopsis
  misc_feature (337)..(571): Homolog of NCBI NO: 34909336 NR Description: OSJNBb0021A09.14 [Oryza sativa (japonica
  misc_feature (133)..(571): Homolog of NCBI NO: 7486914 NR Description: hypothetical protein T13D8.11 - Arabidopsis
  misc_feature (2)..(107): Homolog of NCBI NO: 15219025 NR Description: hypothetical protein; protein id: At1g60220.1
  misc_feature (96)..(571): Homolog of NCBI NO: 15219025 NR Description: hypothetical protein; protein id: At1g60220.1
  misc_feature (1)..(571): Homolog of NCBI NO: 5091551 NR Description: T10O24.20 [Arabidopsis thaliana]
  misc_feature (1)..(571): Homolog of NCBI NO: 22329476 NR Description: putative protein-tyrosine phosphatase 2
MKRQRAIELDRVKKTMLNIDWDDALGDEEVPELEIIATDKIPPREPTLSGYEPAVSVRSLRDNELDDHLKRQRSLLTRLGDKLADKGEKIRNRIGELEYEKQRRMFQQRTKMQDADNGCQILEKPKSSDVFMRASTASKDTSGQGTSGSKDVSRSTFAAHFSDNLKMGPQPVKLVNDKLQDLGRGSWISKANRDSIIEKNNVWRSLPRLSKCKVSLKNFYSESKDPKGDRRPNEAYGKGKPNESSPYLLVDDDDGDDDKVIGYETPRHWSLKASPLQSSSCRKKSDDKVINLDEDEPLSPMVVEEACELPEGLPEDIYYPSSDQSDGRDLVQVSLKDLKCLSPGEYLTSPVINFYIRYVQHHVFSADKTAANCHFFNTFFYKKLTEAVSYKGNDRDAYFVKFRRWWKGFDLFCKSYIFIPIHEDLHWSLVIICIPDKEDESGLTIIHLDSLGLHPRNLIFNNVKRFLREEWNYLNQDAPLDLPISAKVWRDLPNMINEAEVQVPQQKNDFDCGLFLLFFIRRFIEEAPQRLTLQDLKMIHKKWFKPEEASALRIKIWNILVDLFRKGNQTD

SEQ ID NO: 48842 - protein, 556 aa, Arabidopsis thaliana
  peptide (1)..(556): Ceres Seq. ID no. 12575013
  misc_feature (316)..(536): Pfam Name: Ulp1 protease family, C-terminal catalytic domain Pfam Description: Ulp1 protease family, C-terminal catalytic
  misc_feature (441)..(548): Homolog of NCBI NO: 15218250 NR Description: unknown protein; protein id: At1g09730.1
  misc_feature (268)..(554): Homolog of NCBI NO: 24641610 NR Description: CG12717-PA [Drosophila melanogaster]
  misc_feature (234)..(553): Homolog of NCBI NO: 30689748 NR Description: Ulp1 protease family [Arabidopsis thaliana]
  misc_feature (1)..(298): Homolog of NCBI NO: 7486914 NR Description: hypothetical protein T13D8.11 - Arabidopsis
  misc_feature (322)..(556): Homolog of NCBI NO: 34909336 NR Description: OSJNBb0021A09.14 [Oryza sativa (japonica
  misc_feature (118)..(556): Homolog of NCBI NO: 7486914 NR Description: hypothetical protein T13D8.11 - Arabidopsis
  misc_feature (1)..(92): Homolog of NCBI NO: 15219025 NR Description: hypothetical protein; protein id: At1g60220.1
  misc_feature (81)..(556): Homolog of NCBI NO: 15219025 NR Description: hypothetical protein; protein id: At1g60220.1
  misc_feature (1)..(556): Homolog of NCBI NO: 5091551 NR Description: T10O24.20 [Arabidopsis thaliana]
  misc_feature (1)..(556): Homolog of NCBI NO: 22329476 NR Description: putative protein-tyrosine phosphatase 2
MLNIDWDDALGDEEVPELEIIATDKIPPREPTLSGYEPAVSVRSLRDNELDDHLKRQRSLLTRLGDKLADKGEKIRNRIGELEYEKQRRMFQQRTKMQDADNGCQILEKPKSSDVFMRASTASKDTSGQGTSGSKDVSRSTFAAHFSDNLKMGPQPVKLVNDKLQDLGRGSWISKANRDSIIEKNNVWRSLPRLSKCKVSLKNFYSESKDPKGDRRPNEAYGKGKPNESSPYLLVDDDDGDDDKVIGYETPRHWSLKASPLQSSSCRKKSDDKVINLDEDEPLSPMVVEEACELPEGLPEDIYYPSSDQSDGRDLVQVSLKDLKCLSPGEYLTSPVINFYIRYVQHHVFSADKTAANCHFFNTFFYKKLTEAVSYKGNDRDAYFVKFRRWWKGFDLFCKSYIFIPIHEDLHWSLVIICIPDKEDESGLTIIHLDSLGLHPRNLIFNNVKRFLREEWNYLNQDAPLDLPISAKVWRDLPNMINEAEVQVPQQKNDFDCGLFLLFFIRRFIEEAPQRLTLQDLKMIHKKWFKPEEASALRIKIWNILVDLFRKGNQTD

SEQ ID NO: 48843 - protein, 467 aa, Arabidopsis thaliana
  peptide (1)..(467): Ceres Seq. ID no. 12575014
  misc_feature (227)..(447): Pfam Name: Ulp1 protease family, C-terminal catalytic domain Pfam Description: Ulp1 protease family, C-terminal catalytic
  misc_feature (211)..(318): Homolog of NCBI NO: 15218250 NR Description: unknown protein; protein id: At1g09730.1
  misc_feature (352)..(459): Homolog of NCBI NO: 15218250 NR Description: unknown protein; protein id: At1g09730.1
  misc_feature (179)..(465): Homolog of NCBI NO: 24641610 NR Description: CG12717-PA [Drosophila melanogaster]
  misc_feature (145)..(464): Homolog of NCBI NO: 30689748 NR Description: Ulp1 protease family [Arabidopsis thaliana]
  misc_feature (1)..(209): Homolog of NCBI NO: 7486914 NR Description: hypothetical protein T13D8.11 - Arabidopsis
  misc_feature (233)..(467): Homolog of NCBI NO: 34909336 NR Description: OSJNBb0021A09.14 [Oryza sativa (japonica
  misc_feature (29)..(467): Homolog of NCBI NO: 7486914 NR Description: hypothetical protein T13D8.11 - Arabidopsis
  misc_feature (1)..(467): Homolog of NCBI NO: 15219025 NR Description: hypothetical protein; protein id: At1g60220.1
  misc_feature (1)..(467): Homolog of NCBI NO: 5091551 NR Description: T10O24.20 [Arabidopsis thaliana]
  misc_feature (1)..(467): Homolog of NCBI NO: 22329476 NR Description: putative protein-tyrosine phosphatase 2
MFQQRTKMQDADNGCQILEKPKSSDVFMRASTASKDTSGQGTSGSKDVSRSTFAAHFSDNLKMGPQPVKLVNDKLQDLGRGSWISKANRDSIIEKNNVWRSLPRLSKCKVSLKNFYSESKDPKGDRRPNEAYGKGKPNESSPYLLVDDDDGDDDKVIGYETPRHWSLKASPLQSSSCRKKSDDKVINLDEDEPLSPMVVEEACELPEGLPEDIYYPSSDQSDGRDLVQVSLKDLKCLSPGEYLTSPVINFYIRYVQHHVFSADKTAANCHFFNTFFYKKLTEAVSYKGNDRDAYFVKFRRWWKGFDLFCKSYIFIPIHEDLHWSLVIICIPDKEDESGLTIIHLDSLGLHPRNLIFNNVKRFLREEWNYLNQDAPLDLPISAKVWRDLPNMINEAEVQVPQQKNDFDCGLFLLFFIRRFIEEAPQRLTLQDLKMIHKKWFKPEEASALRIKIWNILVDLFRKGNQTD

SEQ ID NO: 48844 - DNA, 1125 bp, Arabidopsis thaliana
  misc_feature (1)..(1125): Ceres Seq. ID no. 14310326
  misc_feature: MA Experiment ID: 20000307 Result: Up-regulated in Transcription
  misc_feature: MA Experiment 20000307 PARAMETER Experiment Name: At_Germinating_Seeds_Sub_P Parameter: Age (hr) Value: 24 vs. 0
  misc_feature: MA Experiment 20000307 PARAMETER Experiment Name: At_Germinating_Seeds_Sub_P Parameter: Organism Value: A. thaliana
  misc_feature: MA Experiment 20000307 PARAMETER Experiment Name: At_Germinating_Seeds_Sub_P Parameter: Plant Line Value: WS
  misc_feature: MA Experiment 20000307 PARAMETER Experiment Name: At_Germinating_Seeds_Sub_P Parameter: Tissue Value: Germinating Seeds
  misc_feature: MA Experiment ID: 20000315 Result: Up-regulated in Transcription
  misc_feature: MA Experiment 20000315 PARAMETER Experiment Name: At_14day_Shoots-Roots_Sub_P Parameter: Age (day) Value: 14
  misc_feature: MA Experiment 20000315 PARAMETER Experiment Name: At_14day_Shoots-Roots_Sub_P Parameter: Organism Value: A. thaliana
  misc_feature: MA Experiment 20000315 PARAMETER Experiment Name: At_14day_Shoots-Roots_Sub_P Parameter: Plant Line Value: WS
  misc_feature: MA Experiment 20000315 PARAMETER Experiment Name: At_14day_Shoots-Roots_Sub_P Parameter: Tissue Value: Shoots vs. Whole Plant
  misc_feature: MA Experiment ID: 20000328 Result: Up-regulated in Transcription
  misc_feature: MA Experiment 20000328 PARAMETER Experiment Name: At_42deg_Heat_Sub_P Parameter: Age (day) Value: 14
  misc_feature: MA Experiment 20000328 PARAMETER Experiment Name: At_42deg_Heat_Sub_P Parameter: Organism Value: A. thaliana
  misc_feature: MA Experiment 20000328 PARAMETER Experiment Name: At_42deg_Heat_Sub_P Parameter: Plant Line Value: WS
  misc_feature: MA Experiment 20000328 PARAMETER Experiment Name: At_42deg_Heat_Sub_P Parameter: Temperature (deg C) Value: 42 vs. 22
  misc_feature: MA Experiment 20000328 PARAMETER Experiment Name: At_42deg_Heat_Sub_P Parameter: Timepoint (hr) Value: 6
  misc_feature: MA Experiment 20000328 PARAMETER Experiment Name: At_42deg_Heat_Sub_P Parameter: Tissue Value: Aerial
  misc_feature: MA Experiment ID: 20000329 Result: Up-regulated in Transcription
  misc_feature: MA Experiment 20000329 PARAMETER Experiment Name: At_4deg_Cold_Sub_P Parameter: Age (day) Value: 14
  misc_feature: MA Experiment 20000329 PARAMETER Experiment Name: At_4deg_Cold_Sub_P Parameter: Organism Value: A. thaliana
  misc_feature: MA Experiment 20000329 PARAMETER Experiment Name: At_4deg_Cold_Sub_P Parameter: Plant Line Value: WS
  misc_feature: MA Experiment 20000329 PARAMETER Experiment Name: At_4deg_Cold_Sub_P Parameter: Temperature (deg C) Value: 4 vs. 22
  misc_feature: MA Experiment 20000329 PARAMETER Experiment Name: At_4deg_Cold_Sub_P Parameter: Timepoint (hr) Value: 6
  misc_feature: MA Experiment 20000329 PARAMETER Experiment Name: At_4deg_Cold_Sub_P Parameter: Tissue Value: Aerial
  misc_feature: MA Experiment ID: 20000332 Result: Up-regulated in Transcription
  misc_feature: MA Experiment 20000332 PARAMETER Experiment Name: At_4deg_Cold_Sub_P Parameter: Age (day) Value: 14
  misc_feature: MA Experiment 20000332 PARAMETER Experiment Name: At_4deg_Cold_Sub_P Parameter: Organism Value: A. thaliana
  misc_feature: MA Experiment 20000332 PARAMETER Experiment Name: At_4deg_Cold_Sub_P Parameter: Plant Line Value: WS
  misc_feature: MA Experiment 20000332 PARAMETER Experiment Name: At_4deg_Cold_Sub_P Parameter: Temperature (deg C) Value: 4 vs. 22
  misc_feature: MA Experiment 20000332 PARAMETER Experiment Name: At_4deg_Cold_Sub_P Parameter: Timepoint (hr) Value: 2
  misc_feature: MA Experiment 20000332 PARAMETER Experiment Name: At_4deg_Cold_Sub_P Parameter: Tissue Value: Aerial
  misc_feature: MA Experiment ID: 20000355 Result: Up-regulated in Transcription
  misc_feature: MA Experiment 20000355 PARAMETER Experiment Name: At_Siliques_Sub_P Parameter: Age (day) Value: 21
  misc_feature: MA Experiment 20000355 PARAMETER Experiment Name: At_Siliques_Sub_P Parameter: Organism Value: A. thaliana
  misc_feature: MA Experiment 20000355 PARAMETER Experiment Name: At_Siliques_Sub_P Parameter: Plant Line Value: WS
  misc_feature: MA Experiment 20000355 PARAMETER Experiment Name: At_Siliques_Sub_P Parameter: Tissue Value: Less Than 5mm Siliques vs. Whole Plant
  misc_feature: MA Experiment ID: 20000440 Result: Up-regulated in Transcription
  misc_feature: MA Experiment 20000440 PARAMETER Experiment Name: At_Closed-Flower__Sub_P Parameter: Tissue Value: Closed Flower vs. Whole Plant
  misc_feature: MA Experiment ID: 20001807 Result: Up-regulated in Transcription
  misc_feature: MA Experiment 20001807 PARAMETER Experiment Name: At_50mM_NH4NO3_L-to-H_Sub_P Parameter: Timepoint (hr) Value: 6
  misc_feature: MA Experiment 20001807 PARAMETER Experiment Name: At_50mM_NH4NO3_L-to-H_Sub_P Parameter: Tissue Value: Leaf
  misc_feature: MA Experiment 20001807 PARAMETER Experiment Name: At_50mM_NH4NO3_L-to-H_Sub_P Parameter: Treatment Value: 50mM NH4NO3 vs 100mM Mannitol
aaaaatcctcttaaaatctcataaagcccttcttatcttcttctcttctcctcaacttgaatacacagaaacaaaactgcttttgtctctcaagtcatttgtcttataaaaaggttctgttcttgaacaagggaaagaaacaaaaggctgataactcctgttttgtagattcctctgatattcagattcttacttctcaggaaaaccctaaagaaaatttctgtttttttttgagaaatatgaagatacaatgtgatgtgtgtgagaaagctccggccacgcttatatgttgtgctgatgaagctgctctctgcgctaaatgtgacgttgaggttcatgctgctaataaactcgctagcaaacaccaacgcctttttcttgactctctctcaactaaattccctccctgcgacatctgccttgagaaggcagctttcatattctgtgtaaaggatagggctctgctctgcagagattgcgatgaggcgacccatgcgccaaatactcgctctgctaatcaccagaggttcttagccactggaatccgagttgctcttagttccactagttgcaatcaagaagtggaaaagaatcactttgacccatctaatcagcagagtctctctaaaccgccaactcagcaacccgctgctccatctcctttgtgggctaccgatgaattcttcagctactctgatcttgactgcagtaataaggagaaagagcaactcgatctcggggagctggattggcttgcagagatgggtctgtttggtgaccagcctgatcaagaggctctaccggtagccgaagttcccgagctttccttttcacatttggctcatgctcattcctacaacagacctatgaagtccaatgtacccaacaagaagcagaggcttgagtaccggtatgatgatgaagaagagcacttcctagtccccgacctaggctaaactatggatgaatctactaagctttataatatatagcacttgattcgcatagtcttcggctcttcgccttgctttctccatgatctgatatgtgtatcactgtaagtagcaggctaaaacttggaaaaaccttatcattttattagcaagtgatgccttaaattgcaac

SEQ ID NO: 48845 - protein, 238 aa, Arabidopsis thaliana
  peptide (1)..(238): Ceres Seq. ID no. 14310327
  misc_feature (52)..(99): Pfam Name: B-box zinc finger Pfam Description: B-box zinc finger
  misc_feature (1)..(142): Homolog of NCBI NO: 15222289 NR Description: CONSTANS B-box zinc finger family protein
  misc_feature (1)..(152): Homolog of NCBI NO: 34903708 NR Description: putative zinc-finger protein
  misc_feature (1)..(141): Homolog of NCBI NO: 18412037 NR Description: CONSTANS B-box zinc finger family protein
  misc_feature (1)..(141): Homolog of NCBI NO: 17433085 NR Description: Zinc finger protein constans-like 7
  misc_feature (1)..(141): Homolog of NCBI NO: 3618310 NR Description: zinc finger protein [Oryza sativa (japonica
  misc_feature (1)..(162): Homolog of NCBI NO: 3618314 NR Description: zinc finger protein [Oryza sativa (japonica
  misc_feature (1)..(166): Homolog of NCBI NO: 30679541 NR Description: salt-tolerance protein [Arabidopsis thaliana]
  misc_feature (1)..(238): Homolog of NCBI NO: 15221367 NR Description: salt-tolerance protein [Arabidopsis thaliana]
  misc_feature (1)..(238): Homolog of NCBI NO: 25408150 NR Description: hypothetical protein At2g31380 [imported] -
  misc_feature (1)..(238): Homolog of NCBI NO: 18402646 NR Description: salt tolerance-like protein [Arabidopsis
MKIQCDVCEKAPATLICCADEAALCAKCDVEVHAANKLASKHQRLFLDSLSTKFPPCDICLEKAAFIFCVKDRALLCRDCDEATHAPNTRSANHQRFLATGIRVALSSTSCNQEVEKNHFDPSNQQSLSKPPTQQPAAPSPLWATDEFFSYSDLDCSNKEKEQLDLGELDWLAEMGLFGDQPDQEALPVAEVPELSFSHLAHAHSYNRPMKSNVPNKKQRLEYRYDDEEEHFLVPDLG

SEQ ID NO: 48846 - DNA, 1196 bp, Arabidopsis thaliana
  misc_feature (1)..(1196): Ceres Seq. ID no. 15175620
  misc_feature: MA Experiment ID: 20000173 Result: Down-regulated in Transcription
  misc_feature: MA Experiment 20000173 PARAMETER Experiment Name: At_42deg_Heat_P Parameter: Age (day) Value: 14
  misc_feature: MA Experiment 20000173 PARAMETER Experiment Name: At_42deg_Heat_P Parameter: Organism Value: A. thaliana
  misc_feature: MA Experiment 20000173 PARAMETER Experiment Name: At_42deg_Heat_P Parameter: Plant Line Value: WS
  misc_feature: MA Experiment 20000173 PARAMETER Experiment Name: At_42deg_Heat_P Parameter: Temperature (deg C) Value: 42 vs. 22
  misc_feature: MA Experiment 20000173 PARAMETER Experiment Name: At_42deg_Heat_P Parameter: Timepoint (hr) Value: 6
  misc_feature: MA Experiment 20000173 PARAMETER Experiment Name: At_42deg_Heat_P Parameter: Tissue Value: Aerial
  misc_feature: MA Experiment ID: 20000185 Result: Up-regulated in Transcription
  misc_feature: MA Experiment 20000185 PARAMETER Experiment Name: At_Roots__P Parameter: Age (day) Value: 7 vs. 21
  misc_feature: MA Experiment 20000185 PARAMETER Experiment Name: At_Roots__P Parameter: Organism Value: A. thaliana
  misc_feature: MA Experiment 20000185 PARAMETER Experiment Name: At_Roots__P Parameter: Tissue Value: Roots vs. Whole Plant
  misc_feature: MA Experiment ID: 20000234 Result: Up-regulated in Transcription
  misc_feature: MA Experiment 20000234 PARAMETER Experiment Name: At_Siliques_P Parameter: Age (day) Value: 21
  misc_feature: MA Experiment 20000234 PARAMETER Experiment Name: At_Siliques_P Parameter: Organism Value: A. thaliana
  misc_feature: MA Experiment 20000234 PARAMETER Experiment Name: At_Siliques_P Parameter: Plant Line Value: WS
  misc_feature: MA Experiment 20000234 PARAMETER Experiment Name: At_Siliques_P Parameter: Tissue Value: Less Than 5mm Siliques vs. Whole Plant
  misc_feature: MA Experiment ID: 20000235 Result: Up-regulated in Transcription
  misc_feature: MA Experiment 20000235 PARAMETER Experiment Name: At_Siliques_P Parameter: Age (day) Value: 21
  misc_feature: MA Experiment 20000235 PARAMETER Experiment Name: At_Siliques_P Parameter: Organism Value: A. thaliana
  misc_feature: MA Experiment 20000235 PARAMETER Experiment Name: At_Siliques_P Parameter: Plant Line Value: WS
  misc_feature: MA Experiment 20000235 PARAMETER Experiment Name: At_Siliques_P Parameter: Tissue Value: 5-10mm Siliques vs. Whole Plant
  misc_feature: MA Experiment ID: 20000264 Result: Up-regulated in Transcription
  misc_feature: MA Experiment 20000264 PARAMETER Experiment Name: At_Open_Flower_P Parameter: Age (day) Value: 21
  misc_feature: MA Experiment 20000264 PARAMETER Experiment Name: At_Open_Flower_P Parameter: Plant Line Value: WS
  misc_feature: MA Experiment 20000264 PARAMETER Experiment Name: At_Open_Flower_P Parameter: Tissue Value: Open Flower vs. Whole Plant
  misc_feature: MA Experiment ID: 20000265 Result: Up-regulated in Transcription
  misc_feature: MA Experiment 20000265 PARAMETER Experiment Name: At_Open_Flower_P Parameter: Age (day) Value: 21
  misc_feature: MA Experiment 20000265 PARAMETER Experiment Name: At_Open_Flower_P Parameter: Plant Line Value: WS
  misc_feature: MA Experiment 20000265 PARAMETER Experiment Name: At_Open_Flower_P Parameter: Tissue Value: Closed Flower vs. Whole Plant
  misc_feature: MA Experiment ID: 20000286 Result: Up-regulated in Transcription
  misc_feature: MA Experiment 20000286 PARAMETER Experiment Name: At_Open_Flower_P Parameter: Age (day) Value: 21
  misc_feature: MA Experiment 20000286 PARAMETER Experiment Name: At_Open_Flower_P Parameter: Plant Line Value: WS
  misc_feature: MA Experiment 20000286 PARAMETER Experiment Name: At_Open_Flower_P Parameter: Tissue Value: Half Open vs. Whole Plant
  misc_feature: MA Experiment ID: 20000437 Result: Down-regulated in Transcription
  misc_feature: MA Experiment 20000437 PARAMETER Experiment Name: At_Drought_P Parameter: Age (day) Value: 8
  misc_feature: MA Experiment 20000437 PARAMETER Experiment Name: At_Drought_P Parameter: Organism Value: A. thaliana
  misc_feature: MA Experiment 20000437 PARAMETER Experiment Name: At_Drought_P Parameter: Plant Line Value: WS
  misc_feature: MA Experiment 20000437 PARAMETER Experiment Name: At_Drought_P Parameter: Timepoint (hr) Value: 24
  misc_feature: MA Experiment 20000437 PARAMETER Experiment Name: At_Drought_P Parameter: Tissue Value: Whole Plant
  misc_feature: MA Experiment 20000437 PARAMETER Experiment Name: At_Drought_P Parameter: Treatment Value: Drought vs. No Drought
  misc_feature: MA Experiment ID: 20000439 Result: Up-regulated in Transcription
  misc_feature: MA Experiment 20000439 PARAMETER Experiment Name: At_Roots__P Parameter: Age (day) Value: 14 vs. 21
  misc_feature: MA Experiment 20000439 PARAMETER Experiment Name: At_Roots__P Parameter: Organism Value: A. thaliana
  misc_feature: MA Experiment 20000439 PARAMETER Experiment Name: At_Roots__P Parameter: Tissue Value: Roots vs. Whole Plant
  misc_feature: MA Experiment ID: 20000495 Result: Up-regulated in Transcription
  misc_feature: MA Experiment 20000495 PARAMETER Experiment Name: At_Guard_Cells_P Parameter: Harvest Date Value: 8/2/2002
  misc_feature: MA Experiment 20000495 PARAMETER Experiment Name: At_Guard_Cells_P Parameter: Organism Value: A. thaliana
  misc_feature: MA Experiment 20000495 PARAMETER Experiment Name: At_Guard_Cells_P Parameter: Tissue Value: Guard Cells vs. Leaves
  misc_feature: MA Experiment ID: 20001557 Result: Up-regulated in Transcription
  misc_feature: MA Experiment 20001557 PARAMETER Experiment Name: At_Drought_Soil_Dry_P Parameter: Age (day) Value: 27
  misc_feature: MA Experiment 20001557 PARAMETER Experiment Name: At_Drought_Soil_Dry_P Parameter: Organism Value: A. thaliana
  misc_feature: MA Experiment 20001557 PARAMETER Experiment Name: At_Drought_Soil_Dry_P Parameter: Plant Line Value: WS
  misc_feature: MA Experiment 20001557 PARAMETER Experiment Name: At_Drought_Soil_Dry_P Parameter: Post Timepoint (hr) Value: 3
  misc_feature: MA Experiment 20001557 PARAMETER Experiment Name: At_Drought_Soil_Dry_P Parameter: Post-Treatment Value: Re-Water vs. No Drought
  misc_feature: MA Experiment 20001557 PARAMETER Experiment Name: At_Drought_Soil_Dry_P Parameter: Timepoint (day) Value: 13
  misc_feature: MA Experiment 20001557 PARAMETER Experiment Name: At_Drought_Soil_Dry_P Parameter: Treatment Value: Drought vs. No Drought
  misc_feature: MA Experiment ID: 20001558 Result: Up-regulated in Transcription
  misc_feature: MA Experiment 20001558 PARAMETER Experiment Name: At_Drought_Soil_Dry_P Parameter: Age (day) Value: 27
  misc_feature: MA Experiment 20001558 PARAMETER Experiment Name: At_Drought_Soil_Dry_P Parameter: Organism Value: A. thaliana
  misc_feature: MA Experiment 20001558 PARAMETER Experiment Name: At_Drought_Soil_Dry_P Parameter: Plant Line Value: WS
  misc_feature: MA Experiment 20001558 PARAMETER Experiment Name: At_Drought_Soil_Dry_P Parameter: Post Timepoint (hr) Value: 6
  misc_feature: MA Experiment 20001558 PARAMETER Experiment Name: At_Drought_Soil_Dry_P Parameter: Post-Treatment Value: Re-Water vs. No Drought
  misc_feature: MA Experiment 20001558 PARAMETER Experiment Name: At_Drought_Soil_Dry_P Parameter: Timepoint (day) Value: 13
  misc_feature: MA Experiment 20001558 PARAMETER Experiment Name: At_Drought_Soil_Dry_P Parameter: Treatment Value: Drought vs. No Drought
  misc_feature: MA Experiment ID: 20001560 Result: Up-regulated in Transcription
  misc_feature: MA Experiment 20001560 PARAMETER Experiment Name: At_Drought_Soil_Dry_P Parameter: Age (day) Value: 28
  misc_feature: MA Experiment 20001560 PARAMETER Experiment Name: At_Drought_Soil_Dry_P Parameter: Organism Value: A. thaliana
  misc_feature: MA Experiment 20001560 PARAMETER Experiment Name: At_Drought_Soil_Dry_P Parameter: Plant Line Value: WS
  misc_feature: MA Experiment 20001560 PARAMETER Experiment Name: At_Drought_Soil_Dry_P Parameter: Post Timepoint (hr) Value: None
  misc_feature: MA Experiment 20001560 PARAMETER Experiment Name: At_Drought_Soil_Dry_P Parameter: Post-Treatment Value: None
  misc_feature: MA Experiment 20001560 PARAMETER Experiment Name: At_Drought_Soil_Dry_P Parameter: Timepoint (day) Value: 14
  misc_feature: MA Experiment 20001560 PARAMETER Experiment Name: At_Drought_Soil_Dry_P Parameter: Treatment Value: Drought vs. No Drought
gtttacacactcttgaaatggaggaagaagctgaaacaacagtctacaacgggagagaagaaacgcagtcctggtagaacaagcgcaggaagtagagttcgtagcagcacaagcagatcaagcacagaaaacggagaaccaaagctagtgatgttcaataacaagatcactctagctgaaacaattgaagcaacacgacagttcgatgaagaaaacgttcttagcagaacccgatatggattgctatttaaagccaattacaatgacggaatggttctctctatccgccgcttacccaatggatcactcttaaatgagaacttgttcaaaaaggaagccgaagttcttggtaaagtcaagcaccgaaacatcacagtccttagaggttactacgcaggtccaccagatttaaggcttttggtatatgactacatgcccaatgggaacttatctaccctgctccaagaagcttcccaccaagatggccatgtcctaaactggccaatgcgccacctcatagctctcgggatcgcgcgcggactcggattcctccatcaatccaacatggttcatggtgatatcaagccacagaatgtactcttcgacgctgactttgaagcccatatatctgatttcgggcttgaccgtctcacaattcgatccccatcaagatcagccgtcacagcaaacaccattgggacactaggatatgtctctccagaagccacattgtccggggaaatcacaagagaatctgacatctacagcttcggcattgtcctactcgaaatcctaactggaaaaagaccagtaatgttcacacaagacgaggatatagtgaaatgggtaaagaaacagcttcagagaggtcaagttacagagctactagaaccaggactactcgaacttgacccggaatcatcagaatgggaagagttcttattaggaatcaaagtcggacttctttgtactgcaacagatcctctagaccgtccaacaatgtccgatgttgttttcatgcttgaaggctgtcgtgttggtcctgacgttccttcctccgccgacccaacctctcagccttcaccggcctaaccgtttttcttatttttagtcttcctgatttaaattgttagtcaaaaacaaaaaacaaaaaacaagaagcaattattaaaaatttcagcagtatttattggtct

SEQ ID NO: 48847 - protein, 363 aa, Arabidopsis thaliana
  peptide (1)..(363): Ceres Seq. ID no. 15175621
  misc_feature (55)..(363): Homolog of NCBI NO: 15225805 NR Description: leucine-rich repeat transmembrane protein kinase,
  misc_feature (45)..(361): Homolog of NCBI NO: 21743075 NR Description: OSJNBb0002J11.4 [Oryza sativa (japonica
  misc_feature (55)..(358): Homolog of NCBI NO: 15222751 NR Description: receptor kinase -related [Arabidopsis thaliana]
  misc_feature (55)..(358): Homolog of NCBI NO: 13620169 NR Description: hypothetical protein [Capsella rubella]
  misc_feature (19)..(342): Homolog of NCBI NO: 37536398 NR Description: putative receptor-like protein kinase
  misc_feature (1)..(363): Homolog of NCBI NO: 38345533 NR Description: OSJNBa0020J04.8 [Oryza sativa (japonica
  misc_feature (1)..(363): Homolog of NCBI NO: 15222322 NR Description: leucine rich repeat protein family [Arabidopsis
  misc_feature (1)..(363): Homolog of NCBI NO: 30690596 NR Description: leucine rich repeat protein family [Arabidopsis
  misc_feature (1)..(363): Homolog of NCBI NO: 19347728 NR Description: putative receptor protein kinase [Arabidopsis
  misc_feature (1)..(363): Homolog of NCBI NO: 7434426 NR Description: hypothetical protein F23E13.70 - Arabidopsis
VYTLLKWRKKLKQQSTTGEKKRSPGRTSAGSRVRSSTSRSSTENGEPKLVMFNNKITLAETIEATRQFDEENVLSRTRYGLLFKANYNDGMVLSIRRLPNGSLLNENLFKKEAEVLGKVKHRNITVLRGYYAGPPDLRLLVYDYMPNGNLSTLLQEASHQDGHVLNWPMRHLIALGIARGLGFLHQSNMVHGDIKPQNVLFDADFEAHISDFGLDRLTIRSPSRSAVTANTIGTLGYVSPEATLSGEITRESDIYSFGIVLLEILTGKRPVMFTQDEDIVKWVKKQLQRGQVTELLEPGLLELDPESSEWEEFLLGIKVGLLCTATDPLDRPTMSDVVFMLEGCRVGPDVPSSADPTSQPSPA

SEQ ID NO: 48848 - protein, 313 aa, Arabidopsis thaliana
  peptide (1)..(313): Ceres Seq. ID no. 15175622
  misc_feature (5)..(313): Homolog of NCBI NO: 15225805 NR Description: leucine-rich repeat transmembrane protein kinase,
  misc_feature (1)..(311): Homolog of NCBI NO: 21743075 NR Description: OSJNBb0002J11.4 [Oryza sativa (japonica
  misc_feature (5)..(308): Homolog of NCBI NO: 15222751 NR Description: receptor kinase -related [Arabidopsis thaliana]
  misc_feature (5)..(308): Homolog of NCBI NO: 13620169 NR Description: hypothetical protein [Capsella rubella]
  misc_feature (1)..(292): Homolog of NCBI NO: 37536398 NR Description: putative receptor-like protein kinase
  misc_feature (1)..(313): Homolog of NCBI NO: 38345533 NR Description: OSJNBa0020J04.8 [Oryza sativa (japonica
  misc_feature (1)..(313): Homolog of NCBI NO: 15222322 NR Description: leucine rich repeat protein family [Arabidopsis
  misc_feature (1)..(313): Homolog of NCBI NO: 30690596 NR Description: leucine rich repeat protein family [Arabidopsis
  misc_feature (1)..(313): Homolog of NCBI NO: 19347728 NR Description: putative receptor protein kinase [Arabidopsis
  misc_feature (1)..(313): Homolog of NCBI NO: 7434426 NR Description: hypothetical protein F23E13.70 - Arabidopsis
MFNNKITLAETIEATRQFDEENVLSRTRYGLLFKANYNDGMVLSIRRLPNGSLLNENLFKKEAEVLGKVKHRNITVLRGYYAGPPDLRLLVYDYMPNGNLSTLLQEASHQDGHVLNWPMRHLIALGIARGLGFLHQSNMVHGDIKPQNVLFDADFEAHISDFGLDRLTIRSPSRSAVTANTIGTLGYVSPEATLSGEITRESDIYSFGIVLLEILTGKRPVMFTQDEDIVKWVKKQLQRGQVTELLEPGLLELDPESSEWEEFLLGIKVGLLCTATDPLDRPTMSDVVFMLEGCRVGPDVPSSADPTSQPSPA

SEQ ID NO: 48849 - protein, 273 aa, Arabidopsis thaliana
  peptide (1)..(273): Ceres Seq. ID no. 15175623
  misc_feature (1)..(273): Homolog of NCBI NO: 15225805 NR Description: leucine-rich repeat transmembrane protein kinase,
  misc_feature (1)..(271): Homolog of NCBI NO: 21743075 NR Description: OSJNBb0002J11.4 [Oryza sativa (japonica
  misc_feature (1)..(268): Homolog of NCBI NO: 15222751 NR Description: receptor kinase -related [Arabidopsis thaliana]
  misc_feature (1)..(268): Homolog of NCBI NO: 13620169 NR Description: hypothetical protein [Capsella rubella]
  misc_feature (1)..(252): Homolog of NCBI NO: 37536398 NR Description: putative receptor-like protein kinase
  misc_feature (1)..(273): Homolog of NCBI NO: 38345533 NR Description: OSJNBa0020J04.8 [Oryza sativa (japonica
  misc_feature (1)..(273): Homolog of NCBI NO: 15222322 NR Description: leucine rich repeat protein family [Arabidopsis
  misc_feature (1)..(273): Homolog of NCBI NO: 30690596 NR Description: leucine rich repeat protein family [Arabidopsis
  misc_feature (1)..(273): Homolog of NCBI NO: 19347728 NR Description: putative receptor protein kinase [Arabidopsis
  misc_feature (1)..(273): Homolog of NCBI NO: 7434426 NR Description: hypothetical protein F23E13.70 - Arabidopsis
MVLSIRRLPNGSLLNENLFKKEAEVLGKVKHRNITVLRGYYAGPPDLRLLVYDYMPNGNLSTLLQEASHQDGHVLNWPMRHLIALGIARGLGFLHQSNMVHGDIKPQNVLFDADFEAHISDFGLDRLTIRSPSRSAVTANTIGTLGYVSPEATLSGEITRESDIYSFGIVLLEILTGKRPVMFTQDEDIVKWVKKQLQRGQVTELLEPGLLELDPESSEWEEFLLGIKVGLLCTATDPLDRPTMSDVVFMLEGCRVGPDVPSSADPTSQPSPA

SEQ ID NO: 48850 - DNA, 2367 bp, Arabidopsis thaliana; identical to SEQ ID NO: 45792
  misc_feature (1)..(2367): Ceres Seq. ID no. 13600852
  misc_feature: MA Experiment ID: 20000307 Result: Down-regulated in Transcription
  misc_feature: MA Experiment 20000307 PARAMETER Experiment Name: At_Germinating_Seeds_Sub_P Parameter: Age (hr) Value: 24 vs. 0
  misc_feature: MA Experiment 20000307 PARAMETER Experiment Name: At_Germinating_Seeds_Sub_P Parameter: Organism Value: A. thaliana
  misc_feature: MA Experiment 20000307 PARAMETER Experiment Name: At_Germinating_Seeds_Sub_P Parameter: Plant Line Value: WS
  misc_feature: MA Experiment 20000307 PARAMETER Experiment Name: At_Germinating_Seeds_Sub_P Parameter: Tissue Value: Germinating Seeds
  misc_feature: MA Experiment ID: 20000328 Result: Up-regulated in Transcription
  misc_feature: MA Experiment 20000328 PARAMETER Experiment Name: At_42deg_Heat_Sub_P Parameter: Age (day) Value: 14
  misc_feature: MA Experiment 20000328 PARAMETER Experiment Name: At_42deg_Heat_Sub_P Parameter: Organism Value: A. thaliana
  misc_feature: MA Experiment 20000328 PARAMETER Experiment Name: At_42deg_Heat_Sub_P Parameter: Plant Line Value: WS
  misc_feature: MA Experiment 20000328 PARAMETER Experiment Name: At_42deg_Heat_Sub_P Parameter: Temperature (deg C) Value: 42 vs. 22
  misc_feature: MA Experiment 20000328 PARAMETER Experiment Name: At_42deg_Heat_Sub_P Parameter: Timepoint (hr) Value: 6
  misc_feature: MA Experiment 20000328 PARAMETER Experiment Name: At_42deg_Heat_Sub_P Parameter: Tissue Value: Aerial
  misc_feature: MA Experiment ID: 20001807 Result: Up-regulated in Transcription
  misc_feature: MA Experiment 20001807 PARAMETER Experiment Name: At_50mM_NH4NO3_L-to-H_Sub_P Parameter: Timepoint (hr) Value: 6
  misc_feature: MA Experiment 20001807 PARAMETER Experiment Name: At_50mM_NH4NO3_L-to-H_Sub_P Parameter: Tissue Value: Leaf
  misc_feature: MA Experiment 20001807 PARAMETER Experiment Name: At_50mM_NH4NO3_L-to-H_Sub_P Parameter: Treatment Value: 50mM NH4NO3 vs 100mM Mannitol

SEQ ID NO: 48851 - protein, 682 aa, Arabidopsis thaliana; identical to SEQ ID NO: 45793
  peptide (1)..(682): Ceres Seq. ID no. 13600853
  misc_feature (54)..(648): Pfam Name: Hsp70 protein Pfam Description: Hsp70 protein
  misc_feature (54)..(648): Pfam Name: Hsp70 protein Pfam Description: Hsp70 protein
  misc_feature (54)..(648): Pfam Name: Hsp70 protein Pfam Description: Hsp70 protein
  misc_feature (17)..(656): Homolog of NCBI NO: 31790767 NR Description: heat shock protein 70 precursor [Neocallimastix
  misc_feature (1)..(673): Homolog of NCBI NO: 34878657 NR Description: similar to grp75 [Rattus norvegicus]
  misc_feature (1)..(676): Homolog of NCBI NO: 585273 NR Description: Heat shock 70 kDa protein, mitochondrial
  misc_feature (42)..(676): Homolog of NCBI NO: 27476086 NR Description: Putative heat shock 70 KD protein, mitochondrial
  misc_feature (7)..(677): Homolog of NCBI NO: 7441881 NR Description: dnaK-type molecular chaperone HSC70-10,
  misc_feature (17)..(656): Homolog of NCBI NO: 31790767 NR Description: heat shock protein 70 precursor [Neocallimastix
  misc_feature (1)..(676): Homolog of NCBI NO: 585273 NR Description: Heat shock 70 kDa protein, mitochondrial
  misc_feature (7)..(677): Homolog of NCBI NO: 7441881 NR Description: dnaK-type molecular chaperone HSC70-10,
  misc_feature (42)..(676): Homolog of NCBI NO: 27476086 NR Description: Putative heat shock 70 KD protein, mitochondrial
  misc_feature (1)..(676): Homolog of NCBI NO: 585273 NR Description: Heat shock 70 kDa protein, mitochondrial
  misc_feature (1)..(673): Homolog of NCBI NO: 34878657 NR Description: similar to grp75 [Rattus norvegicus]
  misc_feature (17)..(656): Homolog of NCBI NO: 31790767 NR Description: heat shock protein 70 precursor [Neocallimastix
  misc_feature (3)..(676): Homolog of NCBI NO: 7441844 NR Description: dnaK-type molecular chaperone PHSP1 precursor,
  misc_feature (3)..(676): Homolog of NCBI NO: 585272 NR Description: HEAT SHOCK 70 KD PROTEIN, MITOCHONDRIAL PRECURSOR
  misc_feature (5)..(676): Homolog of NCBI NO: 399940 NR Description: HEAT SHOCK 70 KD PROTEIN, MITOCHONDRIAL PRECURSOR
  misc_feature (1)..(676): Homolog of NCBI NO: 15242459 NR Description: heat shock protein mtHsc70-2 (Hsc70-5)
  misc_feature (7)..(677): Homolog of NCBI NO: 7441879 NR Description: dnaK-type molecular chaperone HSC70-11,
  misc_feature (3)..(676): Homolog of NCBI NO: 7441844 NR Description: dnaK-type molecular chaperone PHSP1 precursor,
  misc_feature (3)..(676): Homolog of NCBI NO: 585272 NR Description: HEAT SHOCK 70 KD PROTEIN, MITOCHONDRIAL PRECURSOR
  misc_feature (5)..(676): Homolog of NCBI NO: 399940 NR Description: HEAT SHOCK 70 KD PROTEIN, MITOCHONDRIAL PRECURSOR
  misc_feature (1)..(676): Homolog of NCBI NO: 15242459 NR Description: heat shock protein mtHsc70-2 (Hsc70-5)
  misc_feature (7)..(677): Homolog of NCBI NO: 7441879 NR Description: dnaK-type molecular chaperone HSC70-11,
  misc_feature (7)..(677): Homolog of NCBI NO: 7441881 NR Description: dnaK-type molecular chaperone HSC70-10,
  misc_feature (42)..(676): Homolog of NCBI NO: 27476086 NR Description: Putative heat shock 70 KD protein, mitochondrial
  misc_feature (1)..(673): Homolog of NCBI NO: 34878657 NR Description: similar to grp75 [Rattus norvegicus]
  misc_feature (7)..(677): Homolog of NCBI NO: 7441879 NR Description: dnaK-type molecular chaperone HSC70-11,
  misc_feature (1)..(676): Homolog of NCBI NO: 15242459 NR Description: heat shock protein mtHsc70-2 (Hsc70-5)
  misc_feature (5)..(676): Homolog of NCBI NO: 399940 NR Description: HEAT SHOCK 70 KD PROTEIN, MITOCHONDRIAL PRECURSOR
  misc_feature (3)..(676): Homolog of NCBI NO: 585272 NR Description: HEAT SHOCK 70 KD PROTEIN, MITOCHONDRIAL PRECURSOR
  misc_feature (3)..(676): Homolog of NCBI NO: 7441844 NR Description: dnaK-type molecular chaperone PHSP1 precursor,

SEQ ID NO: 48852 - protein, 666 aa, Arabidopsis thaliana; identical to SEQ ID NO: 45794
  peptide (1)..(666): Ceres Seq. ID no. 13600854
  misc_feature (38)..(632): Pfam Name: Hsp70 protein Pfam Description: Hsp70 protein
  misc_feature (38)..(632): Pfam Name: Hsp70 protein Pfam Description: Hsp70 protein
  misc_feature (38)..(632): Pfam Name: Hsp70 protein Pfam Description: Hsp70 protein
  misc_feature (1)..(640): Homolog of NCBI NO: 31790767 NR Description: heat shock protein 70 precursor [Neocallimastix
  misc_feature (1)..(657): Homolog of NCBI NO: 34878657 NR Description: similar to grp75 [Rattus norvegicus]
  misc_feature (1)..(660): Homolog of NCBI NO: 585273 NR Description: Heat shock 70 kDa protein, mitochondrial
  misc_feature (26)..(660): Homolog of NCBI NO: 27476086 NR Description: Putative heat shock 70 KD protein, mitochondrial
  misc_feature (1)..(661): Homolog of NCBI NO: 7441881 NR Description: dnaK-type molecular chaperone HSC70-10,
  misc_feature (1)..(640): Homolog of NCBI NO: 31790767 NR Description: heat shock protein 70 precursor [Neocallimastix
  misc_feature (1)..(660): Homolog of NCBI NO: 585273 NR Description: Heat shock 70 kDa protein, mitochondrial
  misc_feature (1)..(661): Homolog of NCBI NO: 7441881 NR Description: dnaK-type molecular chaperone HSC70-10,
  misc_feature (26)..(660): Homolog of NCBI NO: 27476086 NR Description: Putative heat shock 70 KD protein, mitochondrial
  misc_feature (1)..(660): Homolog of NCBI NO: 585273 NR Description: Heat shock 70 kDa protein, mitochondrial
  misc_feature (1)..(657): Homolog of NCBI NO: 34878657 NR Description: similar to grp75 [Rattus norvegicus]
  misc_feature (1)..(640): Homolog of NCBI NO: 31790767 NR Description: heat shock protein 70 precursor [Neocallimastix
  misc_feature (1)..(660): Homolog of NCBI NO: 7441844 NR Description: dnaK-type molecular chaperone PHSP1 precursor,
  misc_feature (1)..(660): Homolog of NCBI NO: 585272 NR Description: HEAT SHOCK 70 KD PROTEIN, MITOCHONDRIAL PRECURSOR
  misc_feature (1)..(660): Homolog of NCBI NO: 399940 NR Description: HEAT SHOCK 70 KD PROTEIN, MITOCHONDRIAL PRECURSOR
  misc_feature (1)..(660): Homolog of NCBI NO: 15242459 NR Description: heat shock protein mtHsc70-2 (Hsc70-5)
  misc_feature (1)..(661): Homolog of NCBI NO: 7441879 NR Description: dnaK-type molecular chaperone HSC70-11,
  misc_feature (1)..(660): Homolog of NCBI NO: 7441844 NR Description: dnaK-type molecular chaperone PHSP1 precursor,
  misc_feature (1)..(660): Homolog of NCBI NO: 585272 NR Description: HEAT SHOCK 70 KD PROTEIN, MITOCHONDRIAL PRECURSOR
  misc_feature (1)..(660): Homolog of NCBI NO: 399940 NR Description: HEAT SHOCK 70 KD PROTEIN, MITOCHONDRIAL PRECURSOR
  misc_feature (1)..(660): Homolog of NCBI NO: 15242459 NR Description: heat shock protein mtHsc70-2 (Hsc70-5)
  misc_feature (1)..(661): Homolog of NCBI NO: 7441879 NR Description: dnaK-type molecular chaperone HSC70-11,
  misc_feature (1)..(661): Homolog of NCBI NO: 7441881 NR Description: dnaK-type molecular chaperone HSC70-10,
  misc_feature (26)..(660): Homolog of NCBI NO: 27476086 NR Description: Putative heat shock 70 KD protein, mitochondrial
  misc_feature (1)..(657): Homolog of NCBI NO: 34878657 NR Description: similar to grp75 [Rattus norvegicus]
  misc_feature (1)..(661): Homolog of NCBI NO: 7441879 NR Description: dnaK-type molecular chaperone HSC70-11,
  misc_feature (1)..(660): Homolog of NCBI NO: 15242459 NR Description: heat shock protein mtHsc70-2 (Hsc70-5)
  misc_feature (1)..(660): Homolog of NCBI NO: 399940 NR Description: HEAT SHOCK 70 KD PROTEIN, MITOCHONDRIAL PRECURSOR
  misc_feature (1)..(660): Homolog of NCBI NO: 585272 NR Description: HEAT SHOCK 70 KD PROTEIN, MITOCHONDRIAL PRECURSOR
  misc_feature (1)..(660): Homolog of NCBI NO: 7441844 NR Description: dnaK-type molecular chaperone PHSP1 precursor,

SEQ ID NO: 48853 - protein, 649 aa, Arabidopsis thaliana; identical to SEQ ID NO: 45795
  peptide (1)..(649): Ceres Seq. ID no. 13600855
  misc_feature (21)..(615): Pfam Name: Hsp70 protein Pfam Description: Hsp70 protein
  misc_feature (21)..(615): Pfam Name: Hsp70 protein Pfam Description: Hsp70 protein
  misc_feature (21)..(615): Pfam Name: Hsp70 protein Pfam Description: Hsp70 protein
  misc_feature (1)..(623): Homolog of NCBI NO: 31790767 NR Description: heat shock protein 70 precursor [Neocallimastix
  misc_feature (1)..(640): Homolog of NCBI NO: 34878657 NR Description: similar to grp75 [Rattus norvegicus]
  misc_feature (1)..(643): Homolog of NCBI NO: 585273 NR Description: Heat shock 70 kDa protein, mitochondrial
  misc_feature (9)..(643): Homolog of NCBI NO: 27476086 NR Description: Putative heat shock 70 KD protein, mitochondrial
  misc_feature (1)..(644): Homolog of NCBI NO: 7441881 NR Description: dnaK-type molecular chaperone HSC70-10,
  misc_feature (1)..(623): Homolog of NCBI NO: 31790767 NR Description: heat shock protein 70 precursor [Neocallimastix
  misc_feature (1)..(643): Homolog of NCBI NO: 585273 NR Description: Heat shock 70 kDa protein, mitochondrial
  misc_feature (1)..(644): Homolog of NCBI NO: 7441881 NR Description: dnaK-type molecular chaperone HSC70-10,
  misc_feature (9)..(643): Homolog of NCBI NO: 27476086 NR Description: Putative heat shock 70 KD protein, mitochondrial
  misc_feature (1)..(643): Homolog of NCBI NO: 585273 NR Description: Heat shock 70 kDa protein, mitochondrial
  misc_feature (1)..(640): Homolog of NCBI NO: 34878657 NR Description: similar to grp75 [Rattus norvegicus]
  misc_feature (1)..(623): Homolog of NCBI NO: 31790767 NR Description: heat shock protein 70 precursor [Neocallimastix
  misc_feature (1)..(643): Homolog of NCBI NO: 7441844 NR Description: dnaK-type molecular chaperone PHSP1 precursor,
  misc_feature (1)..(643): Homolog of NCBI NO: 585272 NR Description: HEAT SHOCK 70 KD PROTEIN, MITOCHONDRIAL PRECURSOR
  misc_feature (1)..(643): Homolog of NCBI NO: 399940 NR Description: HEAT SHOCK 70 KD PROTEIN, MITOCHONDRIAL PRECURSOR
  misc_feature (1)..(643): Homolog of NCBI NO: 15242459 NR Description: heat shock protein mtHsc70-2 (Hsc70-5)
  misc_feature (1)..(644): Homolog of NCBI NO: 7441879 NR Description: dnaK-type molecular chaperone HSC70-11,
  misc_feature (1)..(643): Homolog of NCBI NO: 7441844 NR Description: dnaK-type molecular chaperone PHSP1 precursor,
  misc_feature (1)..(643): Homolog of NCBI NO: 585272 NR Description: HEAT SHOCK 70 KD PROTEIN, MITOCHONDRIAL PRECURSOR
  misc_feature (1)..(643): Homolog of NCBI NO: 399940 NR Description: HEAT SHOCK 70 KD PROTEIN, MITOCHONDRIAL PRECURSOR
  misc_feature (1)..(643): Homolog of NCBI NO: 15242459 NR Description: heat shock protein mtHsc70-2 (Hsc70-5)
  misc_feature (1)..(644): Homolog of NCBI NO: 7441879 NR Description: dnaK-type molecular chaperone HSC70-11,
  misc_feature (1)..(644): Homolog of NCBI NO: 7441881 NR Description: dnaK-type molecular chaperone HSC70-10,
  misc_feature (9)..(643): Homolog of NCBI NO: 27476086 NR Description: Putative heat shock 70 KD protein, mitochondrial
  misc_feature (1)..(640): Homolog of NCBI NO: 34878657 NR Description: similar to grp75 [Rattus norvegicus]
  misc_feature (1)..(644): Homolog of NCBI NO: 7441879 NR Description: dnaK-type molecular chaperone HSC70-11,
  misc_feature (1)..(643): Homolog of NCBI NO: 15242459 NR Description: heat shock protein mtHsc70-2 (Hsc70-5)
  misc_feature (1)..(643): Homolog of NCBI NO: 399940 NR Description: HEAT SHOCK 70 KD PROTEIN, MITOCHONDRIAL PRECURSOR
  misc_feature (1)..(643): Homolog of NCBI NO: 585272 NR Description: HEAT SHOCK 70 KD PROTEIN, MITOCHONDRIAL PRECURSOR
  misc_feature (1)..(643): Homolog of NCBI NO: 7441844 NR Description: dnaK-type molecular chaperone PHSP1 precursor,

SEQ ID NO: 48854 - DNA, 1368 bp, Arabidopsis thaliana
  misc_feature (1)..(1368): Ceres Seq. ID no. 15168818
gacaaacaacttcataatggctttccacttccggcgactttgcttcttctcagctcttcttgccgtggttctccaactccttcatggcgtctctggccaactagttgtggttgaggaacctatttctgctcctccgcctccgctggtcgacctaaacaccggtgatggcattgtgccggcgctgtttgtcttcggtgactctctaatagacaatgggaataacaataacattccttcctttgccaaagccaattattttccttatggcattgatttcaatggcggtccgaccggtcgattctgcaatggcttaacgatggtcgatgggattgctcaactattggggctgccactgattccggcctactcggaagctaccggagatcaagtacttcgtggtgtcaactatgcttccgcagccgcggggattcttcctgacaccggaggaaactttgtgggacgcatacctttcgaccagcagattcataacttcgagacaacactagatcaggtggcgagcaagtccggtggtgcagtggccattgcggattcggtgactcgaagcttgttcttcatcggaatgggaagcaacgactatctcaacaattacttgatgcccaatttccctacccgtaaccaatacaactcccaacagttcggtgatctcttggttcaacattacaccgatcagctcaccagactatataatcttggtggtcggaaatttgtagtggccggacttggaagaatggggtgcattcccagcattctagctcaaggaaacgacggtaaatgctcggaagaagtgaaccaacttgttcttcctttcaacacaaacgttaaaacaatgatctctaatctcaaccagaatctcccggatgctaaatttatttacctcgacatcgctcatatgttcgaagacatcgttgctaaccaagcagcttatggtcttactactatggacaaaggatgttgtggaataggaaaaaacagaggacagatcacttgtcttccctttgaaacgccttgtcctaacagagatcagtatgtgttttgggatgctttccatcctacagagaaagttaatctcataatggcaaagaaagcgtttgctggtgaccgcactgtcgcgtacccgatcaacattcagcaattggctagtctcaattaacgattaagaagactatcaacaagacataaaaacttggtgttgtctttgtagtttcttttttgtaaggttttgagtcaaatctgttttccttttaagacgttttgaaaacgtctactgtgtcacacttaacggtccaaatcaatgtactcatcgttgcttcctttgttttcataaatatcatcaattataaaattacg

SEQ ID NO: 48855 - protein, 389 aa, Arabidopsis thaliana
  peptide (1)..(389): Ceres Seq. ID no. 15168819
  misc_feature (61)..(369): Pfam Name: GDSL-like Lipase/Acylhydrolase Pfam Description: GDSL-like Lipase/Acylhydrolase
  misc_feature (49)..(388): Homolog of NCBI NO: 7485419 NR Description: hypothetical protein F13C5.140 - Arabidopsis
  misc_feature (58)..(388): Homolog of NCBI NO: 21594055 NR Description: lipase/hydrolase, putative [Arabidopsis thaliana]
  misc_feature (58)..(388): Homolog of NCBI NO: 34909504 NR Description: putative GDSL-motif lipase/hydrolase-like protein
  misc_feature (58)..(388): Homolog of NCBI NO: 21592417 NR Description: lipase/hydrolase, putative [Arabidopsis thaliana]
  misc_feature (58)..(388): Homolog of NCBI NO: 15220514 NR Description: GDSL-motif lipase/hydrolase protein [Arabidopsis
  misc_feature (58)..(388): Homolog of NCBI NO: 15220512 NR Description: GDSL-motif lipase/hydrolase protein [Arabidopsis
  misc_feature (48)..(388): Homolog of NCBI NO: 21553940 NR Description: GDSL-motif lipase/hydrolase-like protein
  misc_feature (48)..(388): Homolog of NCBI NO: 15242458 NR Description: GDSL-motif lipase/hydrolase protein [Arabidopsis
  misc_feature (58)..(388): Homolog of NCBI NO: 18398991 NR Description: GDSL-motif lipase/hydrolase protein [Arabidopsis
  misc_feature (6)..(389): Homolog of NCBI NO: 18409881 NR Description: GDSL-motif lipase/hydrolase protein [Arabidopsis
TNNFIMAFHFRRLCFFSALLAVVLQLLHGVSGQLVVVEEPISAPPPPLVDLNTGDGIVPALFVFGDSLIDNGNNNNIPSFAKANYFPYGIDFNGGPTGRFCNGLTMVDGIAQLLGLPLIPAYSEATGDQVLRGVNYASAAAGILPDTGGNFVGRIPFDQQIHNFETTLDQVASKSGGAVAIADSVTRSLFFIGMGSNDYLNNYLMPNFPTRNQYNSQQFGDLLVQHYTDQLTRLYNLGGRKFVVAGLGRMGCIPSILAQGNDGKCSEEVNQLVLPFNTNVKTMISNLNQNLPDAKFIYLDIAHMFEDIVANQAAYGLTTMDKGCCGIGKNRGQITCLPFETPCPNRDQYVFWDAFHPTEKVNLIMAKKAFAGDRTVAYPINIQQLASLN

SEQ ID NO: 48856 - protein, 384 aa, Arabidopsis thaliana
  peptide (1)..(384): Ceres Seq. ID no. 15168820
  misc_feature (56)..(364): Pfam Name: GDSL-like Lipase/Acylhydrolase Pfam Description: GDSL-like Lipase/Acylhydrolase
  misc_feature (44)..(383): Homolog of NCBI NO: 7485419 NR Description: hypothetical protein F13C5.140 - Arabidopsis
  misc_feature (53)..(383): Homolog of NCBI NO: 21594055 NR Description: lipase/hydrolase, putative [Arabidopsis thaliana]
  misc_feature (53)..(383): Homolog of NCBI NO: 34909504 NR Description: putative GDSL-motif lipase/hydrolase-like protein
  misc_feature (53)..(383): Homolog of NCBI NO: 21592417 NR Description: lipase/hydrolase, putative [Arabidopsis thaliana]
  misc_feature (53)..(383): Homolog of NCBI NO: 15220514 NR Description: GDSL-motif lipase/hydrolase protein [Arabidopsis
  misc_feature (53)..(383): Homolog of NCBI NO: 15220512 NR Description: GDSL-motif lipase/hydrolase protein [Arabidopsis
  misc_feature (43)..(383): Homolog of NCBI NO: 21553940 NR Description: GDSL-motif lipase/hydrolase-like protein
  misc_feature (43)..(383): Homolog of NCBI NO: 15242458 NR Description: GDSL-motif lipase/hydrolase protein [Arabidopsis
  misc_feature (53)..(383): Homolog of NCBI NO: 18398991 NR Description: GDSL-motif lipase/hydrolase protein [Arabidopsis
  misc_feature (1)..(384): Homolog of NCBI NO: 18409881 NR Description: GDSL-motif lipase/hydrolase protein [Arabidopsis
MAFHFRRLCFFSALLAVVLQLLHGVSGQLVVVEEPISAPPPPLVDLNTGDGIVPALFVFGDSLIDNGNNNNIPSFAKANYFPYGIDFNGGPTGRFCNGLTMVDGIAQLLGLPLIPAYSEATGDQVLRGVNYASAAAGILPDTGGNFVGRIPFDQQIHNFETTLDQVASKSGGAVAIADSVTRSLFFIGMGSNDYLNNYLMPNFPTRNQYNSQQFGDLLVQHYTDQLTRLYNLGGRKFVVAGLGRMGCIPSILAQGNDGKCSEEVNQLVLPFNTNVKTMISNLNQNLPDAKFIYLDIAHMFEDIVANQAAYGLTTMDKGCCGIGKNRGQITCLPFETPCPNRDQYVFWDAFHPTEKVNLIMAKKAFAGDRTVAYPINIQQLASLN

SEQ ID NO: 48857 - protein, 284 aa, Arabidopsis thaliana
  peptide (1)..(284): Ceres Seq. ID no. 15168821
  misc_feature (1)..(264): Pfam Name: GDSL-like Lipase/Acylhydrolase Pfam Description: GDSL-like Lipase/Acylhydrolase
  misc_feature (1)..(283): Homolog of NCBI NO: 7485419 NR Description: hypothetical protein F13C5.140 - Arabidopsis
  misc_feature (1)..(283): Homolog of NCBI NO: 21594055 NR Description: lipase/hydrolase, putative [Arabidopsis thaliana]
  misc_feature (1)..(283): Homolog of NCBI NO: 34909504 NR Description: putative GDSL-motif lipase/hydrolase-like protein
  misc_feature (1)..(283): Homolog of NCBI NO: 21592417 NR Description: lipase/hydrolase, putative [Arabidopsis thaliana]
  misc_feature (1)..(283): Homolog of NCBI NO: 15220514 NR Description: GDSL-motif lipase/hydrolase protein [Arabidopsis
  misc_feature (1)..(283): Homolog of NCBI NO: 15220512 NR Description: GDSL-motif lipase/hydrolase protein [Arabidopsis
  misc_feature (1)..(283): Homolog of NCBI NO: 21553940 NR Description: GDSL-motif lipase/hydrolase-like protein
  misc_feature (1)..(283): Homolog of NCBI NO: 15242458 NR Description: GDSL-motif lipase/hydrolase protein [Arabidopsis
  misc_feature (1)..(283): Homolog of NCBI NO: 18398991 NR Description: GDSL-motif lipase/hydrolase protein [Arabidopsis
  misc_feature (1)..(284): Homolog of NCBI NO: 18409881 NR Description: GDSL-motif lipase/hydrolase protein [Arabidopsis
MVDGIAQLLGLPLIPAYSEATGDQVLRGVNYASAAAGILPDTGGNFVGRIPFDQQIHNFETTLDQVASKSGGAVAIADSVTRSLFFIGMGSNDYLNNYLMPNFPTRNQYNSQQFGDLLVQHYTDQLTRLYNLGGRKFVVAGLGRMGCIPSILAQGNDGKCSEEVNQLVLPFNTNVKTMISNLNQNLPDAKFIYLDIAHMFEDIVANQAAYGLTTMDKGCCGIGKNRGQITCLPFETPCPNRDQYVFWDAFHPTEKVNLIMAKKAFAGDRTVAYPINIQQLASLN

SEQ ID NO: 48858 - DNA, 1670 bp, Arabidopsis thaliana
  misc_feature (1)..(1670): Ceres Seq. ID no. 14313190
  misc_feature: MA Experiment ID: 20000171 Result: Down-regulated in Transcription
  misc_feature: MA Experiment 20000171 PARAMETER Experiment Name: At_42deg_Heat_P Parameter: Age (day) Value: 14
  misc_feature: MA Experiment 20000171 PARAMETER Experiment Name: At_42deg_Heat_P Parameter: Organism Value: A. thaliana
  misc_feature: MA Experiment 20000171 PARAMETER Experiment Name: At_42deg_Heat_P Parameter: Plant Line Value: WS
  misc_feature: MA Experiment 20000171 PARAMETER Experiment Name: At_42deg_Heat_P Parameter: Temperature (deg C) Value: 42 vs. 22
  misc_feature: MA Experiment 20000171 PARAMETER Experiment Name: At_42deg_Heat_P Parameter: Timepoint (hr) Value: 1
  misc_feature: MA Experiment 20000171 PARAMETER Experiment Name: At_42deg_Heat_P Parameter: Tissue Value: Aerial
  misc_feature: MA Experiment ID: 20000173 Result: Down-regulated in Transcription
  misc_feature: MA Experiment 20000173 PARAMETER Experiment Name: At_42deg_Heat_P Parameter: Age (day) Value: 14
  misc_feature: MA Experiment 20000173 PARAMETER Experiment Name: At_42deg_Heat_P Parameter: Organism Value: A. thaliana
  misc_feature: MA Experiment 20000173 PARAMETER Experiment Name: At_42deg_Heat_P Parameter: Plant Line Value: WS
  misc_feature: MA Experiment 20000173 PARAMETER Experiment Name: At_42deg_Heat_P Parameter: Temperature (deg C) Value: 42 vs. 22
  misc_feature: MA Experiment 20000173 PARAMETER Experiment Name: At_42deg_Heat_P Parameter: Timepoint (hr) Value: 6
  misc_feature: MA Experiment 20000173 PARAMETER Experiment Name: At_42deg_Heat_P Parameter: Tissue Value: Aerial
  misc_feature: MA Experiment ID: 20000184 Result: Down-regulated in Transcription
  misc_feature: MA Experiment 20000184 PARAMETER Experiment Name: At_Shoots__P Parameter: Age (day) Value: 7
  misc_feature: MA Experiment 20000184 PARAMETER Experiment Name: At_Shoots__P Parameter: Tissue Value: Shoots vs. Whole Plant
  misc_feature: MA Experiment ID: 20000185 Result: Down-regulated in Transcription
  misc_feature: MA Experiment 20000185 PARAMETER Experiment Name: At_Roots__P Parameter: Age (day) Value: 7 vs. 21
  misc_feature: MA Experiment 20000185 PARAMETER Experiment Name: At_Roots__P Parameter: Organism Value: A. thaliana
  misc_feature: MA Experiment 20000185 PARAMETER Experiment Name: At_Roots__P Parameter: Tissue Value: Roots vs. Whole Plant
  misc_feature: MA Experiment ID: 20000439 Result: Down-regulated in Transcription
  misc_feature: MA Experiment 20000439 PARAMETER Experiment Name: At_Roots__P Parameter: Age (day) Value: 14 vs. 21
  misc_feature: MA Experiment 20000439 PARAMETER Experiment Name: At_Roots__P Parameter: Organism Value: A. thaliana
  misc_feature: MA Experiment 20000439 PARAMETER Experiment Name: At_Roots__P Parameter: Tissue Value: Roots vs. Whole Plant
  misc_feature: MA Experiment ID: 20000495 Result: Up-regulated in Transcription
  misc_feature: MA Experiment 20000495 PARAMETER Experiment Name: At_Guard_Cells_P Parameter: Harvest Date Value: 8/2/2002
  misc_feature: MA Experiment 20000495 PARAMETER Experiment Name: At_Guard_Cells_P Parameter: Organism Value: A. thaliana
  misc_feature: MA Experiment 20000495 PARAMETER Experiment Name: At_Guard_Cells_P Parameter: Tissue Value: Guard Cells vs. Leaves
  misc_feature: MA Experiment ID: 20000527 Result: Up-regulated in Transcription
  misc_feature: MA Experiment 20000527 PARAMETER Experiment Name: At_10percent_PEG_P Parameter: Age (day) Value: 20
  misc_feature: MA Experiment 20000527 PARAMETER Experiment Name: At_10percent_PEG_P Parameter: Organism Value: A. thaliana
  misc_feature: MA Experiment 20000527 PARAMETER Experiment Name: At_10percent_PEG_P Parameter: Plant Line Value: WS
  misc_feature: MA Experiment 20000527 PARAMETER Experiment Name: At_10percent_PEG_P Parameter: Timepoint (day) Value: 20
  misc_feature: MA Experiment 20000527 PARAMETER Experiment Name: At_10percent_PEG_P Parameter: Tissue Value: Whole Plant
  misc_feature: MA Experiment 20000527 PARAMETER Experiment Name: At_10percent_PEG_P Parameter: Treatment Value: 10percent PEG vs. No Treatment
  misc_feature: MA Experiment ID: 20001451 Result: Down-regulated in Transcription
  misc_feature: MA Experiment 20001451 PARAMETER Experiment Name: At_Far-red-induction_P Parameter: Age (day) Value: 7
  misc_feature: MA Experiment 20001451 PARAMETER Experiment Name: At_Far-red-induction_P Parameter: Light Value: Far-red vs. White
  misc_feature: MA Experiment 20001451 PARAMETER Experiment Name: At_Far-red-induction_P Parameter: Organism Value: A. thaliana
  misc_feature: MA Experiment 20001451 PARAMETER Experiment Name: At_Far-red-induction_P Parameter: Plant Line Value: Columbia
  misc_feature: MA Experiment 20001451 PARAMETER Experiment Name: At_Far-red-induction_P Parameter: Timepoint (hr) Value: 24
  misc_feature: MA Experiment 20001451 PARAMETER Experiment Name: At_Far-red-induction_P Parameter: Tissue Value: Whole Plant
  misc_feature: MA Experiment ID: 20001554 Result: Down-regulated in Transcription
  misc_feature: MA Experiment 20001554 PARAMETER Experiment Name: At_Drought_Soil_Dry_P Parameter: Age (day) Value: 21
  misc_feature: MA Experiment 20001554 PARAMETER Experiment Name: At_Drought_Soil_Dry_P Parameter: Organism Value: A. thaliana
  misc_feature: MA Experiment 20001554 PARAMETER Experiment Name: At_Drought_Soil_Dry_P Parameter: Plant Line Value: WS
  misc_feature: MA Experiment 20001554 PARAMETER Experiment Name: At_Drought_Soil_Dry_P Parameter: Post Timepoint (hr) Value: None
  misc_feature: MA Experiment 20001554 PARAMETER Experiment Name: At_Drought_Soil_Dry_P Parameter: Post-Treatment Value: None
  misc_feature: MA Experiment 20001554 PARAMETER Experiment Name: At_Drought_Soil_Dry_P Parameter: Timepoint (day) Value: 7
  misc_feature: MA Experiment 20001554 PARAMETER Experiment Name: At_Drought_Soil_Dry_P Parameter: Treatment Value: Drought vs. No Drought
  misc_feature: MA Experiment ID: 20001555 Result: Down-regulated in Transcription
  misc_feature: MA Experiment 20001555 PARAMETER Experiment Name: At_Drought_Soil_Dry_P Parameter: Age (day) Value: 24
  misc_feature: MA Experiment 20001555 PARAMETER Experiment Name: At_Drought_Soil_Dry_P Parameter: Organism Value: A. thaliana
  misc_feature: MA Experiment 20001555 PARAMETER Experiment Name: At_Drought_Soil_Dry_P Parameter: Plant Line Value: WS
  misc_feature: MA Experiment 20001555 PARAMETER Experiment Name: At_Drought_Soil_Dry_P Parameter: Post Timepoint (hr) Value: None
  misc_feature: MA Experiment 20001555 PARAMETER Experiment Name: At_Drought_Soil_Dry_P Parameter: Post-Treatment Value: None
  misc_feature: MA Experiment 20001555 PARAMETER Experiment Name: At_Drought_Soil_Dry_P Parameter: Timepoint (day) Value: 10
  misc_feature: MA Experiment 20001555 PARAMETER Experiment Name: At_Drought_Soil_Dry_P Parameter: Treatment Value: Drought vs. No Drought
  misc_feature: MA Experiment ID: 20001557 Result: Down-regulated in Transcription
  misc_feature: MA Experiment 20001557 PARAMETER Experiment Name: At_Drought_Soil_Dry_P Parameter: Age (day) Value: 27
  misc_feature: MA Experiment 20001557 PARAMETER Experiment Name: At_Drought_Soil_Dry_P Parameter: Organism Value: A. thaliana
  misc_feature: MA Experiment 20001557 PARAMETER Experiment Name: At_Drought_Soil_Dry_P Parameter: Plant Line Value: WS
  misc_feature: MA Experiment 20001557 PARAMETER Experiment Name: At_Drought_Soil_Dry_P Parameter: Post Timepoint (hr) Value: 3
  misc_feature: MA Experiment 20001557 PARAMETER Experiment Name: At_Drought_Soil_Dry_P Parameter: Post-Treatment Value: Re-Water vs. No Drought
  misc_feature: MA Experiment 20001557 PARAMETER Experiment Name: At_Drought_Soil_Dry_P Parameter: Timepoint (day) Value: 13
  misc_feature: MA Experiment 20001557 PARAMETER Experiment Name: At_Drought_Soil_Dry_P Parameter: Treatment Value: Drought vs. No Drought
  misc_feature: MA Experiment ID: 20001558 Result: Down-regulated in Transcription
  misc_feature: MA Experiment 20001558 PARAMETER Experiment Name: At_Drought_Soil_Dry_P Parameter: Age (day) Value: 27
  misc_feature: MA Experiment 20001558 PARAMETER Experiment Name: At_Drought_Soil_Dry_P Parameter: Organism Value: A. thaliana
  misc_feature: MA Experiment 20001558 PARAMETER Experiment Name: At_Drought_Soil_Dry_P Parameter: Plant Line Value: WS
  misc_feature: MA Experiment 20001558 PARAMETER Experiment Name: At_Drought_Soil_Dry_P Parameter: Post Timepoint (hr) Value: 6
  misc_feature: MA Experiment 20001558 PARAMETER Experiment Name: At_Drought_Soil_Dry_P Parameter: Post-Treatment Value: Re-Water vs. No Drought
  misc_feature: MA Experiment 20001558 PARAMETER Experiment Name: At_Drought_Soil_Dry_P Parameter: Timepoint (day) Value: 13
  misc_feature: MA Experiment 20001558 PARAMETER Experiment Name: At_Drought_Soil_Dry_P Parameter: Treatment Value: Drought vs. No Drought
  misc_feature: MA Experiment ID: 20001768 Result: Up-regulated in Transcription
  misc_feature: MA Experiment 20001768 PARAMETER Experiment Name: At_Far-red-enriched-adult_P Parameter: Age (day) Value: 28
  misc_feature: MA Experiment 20001768 PARAMETER Experiment Name: At_Far-red-enriched-adult_P Parameter: Light Value: Far-red enriched vs. White
  misc_feature: MA Experiment 20001768 PARAMETER Experiment Name: At_Far-red-enriched-adult_P Parameter: Organism Value: A. thaliana
  misc_feature: MA Experiment 20001768 PARAMETER Experiment Name: At_Far-red-enriched-adult_P Parameter: Plant Line Value: Columbia
  misc_feature: MA Experiment 20001768 PARAMETER Experiment Name: At_Far-red-enriched-adult_P Parameter: Timepoint (hr) Value: 1
  misc_feature: MA Experiment 20001768 PARAMETER Experiment Name: At_Far-red-enriched-adult_P Parameter: Tissue Value: Aerial
atacgtgactcatcgtctttttcactcccacacgttctgctccagcgatactgtgagagaatctctgtgtggttctgaattcttaggctggaattgaattctgaaatggcggaggagtacaaggaagcgttgttggagaagcagaactatcacgacggatgtcccggctgtaaggtggagcagatgaagcagctccggcgaggatatccttacctcgagctttccttcgtttggattatcgtcctctccacttctctaccaatttcctcactctatcccttcctctactatatgattgaggattttggtgtcgcaaagacggagaaagatattgggttttatgctggttttgttggttgctcttttatgcttggaagagcactgacttctgtgttctggggaattgtggctgatcgttatggaagaaaacccattatactcttgggaactatctcaattgcaattttcaacgctctttttggcttgagctcaaatttttggatagcaattggcacaaggtttcttcttgggagtttcaactgtttgcttggaacaatgaaggcctatgcatcagaaatatttcgtgatgaatatcaagctaccgcaatgtcagctgttagtactgcttggggcattggactgatcattggccctgctcttggtggttttttagctcagccggcagacaaatatccaaatgtgttctcccaagaatctctttttggcagattccggtatgcattgccttgctttacgatttcagcttttgccttgcttgtgacagtactatgctgcttcatcccggagacactgcacaatcataagctggacagcttatcacatgatgattcatacgatatacttgaagctgcatctcatgaatcatctccttctaccgggaaggcaggaaaaaacgaaagaaaggcttctcagtctctcttgaagaattggccgctgatgtcatctatcattgtgtattgtgttctgtgtcttcatgatactgcatactcggagatatttgcactatgggctaacagtccaaggaagtatggaggtctgagctactcaacgaatgaagtcggtacagttcttgctatctcaggtctcggcctattctcttttcaggtatttgtttatcctttggctgagaaactgctaggacctgttctggtcacccgatatgctggggcactgatgatacctatacaaatgagttatccatttatagcaggcttgtcaggtctcagtctaagcttgatgttaaattgtgcatcaatcctcataaatgtcttaagtgtgtctgccataaccggcctgttgatccttcaaaatagagcagtggatcagagccaaagaggggcggctaatggaatagctatgactgcgatgtctctatttaagacagttggaccagctggtgctggcatcttattttcttggagtgagaggcgactaaacgctgcatttctaccaggatcgcatatggtattcttcgtcttgaatgtgatagtagtggtcggagtagctctgacattcaagccatttctaacgacgggtcgaagatgaaattcatttgaattggtaagatagggaatgtatggacaagttgattcttttcatttcagatacgaaagaaaccggtaataaaatttcactaaccttaggatttc

SEQ ID NO: 48859 - protein, 486 aa, Arabidopsis thaliana
  peptide (1)..(486): Ceres Seq. ID no. 14313191
  misc_feature (88)..(481): Homolog of NCBI NO: 23452819 NR Description: major facilitator superfamily antiporter [Zea
  misc_feature (19)..(480): Homolog of NCBI NO: 23452821 NR Description: major facilitator superfamily antiporter
  misc_feature (88)..(481): Homolog of NCBI NO: 21555230 NR Description: transporter-like protein [Arabidopsis thaliana]
  misc_feature (88)..(481): Homolog of NCBI NO: 30684567 NR Description: transporter-related protein [Arabidopsis thaliana]
  misc_feature (3)..(482): Homolog of NCBI NO: 15229781 NR Description: transporter - related [Arabidopsis thaliana]
  misc_feature (15)..(481): Homolog of NCBI NO: 23452823 NR Description: major facilitator superfamily antiporter
  misc_feature (27)..(458): Homolog of NCBI NO: 10177340 NR Description: transporter-like protein [Arabidopsis thaliana]
  misc_feature (1)..(481): Homolog of NCBI NO: 30684565 NR Description: transporter-related protein [Arabidopsis
  misc_feature (27)..(486): Homolog of NCBI NO: 20260160 NR Description: transporter-like protein [Arabidopsis thaliana]
  misc_feature (1)..(486): Homolog of NCBI NO: 22326785 NR Description: transporter - related [Arabidopsis thaliana]
MAEEYKEALLEKQNYHDGCPGCKVEQMKQLRRGYPYLELSFVWIIVLSTSLPISSLYPFLYYMIEDFGVAKTEKDIGFYAGFVGCSFMLGRALTSVFWGIVADRYGRKPIILLGTISIAIFNALFGLSSNFWIAIGTRFLLGSFNCLLGTMKAYASEIFRDEYQATAMSAVSTAWGIGLIIGPALGGFLAQPADKYPNVFSQESLFGRFRYALPCFTISAFALLVTVLCCFIPETLHNHKLDSLSHDDSYDILEAASHESSPSTGKAGKNERKASQSLLKNWPLMSSIIVYCVLCLHDTAYSEIFALWANSPRKYGGLSYSTNEVGTVLAISGLGLFSFQVFVYPLAEKLLGPVLVTRYAGALMIPIQMSYPFIAGLSGLSLSLMLNCASILINVLSVSAITGLLILQNRAVDQSQRGAANGIAMTAMSLFKTVGPAGAGILFSWSERRLNAAFLPGSHMVFFVLNVIVVVGVALTFKPFLTTGRR

SEQ ID NO: 48860 - protein, 460 aa, Arabidopsis thaliana
  peptide (1)..(460): Ceres Seq. ID no. 14313192
  misc_feature (62)..(455): Homolog of NCBI NO: 23452819 NR Description: major facilitator superfamily antiporter [Zea
  misc_feature (1)..(454): Homolog of NCBI NO: 23452821 NR Description: major facilitator superfamily antiporter
  misc_feature (62)..(455): Homolog of NCBI NO: 21555230 NR Description: transporter-like protein [Arabidopsis thaliana]
  misc_feature (62)..(455): Homolog of NCBI NO: 30684567 NR Description: transporter-related protein [Arabidopsis thaliana]
  misc_feature (1)..(456): Homolog of NCBI NO: 15229781 NR Description: transporter - related [Arabidopsis thaliana]
  misc_feature (1)..(455): Homolog of NCBI NO: 23452823 NR Description: major facilitator superfamily antiporter
  misc_feature (1)..(432): Homolog of NCBI NO: 10177340 NR Description: transporter-like protein [Arabidopsis thaliana]
  misc_feature (1)..(455): Homolog of NCBI NO: 30684565 NR Description: transporter-related protein [Arabidopsis
  misc_feature (1)..(460): Homolog of NCBI NO: 20260160 NR Description: transporter-like protein [Arabidopsis thaliana]
  misc_feature (1)..(460): Homolog of NCBI NO: 22326785 NR Description: transporter - related [Arabidopsis thaliana]
MKQLRRGYPYLELSFVWIIVLSTSLPISSLYPFLYYMIEDFGVAKTEKDIGFYAGFVGCSFMLGRALTSVFWGIVADRYGRKPIILLGTISIAIFNALFGLSSNFWIAIGTRFLLGSFNCLLGTMKAYASEIFRDEYQATAMSAVSTAWGIGLIIGPALGGFLAQPADKYPNVFSQESLFGRFRYALPCFTISAFALLVTVLCCFIPETLHNHKLDSLSHDDSYDILEAASHESSPSTGKAGKNERKASQSLLKNWPLMSSIIVYCVLCLHDTAYSEIFALWANSPRKYGGLSYSTNEVGTVLAISGLGLFSFQVFVYPLAEKLLGPVLVTRYAGALMIPIQMSYPFIAGLSGLSLSLMLNCASILINVLSVSAITGLLILQNRAVDQSQRGAANGIAMTAMSLFKTVGPAGAGILFSWSERRLNAAFLPGSHMVFFVLNVIVVVGVALTFKPFLTTGRR

SEQ ID NO: 48861 - protein, 424 aa, Arabidopsis thaliana
  peptide (1)..(424): Ceres Seq. ID no. 14313193
  misc_feature (26)..(419): Homolog of NCBI NO: 23452819 NR Description: major facilitator superfamily antiporter [Zea
  misc_feature (1)..(418): Homolog of NCBI NO: 23452821 NR Description: major facilitator superfamily antiporter
  misc_feature (26)..(419): Homolog of NCBI NO: 21555230 NR Description: transporter-like protein [Arabidopsis thaliana]
  misc_feature (26)..(419): Homolog of NCBI NO: 30684567 NR Description: transporter-related protein [Arabidopsis thaliana]
  misc_feature (1)..(420): Homolog of NCBI NO: 15229781 NR Description: transporter - related [Arabidopsis thaliana]
  misc_feature (1)..(419): Homolog of NCBI NO: 23452823 NR Description: major facilitator superfamily antiporter
  misc_feature (1)..(396): Homolog of NCBI NO: 10177340 NR Description: transporter-like protein [Arabidopsis thaliana]
  misc_feature (1)..(419): Homolog of NCBI NO: 30684565 NR Description: transporter-related protein [Arabidopsis
  misc_feature (1)..(424): Homolog of NCBI NO: 20260160 NR Description: transporter-like protein [Arabidopsis thaliana]
  misc_feature (1)..(424): Homolog of NCBI NO: 22326785 NR Description: transporter - related [Arabidopsis thaliana]
MIEDFGVAKTEKDIGFYAGFVGCSFMLGRALTSVFWGIVADRYGRKPIILLGTISIAIFNALFGLSSNFWIAIGTRFLLGSFNCLLGTMKAYASEIFRDEYQATAMSAVSTAWGIGLIIGPALGGFLAQPADKYPNVFSQESLFGRFRYALPCFTISAFALLVTVLCCFIPETLHNHKLDSLSHDDSYDILEAASHESSPSTGKAGKNERKASQSLLKNWPLMSSIIVYCVLCLHDTAYSEIFALWANSPRKYGGLSYSTNEVGTVLAISGLGLFSFQVFVYPLAEKLLGPVLVTRYAGALMIPIQMSYPFIAGLSGLSLSLMLNCASILINVLSVSAITGLLILQNRAVDQSQRGAANGIAMTAMSLFKTVGPAGAGILFSWSERRLNAAFLPGSHMVFFVLNVIVVVGVALTFKPFLTTGRR

SEQ ID NO: 48862 - DNA, 2271 bp, Arabidopsis thaliana
  misc_feature (1)..(2271): Ceres Seq. ID no. 12601691
  misc_feature: MA Experiment ID: 20000495 Result: Down-regulated in Transcription
  misc_feature: MA Experiment 20000495 PARAMETER Experiment Name: At_Guard_Cells_P Parameter: Harvest Date Value: 8/2/2002
  misc_feature: MA Experiment 20000495 PARAMETER Experiment Name: At_Guard_Cells_P Parameter: Organism Value: A. thaliana
  misc_feature: MA Experiment 20000495 PARAMETER Experiment Name: At_Guard_Cells_P Parameter: Tissue Value: Guard Cells vs. Leaves
aaagtggttagagaggcttcagttgttggatgcttttgctttttttccttcttcttcgtcttctttcttcgtctctcttctttttttcagtttcggcgtgctgaagaagacgatagagtaatcaatcacagtgagagagatttgagggcaaatctgtcctttttttttcttaaacaactcatgcttgatttctgctacggcggaggaggaggaggaagaggtttacttttgcttatcaccgggaaatttccggcggtgattcaccgtcgatgataatgggttttattaaaagtgtagatctttgatgaaagcaggagactttttgatttctattttgattttgatttggggtttaggtttaagtttttagagaatcagatgaaggcgttacggagaagctatacttcaacgtcttctgggaattcatcttcttcgtcttcgttaccttcttcttcttcttcttcgttaccatcttcttcttcttcttcacctccttcttctaattctaattcttattcgaattctaattcttcttcgtcttcgtcgtcgtggatccatctacggtcggttctctttgtggctaatctttcgtctccgtcttcagttacttcttccgatcgccggcggaaatcaccgtggtctcgccggaaaagaaaatgggcattgacgccacatcaatggaggagtttatttacaccggagggaaaactccgtgatggtggagttggattcctgaagaaagttagaagcagaggtgttgatccaagtattcgtgcagaagtgtggctgttcttactcggagtttatgatttgaatagtactagtgaagaaagagaagcagtgaaaactcaaaaaaggaaggagtatgagaaactacagagacgatgtcagatgcttctcaagtgcggtaatggaagtaccgataatcttgaggagcttccatctgatgaggcaaacagtcaatgtgttcggttcgtggatgattataagattacaggaccaatgacaagtcaagatgttgtttctgctttgaacactgattcttctgatacagactcttgtgaagataatgaagatgttttactactctcatcttttgcacacagcgatgaaaaaaagccggaggaggataatagtaataacaattctgaagagaatagttctcttcttgtagctgctgcttctgaggtccaagtagaagttgcggtacacgaagatttctctacgtggcaacgtatcatccggcttgatgctttacgagcggattctgaatgggcaaattattctccatattcaacagcaatcacagaaagcaaagctcgcaggttagccgaatctgtcgggttaaaagactatgatcacttagaaagctgcaggctataccacgcagcacggttagttgcaattcttgaagcttatgctatgtatgatcctgagataggctactgtcaaggaatgagtgatctgttatctccaatcctcgctgtgatctcagaggatcacgaggctttctggtgctttgttggtttcatgaagaaagctcggcacaatttcaggcttgacgaagcagggattcaaagacagctaagcattgtatcaaagatcataaaaaataaagactctcagctttataaacacttggagaatcttcaagcagaagattgtagtttcgtttacaggatggtgcttgttatgtttaggagggagttgagttttgaacagacgctgtgtctctgggaagtgatgtgggctgatcaagctgccattagagctggagttgggaagtcgccatggagcagaatccggcaacaagcaccgccaacggatgatttgttgctctatgcaatcgcggcgttagtactacgtaggaaactgatcatacagaaatacagtagtatggatgagattgtggaagagtgtaatagcatggctggtcagcttaatgtctggaagcttcttgatgatgcccatcatcttgtcgtgacgcttcacgacaagattgaaactctttctcaatcacagagtatttgatgaagaagtcgatcaaagccagaaatgaagtgtttccactacacaaaagcccttgcactcgtctggctgcgttttctcaaggtttaaagtttgttgcggtttggttcttaccgttttcactcctctctttctttcttctttctttttgtttactcatcacacagagaaaacacaatactactatccttatcgcttttattgtagtactaatgaaaaagacaaggcaatattcttgttaaa

SEQ ID NO: 48863 - protein, 550 aa, Arabidopsis thaliana
  peptide (1)..(550): Ceres Seq. ID no. 12601692
  misc_feature (1)..(57): Pfam Name: Lipoprotein amino terminal region Pfam Description: Lipoprotein amino terminal region
  misc_feature (1)..(57): Pfam Name: Lipoprotein amino terminal region Pfam Description: Lipoprotein amino terminal region
  misc_feature (96)..(262): Homolog of NCBI NO: 15224288 NR Description: hypothetical protein; protein id: At2g43490.1
  misc_feature (178)..(542): Homolog of NCBI NO: 37536102 NR Description: putative GTPase activating protein
  misc_feature (1)..(29): Homolog of NCBI NO: 15229125 NR Description: GTPase activating -like protein; protein id:
  misc_feature (85)..(541): Homolog of NCBI NO: 15238237 NR Description: GTPase activator protein of Rab-like small
  misc_feature (50)..(542): Homolog of NCBI NO: 15238518 NR Description: GTPase activator-like protein of Rab-like small
  misc_feature (96)..(262): Homolog of NCBI NO: 15224288 NR Description: hypothetical protein; protein id: At2g43490.1
  misc_feature (1)..(29): Homolog of NCBI NO: 15229125 NR Description: GTPase activating -like protein; protein id:
  misc_feature (50)..(542): Homolog of NCBI NO: 15238518 NR Description: GTPase activator-like protein of Rab-like small
  misc_feature (1)..(550): Homolog of NCBI NO: 15238777 NR Description: GTPase activator protein of Rab-like small
  misc_feature (34)..(550): Homolog of NCBI NO: 9759196 NR Description: GTPase activator protein of Rab-like small
  misc_feature (1)..(29): Homolog of NCBI NO: 9759196 NR Description: GTPase activator protein of Rab-like small
  misc_feature (176)..(542): Homolog of NCBI NO: 15229125 NR Description: GTPase activating -like protein; protein id:
  misc_feature (22)..(230): Homolog of NCBI NO: 15229125 NR Description: GTPase activating -like protein; protein id:
  misc_feature (85)..(541): Homolog of NCBI NO: 15238237 NR Description: GTPase activator protein of Rab-like small
  misc_feature (178)..(542): Homolog of NCBI NO: 37536102 NR Description: putative GTPase activating protein
  misc_feature (22)..(230): Homolog of NCBI NO: 15229125 NR Description: GTPase activating -like protein; protein id:
  misc_feature (176)..(542): Homolog of NCBI NO: 15229125 NR Description: GTPase activating -like protein; protein id:
  misc_feature (1)..(29): Homolog of NCBI NO: 9759196 NR Description: GTPase activator protein of Rab-like small
  misc_feature (34)..(550): Homolog of NCBI NO: 9759196 NR Description: GTPase activator protein of Rab-like small
  misc_feature (1)..(550): Homolog of NCBI NO: 15238777 NR Description: GTPase activator protein of Rab-like small
MKALRRSYTSTSSGNSSSSSSLPSSSSSSLPSSSSSSPPSSNSNSYSNSNSSSSSSSWIHLRSVLFVANLSSPSSVTSSDRRRKSPWSRRKRKWALTPHQWRSLFTPEGKLRDGGVGFLKKVRSRGVDPSIRAEVWLFLLGVYDLNSTSEEREAVKTQKRKEYEKLQRRCQMLLKCGNGSTDNLEELPSDEANSQCVRFVDDYKITGPMTSQDVVSALNTDSSDTDSCEDNEDVLLLSSFAHSDEKKPEEDNSNNNSEENSSLLVAAASEVQVEVAVHEDFSTWQRIIRLDALRADSEWANYSPYSTAITESKARRLAESVGLKDYDHLESCRLYHAARLVAILEAYAMYDPEIGYCQGMSDLLSPILAVISEDHEAFWCFVGFMKKARHNFRLDEAGIQRQLSIVSKIIKNKDSQLYKHLENLQAEDCSFVYRMVLVMFRRELSFEQTLCLWEVMWADQAAIRAGVGKSPWSRIRQQAPPTDDLLLYAIAALVLRRKLIIQKYSSMDEIVEECNSMAGQLNVWKLLDDAHHLVVTLHDKIETLSQSQSI

SEQ ID NO: 48864 - protein, 379 aa, Arabidopsis thaliana
  peptide (1)..(379): Ceres Seq. ID no. 12601693
  misc_feature (167)..(287): Homolog of NCBI NO: 23296366 NR Description: unknown protein [Arabidopsis thaliana]
  misc_feature (168)..(287): Homolog of NCBI NO: 15224288 NR Description: hypothetical protein; protein id: At2g43490.1
  misc_feature (1)..(91): Homolog of NCBI NO: 15224288 NR Description: hypothetical protein; protein id: At2g43490.1
  misc_feature (7)..(371): Homolog of NCBI NO: 37536102 NR Description: putative GTPase activating protein
  misc_feature (1)..(370): Homolog of NCBI NO: 15238237 NR Description: GTPase activator protein of Rab-like small
  misc_feature (1)..(371): Homolog of NCBI NO: 15238518 NR Description: GTPase activator-like protein of Rab-like small
  misc_feature (1)..(59): Homolog of NCBI NO: 15229125 NR Description: GTPase activating -like protein; protein id:
  misc_feature (5)..(371): Homolog of NCBI NO: 15229125 NR Description: GTPase activating -like protein; protein id:
  misc_feature (1)..(379): Homolog of NCBI NO: 9759196 NR Description: GTPase activator protein of Rab-like small
  misc_feature (1)..(379): Homolog of NCBI NO: 15238777 NR Description: GTPase activator protein of Rab-like small
  misc_feature (167)..(287): Homolog of NCBI NO: 23296366 NR Description: unknown protein [Arabidopsis thaliana]
  misc_feature (168)..(287): Homolog of NCBI NO: 15224288 NR Description: hypothetical protein; protein id: At2g43490.1
  misc_feature (1)..(91): Homolog of NCBI NO: 15224288 NR Description: hypothetical protein; protein id: At2g43490.1
  misc_feature (7)..(371): Homolog of NCBI NO: 37536102 NR Description: putative GTPase activating protein
  misc_feature (1)..(370): Homolog of NCBI NO: 15238237 NR Description: GTPase activator protein of Rab-like small
  misc_feature (1)..(371): Homolog of NCBI NO: 15238518 NR Description: GTPase activator-like protein of Rab-like small
  misc_feature (1)..(59): Homolog of NCBI NO: 15229125 NR Description: GTPase activating -like protein; protein id:
  misc_feature (5)..(371): Homolog of NCBI NO: 15229125 NR Description: GTPase activating -like protein; protein id:
  misc_feature (1)..(379): Homolog of NCBI NO: 9759196 NR Description: GTPase activator protein of Rab-like small
  misc_feature (1)..(379): Homolog of NCBI NO: 15238777 NR Description: GTPase activator protein of Rab-like small
MLLKCGNGSTDNLEELPSDEANSQCVRFVDDYKITGPMTSQDVVSALNTDSSDTDSCEDNEDVLLLSSFAHSDEKKPEEDNSNNNSEENSSLLVAAASEVQVEVAVHEDFSTWQRIIRLDALRADSEWANYSPYSTAITESKARRLAESVGLKDYDHLESCRLYHAARLVAILEAYAMYDPEIGYCQGMSDLLSPILAVISEDHEAFWCFVGFMKKARHNFRLDEAGIQRQLSIVSKIIKNKDSQLYKHLENLQAEDCSFVYRMVLVMFRRELSFEQTLCLWEVMWADQAAIRAGVGKSPWSRIRQQAPPTDDLLLYAIAALVLRRKLIIQKYSSMDEIVEECNSMAGQLNVWKLLDDAHHLVVTLHDKIETLSQSQSI

SEQ ID NO: 48865 - protein, 342 aa, Arabidopsis thaliana
  peptide (1)..(342): Ceres Seq. ID no. 12601694
  misc_feature (130)..(250): Homolog of NCBI NO: 23296366 NR Description: unknown protein [Arabidopsis thaliana]
  misc_feature (131)..(250): Homolog of NCBI NO: 15224288 NR Description: hypothetical protein; protein id: At2g43490.1
  misc_feature (1)..(54): Homolog of NCBI NO: 15224288 NR Description: hypothetical protein; protein id: At2g43490.1
  misc_feature (1)..(334): Homolog of NCBI NO: 37536102 NR Description: putative GTPase activating protein
  misc_feature (1)..(333): Homolog of NCBI NO: 15238237 NR Description: GTPase activator protein of Rab-like small
  misc_feature (1)..(334): Homolog of NCBI NO: 15238518 NR Description: GTPase activator-like protein of Rab-like small
  misc_feature (1)..(22): Homolog of NCBI NO: 15229125 NR Description: GTPase activating -like protein; protein id:
  misc_feature (1)..(334): Homolog of NCBI NO: 15229125 NR Description: GTPase activating -like protein; protein id:
  misc_feature (1)..(342): Homolog of NCBI NO: 9759196 NR Description: GTPase activator protein of Rab-like small
  misc_feature (1)..(342): Homolog of NCBI NO: 15238777 NR Description: GTPase activator protein of Rab-like small
  misc_feature (130)..(250): Homolog of NCBI NO: 23296366 NR Description: unknown protein [Arabidopsis thaliana]
  misc_feature (131)..(250): Homolog of NCBI NO: 15224288 NR Description: hypothetical protein; protein id: At2g43490.1
  misc_feature (1)..(54): Homolog of NCBI NO: 15224288 NR Description: hypothetical protein; protein id: At2g43490.1
  misc_feature (1)..(334): Homolog of NCBI NO: 37536102 NR Description: putative GTPase activating protein
  misc_feature (1)..(333): Homolog of NCBI NO: 15238237 NR Description: GTPase activator protein of Rab-like small
  misc_feature (1)..(334): Homolog of NCBI NO: 15238518 NR Description: GTPase activator-like protein of Rab-like small
  misc_feature (1)..(22): Homolog of NCBI NO: 15229125 NR Description: GTPase activating -like protein; protein id:
  misc_feature (1)..(334): Homolog of NCBI NO: 15229125 NR Description: GTPase activating -like protein; protein id:
  misc_feature (1)..(342): Homolog of NCBI NO: 9759196 NR Description: GTPase activator protein of Rab-like small
  misc_feature (1)..(342): Homolog of NCBI NO: 15238777 NR Description: GTPase activator protein of Rab-like small
MTSQDVVSALNTDSSDTDSCEDNEDVLLLSSFAHSDEKKPEEDNSNNNSEENSSLLVAAASEVQVEVAVHEDFSTWQRIIRLDALRADSEWANYSPYSTAITESKARRLAESVGLKDYDHLESCRLYHAARLVAILEAYAMYDPEIGYCQGMSDLLSPILAVISEDHEAFWCFVGFMKKARHNFRLDEAGIQRQLSIVSKIIKNKDSQLYKHLENLQAEDCSFVYRMVLVMFRRELSFEQTLCLWEVMWADQAAIRAGVGKSPWSRIRQQAPPTDDLLLYAIAALVLRRKLIIQKYSSMDEIVEECNSMAGQLNVWKLLDDAHHLVVTLHDKIETLSQSQSI

SEQ ID NO: 48866 - DNA, 2144 bp, Arabidopsis thaliana; identical to SEQ ID NO: 48765
  misc_feature (1)..(2144): Ceres Seq. ID no. 12600977
  misc_feature: MA Experiment ID: 20000171 Result: Down-regulated in Transcription
  misc_feature: MA Experiment 20000171 PARAMETER Experiment Name: At_42deg_Heat_P Parameter: Age (day) Value: 14
  misc_feature: MA Experiment 20000171 PARAMETER Experiment Name: At_42deg_Heat_P Parameter: Organism Value: A. thaliana
  misc_feature: MA Experiment 20000171 PARAMETER Experiment Name: At_42deg_Heat_P Parameter: Plant Line Value: WS
  misc_feature: MA Experiment 20000171 PARAMETER Experiment Name: At_42deg_Heat_P Parameter: Temperature (deg C) Value: 42 vs. 22
  misc_feature: MA Experiment 20000171 PARAMETER Experiment Name: At_42deg_Heat_P Parameter: Timepoint (hr) Value: 1
  misc_feature: MA Experiment 20000171 PARAMETER Experiment Name: At_42deg_Heat_P Parameter: Tissue Value: Aerial
  misc_feature: MA Experiment ID: 20000180 Result: Up-regulated in Transcription
  misc_feature: MA Experiment 20000180 PARAMETER Experiment Name: At_Germinating_Seeds_P Parameter: Age (hr) Value: 24 vs. 0
  misc_feature: MA Experiment 20000180 PARAMETER Experiment Name: At_Germinating_Seeds_P Parameter: Tissue Value: Germinating Seeds
  misc_feature: MA Experiment ID: 20000234 Result: Down-regulated in Transcription
  misc_feature: MA Experiment 20000234 PARAMETER Experiment Name: At_Siliques_P Parameter: Age (day) Value: 21
  misc_feature: MA Experiment 20000234 PARAMETER Experiment Name: At_Siliques_P Parameter: Organism Value: A. thaliana
  misc_feature: MA Experiment 20000234 PARAMETER Experiment Name: At_Siliques_P Parameter: Plant Line Value: WS
  misc_feature: MA Experiment 20000234 PARAMETER Experiment Name: At_Siliques_P Parameter: Tissue Value: Less Than 5mm Siliques vs. Whole Plant
  misc_feature: MA Experiment ID: 20001247 Result: Up-regulated in Transcription
  misc_feature: MA Experiment 20001247 PARAMETER Experiment Name: At_Far-red-induction_P Parameter: Age (day) Value: 7
  misc_feature: MA Experiment 20001247 PARAMETER Experiment Name: At_Far-red-induction_P Parameter: Light Value: Far-red vs. White
  misc_feature: MA Experiment 20001247 PARAMETER Experiment Name: At_Far-red-induction_P Parameter: Organism Value: A. thaliana
  misc_feature: MA Experiment 20001247 PARAMETER Experiment Name: At_Far-red-induction_P Parameter: Plant Line Value: Columbia
  misc_feature: MA Experiment 20001247 PARAMETER Experiment Name: At_Far-red-induction_P Parameter: Timepoint (hr) Value: 1
  misc_feature: MA Experiment 20001247 PARAMETER Experiment Name: At_Far-red-induction_P Parameter: Tissue Value: Whole Plant
  misc_feature: MA Experiment ID: 20001911 Result: Down-regulated in Transcription
  misc_feature: MA Experiment 20001911 PARAMETER Experiment Name: At_Drought_Reproduction_P Parameter: Age (day) Value: 40
  misc_feature: MA Experiment 20001911 PARAMETER Experiment Name: At_Drought_Reproduction_P Parameter: Organism Value: A. thaliana
  misc_feature: MA Experiment 20001911 PARAMETER Experiment Name: At_Drought_Reproduction_P Parameter: Plant Line Value: WS
  misc_feature: MA Experiment 20001911 PARAMETER Experiment Name: At_Drought_Reproduction_P Parameter: Timepoint (day) Value: 10
  misc_feature: MA Experiment 20001911 PARAMETER Experiment Name: At_Drought_Reproduction_P Parameter: Tissue Value: Flowers
  misc_feature: MA Experiment 20001911 PARAMETER Experiment Name: At_Drought_Reproduction_P Parameter: Treatment Value: Drought vs. No Drought

SEQ ID NO: 48867 - protein, 477 aa, Arabidopsis thaliana; identical to SEQ ID NO: 48766
  peptide (1)..(477): Ceres Seq. ID no. 12600978
  misc_feature (59)..(473): Pfam Name: Protein phosphatase 2A regulatory B subunit (B56 Pfam Description: Protein phosphatase 2A regulatory B subunit
  misc_feature (59)..(473): Pfam Name: Protein phosphatase 2A regulatory B subunit (B56 Pfam Description: Protein phosphatase 2A regulatory B subunit
  misc_feature (23)..(474): Homolog of NCBI NO: 15233119 NR Description: B regulatory subunit of PP2A, putative; protein
  misc_feature (33)..(476): Homolog of NCBI NO: 21530784 NR Description: putative protein phosphatase 2A B'zeta subunit
  misc_feature (23)..(474): Homolog of NCBI NO: 20147343 NR Description: AT4g15410/dl3750w [Arabidopsis thaliana]
  misc_feature (23)..(474): Homolog of NCBI NO: 18414444 NR Description: Expressed protein
  misc_feature (1)..(474): Homolog of NCBI NO: 11994401 NR Description: protein phosphatase 2A B' regulatory subunit
  misc_feature (23)..(474): Homolog of NCBI NO: 15233119 NR Description: B regulatory subunit of PP2A, putative; protein
  misc_feature (23)..(474): Homolog of NCBI NO: 20147343 NR Description: AT4g15410/dl3750w [Arabidopsis thaliana]
  misc_feature (1)..(474): Homolog of NCBI NO: 11994401 NR Description: protein phosphatase 2A B' regulatory subunit
  misc_feature (1)..(477): Homolog of NCBI NO: 15230962 NR Description: protein phosphatase 2A regulatory subunit isoform
  misc_feature (1)..(471): Homolog of NCBI NO: 21537284 NR Description: B regulatory subunit of protein phosphatase 2A,
  misc_feature (1)..(471): Homolog of NCBI NO: 15222851 NR Description: B regulatory subunit of protein phosphatase 2A,
  misc_feature (1)..(474): Homolog of NCBI NO: 7485149 NR Description: hypothetical protein - Arabidopsis thaliana
  misc_feature (30)..(471): Homolog of NCBI NO: 15230961 NR Description: putative B regulatory subunit of protein
  misc_feature (23)..(474): Homolog of NCBI NO: 18414444 NR Description: Expressed protein
  misc_feature (33)..(476): Homolog of NCBI NO: 21530784 NR Description: putative protein phosphatase 2A B'zeta subunit
  misc_feature (30)..(471): Homolog of NCBI NO: 15230961 NR Description: putative B regulatory subunit of protein
  misc_feature (1)..(474): Homolog of NCBI NO: 7485149 NR Description: hypothetical protein - Arabidopsis thaliana
  misc_feature (1)..(471): Homolog of NCBI NO: 15222851 NR Description: B regulatory subunit of protein phosphatase 2A,
  misc_feature (1)..(471): Homolog of NCBI NO: 21537284 NR Description: B regulatory subunit of protein phosphatase 2A,
  misc_feature (1)..(477): Homolog of NCBI NO: 15230962 NR Description: protein phosphatase 2A regulatory subunit isoform

SEQ ID NO: 48868 - protein, 346 aa, Arabidopsis thaliana; identical to SEQ ID NO: 48767
  peptide (1)..(346): Ceres Seq. ID no. 12600979
  misc_feature (1)..(342): Pfam Name: Protein phosphatase 2A regulatory B subunit (B56 Pfam Description: Protein phosphatase 2A regulatory B subunit
  misc_feature (1)..(342): Pfam Name: Protein phosphatase 2A regulatory B subunit (B56 Pfam Description: Protein phosphatase 2A regulatory B subunit
  misc_feature (1)..(343): Homolog of NCBI NO: 15233119 NR Description: B regulatory subunit of PP2A, putative; protein
  misc_feature (1)..(345): Homolog of NCBI NO: 21530784 NR Description: putative protein phosphatase 2A B'zeta subunit
  misc_feature (1)..(343): Homolog of NCBI NO: 20147343 NR Description: AT4g15410/dl3750w [Arabidopsis thaliana]
  misc_feature (1)..(343): Homolog of NCBI NO: 18414444 NR Description: Expressed protein
  misc_feature (1)..(343): Homolog of NCBI NO: 11994401 NR Description: protein phosphatase 2A B' regulatory subunit
  misc_feature (1)..(343): Homolog of NCBI NO: 15233119 NR Description: B regulatory subunit of PP2A, putative; protein
  misc_feature (1)..(343): Homolog of NCBI NO: 20147343 NR Description: AT4g15410/dl3750w [Arabidopsis thaliana]
  misc_feature (1)..(343): Homolog of NCBI NO: 11994401 NR Description: protein phosphatase 2A B' regulatory subunit
  misc_feature (1)..(346): Homolog of NCBI NO: 15230962 NR Description: protein phosphatase 2A regulatory subunit isoform
  misc_feature (1)..(340): Homolog of NCBI NO: 21537284 NR Description: B regulatory subunit of protein phosphatase 2A,
  misc_feature (1)..(340): Homolog of NCBI NO: 15222851 NR Description: B regulatory subunit of protein phosphatase 2A,
  misc_feature (1)..(343): Homolog of NCBI NO: 7485149 NR Description: hypothetical protein - Arabidopsis thaliana
  misc_feature (1)..(340): Homolog of NCBI NO: 15230961 NR Description: putative B regulatory subunit of protein
  misc_feature (1)..(343): Homolog of NCBI NO: 18414444 NR Description: Expressed protein
  misc_feature (1)..(345): Homolog of NCBI NO: 21530784 NR Description: putative protein phosphatase 2A B'zeta subunit
  misc_feature (1)..(340): Homolog of NCBI NO: 15230961 NR Description: putative B regulatory subunit of protein
  misc_feature (1)..(343): Homolog of NCBI NO: 7485149 NR Description: hypothetical protein - Arabidopsis thaliana
  misc_feature (1)..(340): Homolog of NCBI NO: 15222851 NR Description: B regulatory subunit of protein phosphatase 2A,
  misc_feature (1)..(340): Homolog of NCBI NO: 21537284 NR Description: B regulatory subunit of protein phosphatase 2A,
  misc_feature (1)..(346): Homolog of NCBI NO: 15230962 NR Description: protein phosphatase 2A regulatory subunit isoform

SEQ ID NO: 48869 - protein, 249 aa, Arabidopsis thaliana; identical to SEQ ID NO: 48768
  peptide (1)..(249): Ceres Seq. ID no. 12600980
  misc_feature (1)..(245): Pfam Name: Protein phosphatase 2A regulatory B subunit (B56 Pfam Description: Protein phosphatase 2A regulatory B subunit
  misc_feature (1)..(245): Pfam Name: Protein phosphatase 2A regulatory B subunit (B56 Pfam Description: Protein phosphatase 2A regulatory B subunit
  misc_feature (1)..(246): Homolog of NCBI NO: 15233119 NR Description: B regulatory subunit of PP2A, putative; protein
  misc_feature (1)..(248): Homolog of NCBI NO: 21530784 NR Description: putative protein phosphatase 2A B'zeta subunit
  misc_feature (1)..(246): Homolog of NCBI NO: 20147343 NR Description: AT4g15410/dl3750w [Arabidopsis thaliana]
  misc_feature (1)..(246): Homolog of NCBI NO: 18414444 NR Description: Expressed protein
  misc_feature (1)..(246): Homolog of NCBI NO: 11994401 NR Description: protein phosphatase 2A B' regulatory subunit
  misc_feature (1)..(246): Homolog of NCBI NO: 15233119 NR Description: B regulatory subunit of PP2A, putative; protein
  misc_feature (1)..(246): Homolog of NCBI NO: 20147343 NR Description: AT4g15410/dl3750w [Arabidopsis thaliana]
  misc_feature (1)..(246): Homolog of NCBI NO: 11994401 NR Description: protein phosphatase 2A B' regulatory subunit
  misc_feature (1)..(249): Homolog of NCBI NO: 15230962 NR Description: protein phosphatase 2A regulatory subunit isoform
  misc_feature (1)..(243): Homolog of NCBI NO: 21537284 NR Description: B regulatory subunit of protein phosphatase 2A,
  misc_feature (1)..(243): Homolog of NCBI NO: 15222851 NR Description: B regulatory subunit of protein phosphatase 2A,
  misc_feature (1)..(246): Homolog of NCBI NO: 7485149 NR Description: hypothetical protein - Arabidopsis thaliana
  misc_feature (1)..(243): Homolog of NCBI NO: 15230961 NR Description: putative B regulatory subunit of protein
  misc_feature (1)..(246): Homolog of NCBI NO: 18414444 NR Description: Expressed protein
  misc_feature (1)..(248): Homolog of NCBI NO: 21530784 NR Description: putative protein phosphatase 2A B'zeta subunit
  misc_feature (1)..(243): Homolog of NCBI NO: 15230961 NR Description: putative B regulatory subunit of protein
  misc_feature (1)..(246): Homolog of NCBI NO: 7485149 NR Description: hypothetical protein - Arabidopsis thaliana
  misc_feature (1)..(243): Homolog of NCBI NO: 15222851 NR Description: B regulatory subunit of protein phosphatase 2A,
  misc_feature (1)..(243): Homolog of NCBI NO: 21537284 NR Description: B regulatory subunit of protein phosphatase 2A,
  misc_feature (1)..(249): Homolog of NCBI NO: 15230962 NR Description: protein phosphatase 2A regulatory subunit isoform

SEQ ID NO: 48870 - DNA, 1174 bp, Arabidopsis thaliana; identical to SEQ ID NO: 35211
  misc_feature (1)..(1174): Ceres Seq. ID no. 13591839
  misc_feature: MA Experiment ID: 108595 Result: Down-regulated in Transcription
  misc_feature: MA Experiment 108595 PARAMETER Experiment Name: At_Ler-pi_Ovule_cDNA_P Parameter: Plant Line Value: null
  misc_feature: MA Experiment ID: 20000113 Result: Up-regulated in Transcription
  misc_feature: MA Experiment 20000113 PARAMETER Experiment Name: At_42deg_Heat_cDNA_P Parameter: Temperature (deg C) Value: 42 vs. 22
  misc_feature: MA Experiment 20000113 PARAMETER Experiment Name: At_42deg_Heat_cDNA_P Parameter: Timepoint (hr) Value: 8
  misc_feature: MA Experiment 20000113 PARAMETER Experiment Name: At_42deg_Heat_cDNA_P Parameter: Tissue Value: Aerial
  misc_feature: MA Experiment ID: 20000173 Result: Up-regulated in Transcription
  misc_feature: MA Experiment 20000173 PARAMETER Experiment Name: At_42deg_Heat_P Parameter: Age (day) Value: 14
  misc_feature: MA Experiment 20000173 PARAMETER Experiment Name: At_42deg_Heat_P Parameter: Organism Value: A. thaliana
  misc_feature: MA Experiment 20000173 PARAMETER Experiment Name: At_42deg_Heat_P Parameter: Plant Line Value: WS
  misc_feature: MA Experiment 20000173 PARAMETER Experiment Name: At_42deg_Heat_P Parameter: Temperature (deg C) Value: 42 vs. 22
  misc_feature: MA Experiment 20000173 PARAMETER Experiment Name: At_42deg_Heat_P Parameter: Timepoint (hr) Value: 6
  misc_feature: MA Experiment 20000173 PARAMETER Experiment Name: At_42deg_Heat_P Parameter: Tissue Value: Aerial
  misc_feature: MA Experiment ID: 20000437 Result: Down-regulated in Transcription
  misc_feature: MA Experiment 20000437 PARAMETER Experiment Name: At_Drought_P Parameter: Age (day) Value: 8
  misc_feature: MA Experiment 20000437 PARAMETER Experiment Name: At_Drought_P Parameter: Organism Value: A. thaliana
  misc_feature: MA Experiment 20000437 PARAMETER Experiment Name: At_Drought_P Parameter: Plant Line Value: WS
  misc_feature: MA Experiment 20000437 PARAMETER Experiment Name: At_Drought_P Parameter: Timepoint (hr) Value: 24
  misc_feature: MA Experiment 20000437 PARAMETER Experiment Name: At_Drought_P Parameter: Tissue Value: Whole Plant
  misc_feature: MA Experiment 20000437 PARAMETER Experiment Name: At_Drought_P Parameter: Treatment Value: Drought vs. No Drought

SEQ ID NO: 48871 - protein, 287 aa, Arabidopsis thaliana; identical to SEQ ID NO: 35212
  peptide (1)..(287): Ceres Seq. ID no. 13591840
  misc_feature (17)..(224): Pfam Name: Peroxidase Pfam Description: Peroxidase
  misc_feature (17)..(224): Pfam Name: Peroxidase Pfam Description: Peroxidase
  misc_feature (2)..(286): Homolog of NCBI NO: 37030052 NR Description: putative peroxisome-bound ascorbate peroxidase
  misc_feature (2)..(286): Homolog of NCBI NO: 38344123 NR Description: OSJNBb0072N21.2 [Oryza sativa (japonica
  misc_feature (4)..(287): Homolog of NCBI NO: 4835909 NR Description: cytosolic ascorbate peroxidase [Mesembryanthemum
  misc_feature (1)..(287): Homolog of NCBI NO: 15080682 NR Description: peroxisome type ascorbate peroxidase
  misc_feature (1)..(287): Homolog of NCBI NO: 5442410 NR Description: ascorbate peroxidase [Zantedeschia aethiopica]
  misc_feature (2)..(286): Homolog of NCBI NO: 37030052 NR Description: putative peroxisome-bound ascorbate peroxidase
  misc_feature (4)..(287): Homolog of NCBI NO: 4835909 NR Description: cytosolic ascorbate peroxidase [Mesembryanthemum
  misc_feature (1)..(287): Homolog of NCBI NO: 5442410 NR Description: ascorbate peroxidase [Zantedeschia aethiopica]
  misc_feature (1)..(287): Homolog of NCBI NO: 15236239 NR Description: ascorbate peroxidase, putative (APX) [Arabidopsis
  misc_feature (1)..(287): Homolog of NCBI NO: 3288066 NR Description: ascorbate peroxidase [Arabidopsis thaliana]
  misc_feature (1)..(287): Homolog of NCBI NO: 7484726 NR Description: L-ascorbate peroxidase (EC 1.11.1.11),
  misc_feature (1)..(287): Homolog of NCBI NO: 17066705 NR Description: ascorbate peroxidase [Capsicum annuum]
  misc_feature (1)..(287): Homolog of NCBI NO: 15430584 NR Description: peroxisomal ascorbate peroxidase [Cucurbita cv.
  misc_feature (1)..(287): Homolog of NCBI NO: 15080682 NR Description: peroxisome type ascorbate peroxidase
  misc_feature (2)..(286): Homolog of NCBI NO: 38344123 NR Description: OSJNBb0072N21.2 [Oryza sativa (japonica
  misc_feature (1)..(287): Homolog of NCBI NO: 15430584 NR Description: peroxisomal ascorbate peroxidase [Cucurbita cv.
  misc_feature (1)..(287): Homolog of NCBI NO: 17066705 NR Description: ascorbate peroxidase [Capsicum annuum]
  misc_feature (1)..(287): Homolog of NCBI NO: 7484726 NR Description: L-ascorbate peroxidase (EC 1.11.1.11),
  misc_feature (1)..(287): Homolog of NCBI NO: 3288066 NR Description: ascorbate peroxidase [Arabidopsis thaliana]
  misc_feature (1)..(287): Homolog of NCBI NO: 15236239 NR Description: ascorbate peroxidase, putative (APX) [Arabidopsis

SEQ ID NO: 48872 - protein, 254 aa, Arabidopsis thaliana; identical to SEQ ID NO: 35213
  peptide (1)..(254): Ceres Seq. ID no. 13591841
  misc_feature (1)..(191): Pfam Name: Peroxidase Pfam Description: Peroxidase
  misc_feature (1)..(191): Pfam Name: Peroxidase Pfam Description: Peroxidase
  misc_feature (1)..(253): Homolog of NCBI NO: 37030052 NR Description: putative peroxisome-bound ascorbate peroxidase
  misc_feature (1)..(253): Homolog of NCBI NO: 38344123 NR Description: OSJNBb0072N21.2 [Oryza sativa (japonica
  misc_feature (1)..(254): Homolog of NCBI NO: 4835909 NR Description: cytosolic ascorbate peroxidase [Mesembryanthemum
  misc_feature (1)..(254): Homolog of NCBI NO: 15080682 NR Description: peroxisome type ascorbate peroxidase
  misc_feature (1)..(254): Homolog of NCBI NO: 5442410 NR Description: ascorbate peroxidase [Zantedeschia aethiopica]
  misc_feature (1)..(253): Homolog of NCBI NO: 37030052 NR Description: putative peroxisome-bound ascorbate peroxidase
  misc_feature (1)..(254): Homolog of NCBI NO: 4835909 NR Description: cytosolic ascorbate peroxidase [Mesembryanthemum
  misc_feature (1)..(254): Homolog of NCBI NO: 5442410 NR Description: ascorbate peroxidase [Zantedeschia aethiopica]
  misc_feature (1)..(254): Homolog of NCBI NO: 15236239 NR Description: ascorbate peroxidase, putative (APX) [Arabidopsis
  misc_feature (1)..(254): Homolog of NCBI NO: 3288066 NR Description: ascorbate peroxidase [Arabidopsis thaliana]
  misc_feature (1)..(254): Homolog of NCBI NO: 7484726 NR Description: L-ascorbate peroxidase (EC 1.11.1.11),
  misc_feature (1)..(254): Homolog of NCBI NO: 17066705 NR Description: ascorbate peroxidase [Capsicum annuum]
  misc_feature (1)..(254): Homolog of NCBI NO: 15430584 NR Description: peroxisomal ascorbate peroxidase [Cucurbita cv.
  misc_feature (1)..(254): Homolog of NCBI NO: 15080682 NR Description: peroxisome type ascorbate peroxidase
  misc_feature (1)..(253): Homolog of NCBI NO: 38344123 NR Description: OSJNBb0072N21.2 [Oryza sativa (japonica
  misc_feature (1)..(254): Homolog of NCBI NO: 15430584 NR Description: peroxisomal ascorbate peroxidase [Cucurbita cv.
  misc_feature (1)..(254): Homolog of NCBI NO: 17066705 NR Description: ascorbate peroxidase [Capsicum annuum]
  misc_feature (1)..(254): Homolog of NCBI NO: 7484726 NR Description: L-ascorbate peroxidase (EC 1.11.1.11),
  misc_feature (1)..(254): Homolog of NCBI NO: 3288066 NR Description: ascorbate peroxidase [Arabidopsis thaliana]
  misc_feature (1)..(254): Homolog of NCBI NO: 15236239 NR Description: ascorbate peroxidase, putative (APX) [Arabidopsis

SEQ ID NO: 48873 - DNA, 2690 bp, Arabidopsis thaliana
  misc_feature (1)..(2690): Ceres Seq. ID no. 15168828
  misc_feature: MA Experiment ID: 20000179 Result: Up-regulated in Transcription
  misc_feature: MA Experiment 20000179 PARAMETER Experiment Name: At_Germinating_Seeds_P Parameter: Age (hr) Value: 6 vs. 0
  misc_feature: MA Experiment 20000179 PARAMETER Experiment Name: At_Germinating_Seeds_P Parameter: Tissue Value: Germinating Seeds
  misc_feature: MA Experiment ID: 20000180 Result: Up-regulated in Transcription
  misc_feature: MA Experiment 20000180 PARAMETER Experiment Name: At_Germinating_Seeds_P Parameter: Age (hr) Value: 24 vs. 0
  misc_feature: MA Experiment 20000180 PARAMETER Experiment Name: At_Germinating_Seeds_P Parameter: Tissue Value: Germinating Seeds
  misc_feature: MA Experiment ID: 20000184 Result: Down-regulated in Transcription
  misc_feature: MA Experiment 20000184 PARAMETER Experiment Name: At_Shoots__P Parameter: Age (day) Value: 7
  misc_feature: MA Experiment 20000184 PARAMETER Experiment Name: At_Shoots__P Parameter: Tissue Value: Shoots vs. Whole Plant
  misc_feature: MA Experiment ID: 20000185 Result: Down-regulated in Transcription
  misc_feature: MA Experiment 20000185 PARAMETER Experiment Name: At_Roots__P Parameter: Age (day) Value: 7 vs. 21
  misc_feature: MA Experiment 20000185 PARAMETER Experiment Name: At_Roots__P Parameter: Organism Value: A. thaliana
  misc_feature: MA Experiment 20000185 PARAMETER Experiment Name: At_Roots__P Parameter: Tissue Value: Roots vs. Whole Plant
  misc_feature: MA Experiment ID: 20000227 Result: Down-regulated in Transcription
  misc_feature: MA Experiment 20000227 PARAMETER Experiment Name: At_Root-Tips-vs-Tops_P Parameter: Tissue Value: Root Tips vs. Root Tops
  misc_feature: MA Experiment ID: 20000235 Result: Down-regulated in Transcription
  misc_feature: MA Experiment 20000235 PARAMETER Experiment Name: At_Siliques_P Parameter: Age (day) Value: 21
  misc_feature: MA Experiment 20000235 PARAMETER Experiment Name: At_Siliques_P Parameter: Organism Value: A. thaliana
  misc_feature: MA Experiment 20000235 PARAMETER Experiment Name: At_Siliques_P Parameter: Plant Line Value: WS
  misc_feature: MA Experiment 20000235 PARAMETER Experiment Name: At_Siliques_P Parameter: Tissue Value: 5-10mm Siliques vs. Whole Plant
  misc_feature: MA Experiment ID: 20000264 Result: Up-regulated in Transcription
  misc_feature: MA Experiment 20000264 PARAMETER Experiment Name: At_Open_Flower_P Parameter: Age (day) Value: 21
  misc_feature: MA Experiment 20000264 PARAMETER Experiment Name: At_Open_Flower_P Parameter: Plant Line Value: WS
  misc_feature: MA Experiment 20000264 PARAMETER Experiment Name: At_Open_Flower_P Parameter: Tissue Value: Open Flower vs. Whole Plant
  misc_feature: MA Experiment ID: 20000438 Result: Down-regulated in Transcription
  misc_feature: MA Experiment 20000438 PARAMETER Experiment Name: At_Shoots__P Parameter: Age (day) Value: 14
  misc_feature: MA Experiment 20000438 PARAMETER Experiment Name: At_Shoots__P Parameter: Tissue Value: Shoots vs. Whole Plant
  misc_feature: MA Experiment ID: 20000439 Result: Down-regulated in Transcription
  misc_feature: MA Experiment 20000439 PARAMETER Experiment Name: At_Roots__P Parameter: Age (day) Value: 14 vs. 21
  misc_feature: MA Experiment 20000439 PARAMETER Experiment Name: At_Roots__P Parameter: Organism Value: A. thaliana
  misc_feature: MA Experiment 20000439 PARAMETER Experiment Name: At_Roots__P Parameter: Tissue Value: Roots vs. Whole Plant
  misc_feature: MA Experiment ID: 20000794 Result: Up-regulated in Transcription
  misc_feature: MA Experiment 20000794 PARAMETER Experiment Name: At_Petals_P Parameter: Age (day) Value: 23-25 days
  misc_feature: MA Experiment 20000794 PARAMETER Experiment Name: At_Petals_P Parameter: Plant Line Value: WS
  misc_feature: MA Experiment 20000794 PARAMETER Experiment Name: At_Petals_P Parameter: Tissue Value: Petals vs. Whole plant
  misc_feature: MA Experiment ID: 20001248 Result: Up-regulated in Transcription
  misc_feature: MA Experiment 20001248 PARAMETER Experiment Name: At_Far-red-induction_P Parameter: Age (day) Value: 7
  misc_feature: MA Experiment 20001248 PARAMETER Experiment Name: At_Far-red-induction_P Parameter: Light Value: Far-red vs. White
  misc_feature: MA Experiment 20001248 PARAMETER Experiment Name: At_Far-red-induction_P Parameter: Organism Value: A. thaliana
  misc_feature: MA Experiment 20001248 PARAMETER Experiment Name: At_Far-red-induction_P Parameter: Plant Line Value: Columbia
  misc_feature: MA Experiment 20001248 PARAMETER Experiment Name: At_Far-red-induction_P Parameter: Timepoint (hr) Value: 4
  misc_feature: MA Experiment 20001248 PARAMETER Experiment Name: At_Far-red-induction_P Parameter: Tissue Value: Whole Plant
  misc_feature: MA Experiment ID: 20001450 Result: Up-regulated in Transcription
  misc_feature: MA Experiment 20001450 PARAMETER Experiment Name: At_Far-red-induction_P Parameter: Age (day) Value: 7
  misc_feature: MA Experiment 20001450 PARAMETER Experiment Name: At_Far-red-induction_P Parameter: Light Value: Far-red vs. White
  misc_feature: MA Experiment 20001450 PARAMETER Experiment Name: At_Far-red-induction_P Parameter: Organism Value: A. thaliana
  misc_feature: MA Experiment 20001450 PARAMETER Experiment Name: At_Far-red-induction_P Parameter: Plant Line Value: Columbia
  misc_feature: MA Experiment 20001450 PARAMETER Experiment Name: At_Far-red-induction_P Parameter: Timepoint (hr) Value: 8
  misc_feature: MA Experiment 20001450 PARAMETER Experiment Name: At_Far-red-induction_P Parameter: Tissue Value: Whole Plant
  misc_feature: MA Experiment ID: 20001451 Result: Up-regulated in Transcription
  misc_feature: MA Experiment 20001451 PARAMETER Experiment Name: At_Far-red-induction_P Parameter: Age (day) Value: 7
  misc_feature: MA Experiment 20001451 PARAMETER Experiment Name: At_Far-red-induction_P Parameter: Light Value: Far-red vs. White
  misc_feature: MA Experiment 20001451 PARAMETER Experiment Name: At_Far-red-induction_P Parameter: Organism Value: A. thaliana
  misc_feature: MA Experiment 20001451 PARAMETER Experiment Name: At_Far-red-induction_P Parameter: Plant Line Value: Columbia
  misc_feature: MA Experiment 20001451 PARAMETER Experiment Name: At_Far-red-induction_P Parameter: Timepoint (hr) Value: 24
  misc_feature: MA Experiment 20001451 PARAMETER Experiment Name: At_Far-red-induction_P Parameter: Tissue Value: Whole Plant
  misc_feature: MA Experiment ID: 20001556 Result: Down-regulated in Transcription
  misc_feature: MA Experiment 20001556 PARAMETER Experiment Name: At_Drought_Soil_Dry_P Parameter: Age (day) Value: 26
  misc_feature: MA Experiment 20001556 PARAMETER Experiment Name: At_Drought_Soil_Dry_P Parameter: Organism Value: A. thaliana
  misc_feature: MA Experiment 20001556 PARAMETER Experiment Name: At_Drought_Soil_Dry_P Parameter: Plant Line Value: WS
  misc_feature: MA Experiment 20001556 PARAMETER Experiment Name: At_Drought_Soil_Dry_P Parameter: Post Timepoint (hr) Value: None
  misc_feature: MA Experiment 20001556 PARAMETER Experiment Name: At_Drought_Soil_Dry_P Parameter: Post-Treatment Value: None
  misc_feature: MA Experiment 20001556 PARAMETER Experiment Name: At_Drought_Soil_Dry_P Parameter: Timepoint (day) Value: 12
  misc_feature: MA Experiment 20001556 PARAMETER Experiment Name: At_Drought_Soil_Dry_P Parameter: Treatment Value: Drought vs. No Drought
  misc_feature: MA Experiment ID: 20001557 Result: Down-regulated in Transcription
  misc_feature: MA Experiment 20001557 PARAMETER Experiment Name: At_Drought_Soil_Dry_P Parameter: Age (day) Value: 27
  misc_feature: MA Experiment 20001557 PARAMETER Experiment Name: At_Drought_Soil_Dry_P Parameter: Organism Value: A. thaliana
  misc_feature: MA Experiment 20001557 PARAMETER Experiment Name: At_Drought_Soil_Dry_P Parameter: Plant Line Value: WS
  misc_feature: MA Experiment 20001557 PARAMETER Experiment Name: At_Drought_Soil_Dry_P Parameter: Post Timepoint (hr) Value: 3
  misc_feature: MA Experiment 20001557 PARAMETER Experiment Name: At_Drought_Soil_Dry_P Parameter: Post-Treatment Value: Re-Water vs. No Drought
  misc_feature: MA Experiment 20001557 PARAMETER Experiment Name: At_Drought_Soil_Dry_P Parameter: Timepoint (day) Value: 13
  misc_feature: MA Experiment 20001557 PARAMETER Experiment Name: At_Drought_Soil_Dry_P Parameter: Treatment Value: Drought vs. No Drought
  misc_feature: MA Experiment ID: 20001558 Result: Down-regulated in Transcription
  misc_feature: MA Experiment 20001558 PARAMETER Experiment Name: At_Drought_Soil_Dry_P Parameter: Age (day) Value: 27
  misc_feature: MA Experiment 20001558 PARAMETER Experiment Name: At_Drought_Soil_Dry_P Parameter: Organism Value: A. thaliana
  misc_feature: MA Experiment 20001558 PARAMETER Experiment Name: At_Drought_Soil_Dry_P Parameter: Plant Line Value: WS
  misc_feature: MA Experiment 20001558 PARAMETER Experiment Name: At_Drought_Soil_Dry_P Parameter: Post Timepoint (hr) Value: 6
  misc_feature: MA Experiment 20001558 PARAMETER Experiment Name: At_Drought_Soil_Dry_P Parameter: Post-Treatment Value: Re-Water vs. No Drought
  misc_feature: MA Experiment 20001558 PARAMETER Experiment Name: At_Drought_Soil_Dry_P Parameter: Timepoint (day) Value: 13
  misc_feature: MA Experiment 20001558 PARAMETER Experiment Name: At_Drought_Soil_Dry_P Parameter: Treatment Value: Drought vs. No Drought
  misc_feature: MA Experiment ID: 20001559 Result: Down-regulated in Transcription
  misc_feature: MA Experiment 20001559 PARAMETER Experiment Name: At_Drought_Soil_Dry_P Parameter: Age (day) Value: 28
  misc_feature: MA Experiment 20001559 PARAMETER Experiment Name: At_Drought_Soil_Dry_P Parameter: Organism Value: A. thaliana
  misc_feature: MA Experiment 20001559 PARAMETER Experiment Name: At_Drought_Soil_Dry_P Parameter: Plant Line Value: WS
  misc_feature: MA Experiment 20001559 PARAMETER Experiment Name: At_Drought_Soil_Dry_P Parameter: Post Timepoint (hr) Value: 29
  misc_feature: MA Experiment 20001559 PARAMETER Experiment Name: At_Drought_Soil_Dry_P Parameter: Post-Treatment Value: Re-Water vs. No Drought
  misc_feature: MA Experiment 20001559 PARAMETER Experiment Name: At_Drought_Soil_Dry_P Parameter: Timepoint (day) Value: 14
  misc_feature: MA Experiment 20001559 PARAMETER Experiment Name: At_Drought_Soil_Dry_P Parameter: Treatment Value: Drought vs. No Drought
  misc_feature: MA Experiment ID: 20001560 Result: Down-regulated in Transcription
  misc_feature: MA Experiment 20001560 PARAMETER Experiment Name: At_Drought_Soil_Dry_P Parameter: Age (day) Value: 28
  misc_feature: MA Experiment 20001560 PARAMETER Experiment Name: At_Drought_Soil_Dry_P Parameter: Organism Value: A. thaliana
  misc_feature: MA Experiment 20001560 PARAMETER Experiment Name: At_Drought_Soil_Dry_P Parameter: Plant Line Value: WS
  misc_feature: MA Experiment 20001560 PARAMETER Experiment Name: At_Drought_Soil_Dry_P Parameter: Post Timepoint (hr) Value: None
  misc_feature: MA Experiment 20001560 PARAMETER Experiment Name: At_Drought_Soil_Dry_P Parameter: Post-Treatment Value: None
  misc_feature: MA Experiment 20001560 PARAMETER Experiment Name: At_Drought_Soil_Dry_P Parameter: Timepoint (day) Value: 14
  misc_feature: MA Experiment 20001560 PARAMETER Experiment Name: At_Drought_Soil_Dry_P Parameter: Treatment Value: Drought vs. No Drought
gaaaaatccttagatcattttttttttgttatctttgtttcgtttttctggtagaagagagaagaaggagagacgaattggcagctaagcgattctctctctttctctctttctcttctcgtgtaatcttttggtgttcttgaaaccactttttttttgttaattcctctgtttccttggaattgttttctgcttttttaagaagaaaaaaacgatgaatgtggtgcggagattaacgagtattgcctctggacgtaatttcgtttcttctgataacgtaggagaaactgagacgccgagatcaaagcctaaccagaatcgtgaagaaacagagtctacggaaactacgtcgtacgagaaagattctgtctcttcctcagagaactctgatcatttaccaaaggaaatccgtgaggtgggacttggagatgacaaggatatggactgtggaatcatcaagggaaatggaacagaatctggacggattattaccaccaaaaagaagggtttgaatgatcaaaaagacaagacaatctcttacagagctgaacatgtaattggcactggctcattcggtgttgtctttcaggctaagtgcttagagacggaagaaaaagtagcaataaagaaagtgttacaggacaagagatacaaaaacagagaacttcagatcatgcgaatgcttgatcatcctaatgtcgttgagctcaagcattctttcttttccacgactgagaaagacgagctttatcttaaccttgttcttgagtatgtacccgagactatttaccgcgcttccagatcttacaccaagatgaatcagcatatgcctttgatttatattcagctctacacctatcagatttgccgtgctatgaattatctgcatcaagtggttggagtgtgtcaccgtgacattaagccgcagaatctgttggtcaataatgttacgcatgaagtaaagatatgcgattttgggagcgccaaaatgctgattccaggagaaccaaatatatcttacatatgctcaaggtattacagagctcctgaactcatatttggagcaaccgaatacacaagtgcgatcgatatgtggtctgtaggttgtgtcatggctgagctttttcttggacatcctctattccctggagaaaccagtgttgatcaattggtggagatcattaagattttagggacaccagcaagagaagagataaagaacatgaatcctcgttacaatgattttaagttccctcagatcaaagctcagccgtggcacaagattttccggagacaggtatctccagaagcaatggatcttgcctctagattgctccagtattcaccaaacctgagatgcacagcgcttgaagcatgtgcacacccattcttcgatgatctgagagacccgagagcatccttgcctaatggaagagcacttcctccattgtttgatttcacagctcaagaacttgctggggcatctgttgaactgcgtcatcgcttaatacctgagcatgcaaggaaatgaccatttgggttaatggctgcttctctacgcagatgttgatatataaatctttttttattttgagagtttcttgtgaacaagtatagcattgtgctggttatgaaccctcactgacctctgcaaccacatcgactagcagtttgaaagtgtataattgtaagtttgtaactttgtagctttcattgttgcagacagaaatgcagaattttccgagttttccttctattgcaaatgttaccaatagtctccgcaagaacactttccatctctaaagtgatgaaagcagttagaatctcttaagatgatatgccgaagatatactcttgatatatacttcattgcactgtggcaatccccacagacgcgaaggttcttgatgatccggattggagctccagatggtacaacaagtagaccaaacgcaacagctaatttctcactatggtaagccaaacctagctccttcccttccttatctaagtcatggagagcaaaactcatatccgcgaaataaccagcctctttgatcaaaagcatcatttcatcaaccttggaatatatctcaaccattctcggatgtcttctatcttcagacataaagctatgaactttacctttctcttcaacccaactgcaaccaggttctttgcttatattacgagatttcatcaatctacgaacatttgcagcttcgtcttgtcttcccgctgcagaatacatgtttgataactgaacataaggaacagcattgtttggttccaattccataagagttttcgctgctctttccccgttttctatattcccatgcttcctacttgcagccaaaatcgctttccatacagtagcatctggttcaacctccatttgatgcagcaattgctctacttttacgaaatcaccagatctaccaaagagatcaatcatacaggcatagtgttccggtcctggtgtgattccataaactgttctcatcgaatcaaagtagcgttgagcatcttctaagagacctgcatgactgcaagcaaatagtaacccgataaaggtaatgtaatctggtgttatgccactgcctatcatcaaatcgtatgactgtagtgagtccttggctctaccgttttttgcgtaacccacaataagacaagtccatgttattaag

SEQ ID NO: 48874 - protein, 438 aa, Arabidopsis thaliana
  peptide (1)..(438): Ceres Seq. ID no. 15168829
  misc_feature (109)..(393): Pfam Name: Protein kinase domain Pfam Description: Protein kinase domain
  misc_feature (23)..(438): Homolog of NCBI NO: 7434276 NR Description: shaggy protein kinase (EC 2.7.1.-) 59
  misc_feature (20)..(438): Homolog of NCBI NO: 3702608 NR Description: shaggy kinase 7 [Petunia x hybrida]
  misc_feature (22)..(438): Homolog of NCBI NO: 7434282 NR Description: shaggy protein kinase (EC 2.7.1.-) 6 - common
  misc_feature (1)..(38): Homolog of NCBI NO: 10185114 NR Description: wound-induced GSK-3-like protein [Medicago sativa]
  misc_feature (40)..(437): Homolog of NCBI NO: 10185114 NR Description: wound-induced GSK-3-like protein [Medicago sativa]
  misc_feature (1)..(74): Homolog of NCBI NO: 11132756 NR Description: Shaggy-related protein kinase theta (ASK-theta)
  misc_feature (30)..(437): Homolog of NCBI NO: 11132756 NR Description: Shaggy-related protein kinase theta (ASK-theta)
  misc_feature (1)..(64): Homolog of NCBI NO: 15236918 NR Description: Shaggy related protein kinase tetha [Arabidopsis
  misc_feature (40)..(437): Homolog of NCBI NO: 15236918 NR Description: Shaggy related protein kinase tetha [Arabidopsis
  misc_feature (1)..(438): Homolog of NCBI NO: 15233049 NR Description: shaggy-related protein kinase beta [Arabidopsis
MNVVRRLTSIASGRNFVSSDNVGETETPRSKPNQNREETESTETTSYEKDSVSSSENSDHLPKEIREVGLGDDKDMDCGIIKGNGTESGRIITTKKKGLNDQKDKTISYRAEHVIGTGSFGVVFQAKCLETEEKVAIKKVLQDKRYKNRELQIMRMLDHPNVVELKHSFFSTTEKDELYLNLVLEYVPETIYRASRSYTKMNQHMPLIYIQLYTYQICRAMNYLHQVVGVCHRDIKPQNLLVNNVTHEVKICDFGSAKMLIPGEPNISYICSRYYRAPELIFGATEYTSAIDMWSVGCVMAELFLGHPLFPGETSVDQLVEIIKILGTPAREEIKNMNPRYNDFKFPQIKAQPWHKIFRRQVSPEAMDLASRLLQYSPNLRCTALEACAHPFFDDLRDPRASLPNGRALPPLFDFTAQELAGASVELRHRLIPEHARK

SEQ ID NO: 48875 - protein, 363 aa, Arabidopsis thaliana; identical to SEQ ID NO: 47675
  peptide (1)..(363): Ceres Seq. ID no. 15168830
  misc_feature (34)..(318): Pfam Name: Protein kinase domain Pfam Description: Protein kinase domain
  misc_feature (1)..(363): Homolog of NCBI NO: 2911533 NR Description: Petunia Shaggy kinase 6 [Petunia x hybrida]
  misc_feature (1)..(363): Homolog of NCBI NO: 3236117 NR Description: shaggy kinase 6 [Petunia x hybrida]
  misc_feature (1)..(363): Homolog of NCBI NO: 7434277 NR Description: shaggy protein kinase (EC 2.7.1.-) 91
  misc_feature (1)..(363): Homolog of NCBI NO: 7434276 NR Description: shaggy protein kinase (EC 2.7.1.-) 59
  misc_feature (1)..(363): Homolog of NCBI NO: 3702608 NR Description: shaggy kinase 7 [Petunia x hybrida]
  misc_feature (1)..(363): Homolog of NCBI NO: 7434282 NR Description: shaggy protein kinase (EC 2.7.1.-) 6 - common
  misc_feature (1)..(362): Homolog of NCBI NO: 10185114 NR Description: wound-induced GSK-3-like protein [Medicago sativa]
  misc_feature (1)..(362): Homolog of NCBI NO: 11132756 NR Description: Shaggy-related protein kinase theta (ASK-theta)
  misc_feature (1)..(362): Homolog of NCBI NO: 15236918 NR Description: Shaggy related protein kinase tetha [Arabidopsis
  misc_feature (1)..(363): Homolog of NCBI NO: 15233049 NR Description: shaggy-related protein kinase beta [Arabidopsis

SEQ ID NO: 48876 - protein, 285 aa, Arabidopsis thaliana; identical to SEQ ID NO: 47676
  peptide (1)..(285): Ceres Seq. ID no. 15168831
  misc_feature (1)..(240): Pfam Name: Protein kinase domain Pfam Description: Protein kinase domain
  misc_feature (1)..(285): Homolog of NCBI NO: 2911533 NR Description: Petunia Shaggy kinase 6 [Petunia x hybrida]
  misc_feature (1)..(285): Homolog of NCBI NO: 3236117 NR Description: shaggy kinase 6 [Petunia x hybrida]
  misc_feature (1)..(285): Homolog of NCBI NO: 7434277 NR Description: shaggy protein kinase (EC 2.7.1.-) 91
  misc_feature (1)..(285): Homolog of NCBI NO: 7434276 NR Description: shaggy protein kinase (EC 2.7.1.-) 59
  misc_feature (1)..(285): Homolog of NCBI NO: 3702608 NR Description: shaggy kinase 7 [Petunia x hybrida]
  misc_feature (1)..(285): Homolog of NCBI NO: 7434282 NR Description: shaggy protein kinase (EC 2.7.1.-) 6 - common
  misc_feature (1)..(284): Homolog of NCBI NO: 10185114 NR Description: wound-induced GSK-3-like protein [Medicago sativa]
  misc_feature (1)..(284): Homolog of NCBI NO: 11132756 NR Description: Shaggy-related protein kinase theta (ASK-theta)
  misc_feature (1)..(284): Homolog of NCBI NO: 15236918 NR Description: Shaggy related protein kinase tetha [Arabidopsis
  misc_feature (1)..(285): Homolog of NCBI NO: 15233049 NR Description: shaggy-related protein kinase beta [Arabidopsis

SEQ ID NO: 48877 - DNA, 1206 bp, Arabidopsis thaliana
  misc_feature (1)..(1206): Ceres Seq. ID no. 12601102
  misc_feature: MA Experiment ID: 20000234 Result: Down-regulated in Transcription
  misc_feature: MA Experiment 20000234 PARAMETER Experiment Name: At_Siliques_P Parameter: Age (day) Value: 21
  misc_feature: MA Experiment 20000234 PARAMETER Experiment Name: At_Siliques_P Parameter: Organism Value: A. thaliana
  misc_feature: MA Experiment 20000234 PARAMETER Experiment Name: At_Siliques_P Parameter: Plant Line Value: WS
  misc_feature: MA Experiment 20000234 PARAMETER Experiment Name: At_Siliques_P Parameter: Tissue Value: Less Than 5mm Siliques vs. Whole Plant
  misc_feature: MA Experiment ID: 20000264 Result: Down-regulated in Transcription
  misc_feature: MA Experiment 20000264 PARAMETER Experiment Name: At_Open_Flower_P Parameter: Age (day) Value: 21
  misc_feature: MA Experiment 20000264 PARAMETER Experiment Name: At_Open_Flower_P Parameter: Plant Line Value: WS
  misc_feature: MA Experiment 20000264 PARAMETER Experiment Name: At_Open_Flower_P Parameter: Tissue Value: Open Flower vs. Whole Plant
  misc_feature: MA Experiment ID: 20000265 Result: Down-regulated in Transcription
  misc_feature: MA Experiment 20000265 PARAMETER Experiment Name: At_Open_Flower_P Parameter: Age (day) Value: 21
  misc_feature: MA Experiment 20000265 PARAMETER Experiment Name: At_Open_Flower_P Parameter: Plant Line Value: WS
  misc_feature: MA Experiment 20000265 PARAMETER Experiment Name: At_Open_Flower_P Parameter: Tissue Value: Closed Flower vs. Whole Plant
  misc_feature: MA Experiment ID: 20000436 Result: Up-regulated in Transcription
  misc_feature: MA Experiment 20000436 PARAMETER Experiment Name: At_Drought_P Parameter: Age (day) Value: 7
  misc_feature: MA Experiment 20000436 PARAMETER Experiment Name: At_Drought_P Parameter: Organism Value: A. thaliana
  misc_feature: MA Experiment 20000436 PARAMETER Experiment Name: At_Drought_P Parameter: Plant Line Value: WS
  misc_feature: MA Experiment 20000436 PARAMETER Experiment Name: At_Drought_P Parameter: Timepoint (hr) Value: 12
  misc_feature: MA Experiment 20000436 PARAMETER Experiment Name: At_Drought_P Parameter: Tissue Value: Whole Plant
  misc_feature: MA Experiment 20000436 PARAMETER Experiment Name: At_Drought_P Parameter: Treatment Value: Drought vs. No Drought
  misc_feature: MA Experiment ID: 20000451 Result: Down-regulated in Transcription
  misc_feature: MA Experiment 20000451 PARAMETER Experiment Name: At_CS6879_Shoots-Roots_P Parameter: Age (day) Value: 14
  misc_feature: MA Experiment 20000451 PARAMETER Experiment Name: At_CS6879_Shoots-Roots_P Parameter: Organism Value: A. thaliana
  misc_feature: MA Experiment 20000451 PARAMETER Experiment Name: At_CS6879_Shoots-Roots_P Parameter: Plant Line Value: CS6879 vs. WS
  misc_feature: MA Experiment 20000451 PARAMETER Experiment Name: At_CS6879_Shoots-Roots_P Parameter: Tissue Value: Roots
  misc_feature: MA Experiment ID: 20000452 Result: Down-regulated in Transcription
  misc_feature: MA Experiment 20000452 PARAMETER Experiment Name: At_CS6879_Shoots-Roots_P Parameter: Age (day) Value: 14
  misc_feature: MA Experiment 20000452 PARAMETER Experiment Name: At_CS6879_Shoots-Roots_P Parameter: Organism Value: A. thaliana
  misc_feature: MA Experiment 20000452 PARAMETER Experiment Name: At_CS6879_Shoots-Roots_P Parameter: Plant Line Value: CS6879 vs. WS
  misc_feature: MA Experiment 20000452 PARAMETER Experiment Name: At_CS6879_Shoots-Roots_P Parameter: Tissue Value: Shoots
  misc_feature: MA Experiment ID: 20000495 Result: Up-regulated in Transcription
  misc_feature: MA Experiment 20000495 PARAMETER Experiment Name: At_Guard_Cells_P Parameter: Harvest Date Value: 8/2/2002
  misc_feature: MA Experiment 20000495 PARAMETER Experiment Name: At_Guard_Cells_P Parameter: Organism Value: A. thaliana
  misc_feature: MA Experiment 20000495 PARAMETER Experiment Name: At_Guard_Cells_P Parameter: Tissue Value: Guard Cells vs. Leaves
  misc_feature: MA Experiment ID: 20000496 Result: Up-regulated in Transcription
  misc_feature: MA Experiment 20000496 PARAMETER Experiment Name: At_Guard_Cells_P Parameter: Harvest Date Value: 7/19/2002
  misc_feature: MA Experiment 20000496 PARAMETER Experiment Name: At_Guard_Cells_P Parameter: Organism Value: Canola
  misc_feature: MA Experiment 20000496 PARAMETER Experiment Name: At_Guard_Cells_P Parameter: Tissue Value: Guard Cells vs. Leaves
  misc_feature: MA Experiment ID: 20001248 Result: Up-regulated in Transcription
  misc_feature: MA Experiment 20001248 PARAMETER Experiment Name: At_Far-red-induction_P Parameter: Age (day) Value: 7
  misc_feature: MA Experiment 20001248 PARAMETER Experiment Name: At_Far-red-induction_P Parameter: Light Value: Far-red vs. White
  misc_feature: MA Experiment 20001248 PARAMETER Experiment Name: At_Far-red-induction_P Parameter: Organism Value: A. thaliana
  misc_feature: MA Experiment 20001248 PARAMETER Experiment Name: At_Far-red-induction_P Parameter: Plant Line Value: Columbia
  misc_feature: MA Experiment 20001248 PARAMETER Experiment Name: At_Far-red-induction_P Parameter: Timepoint (hr) Value: 4
  misc_feature: MA Experiment 20001248 PARAMETER Experiment Name: At_Far-red-induction_P Parameter: Tissue Value: Whole Plant
  misc_feature: MA Experiment ID: 20001450 Result: Up-regulated in Transcription
  misc_feature: MA Experiment 20001450 PARAMETER Experiment Name: At_Far-red-induction_P Parameter: Age (day) Value: 7
  misc_feature: MA Experiment 20001450 PARAMETER Experiment Name: At_Far-red-induction_P Parameter: Light Value: Far-red vs. White
  misc_feature: MA Experiment 20001450 PARAMETER Experiment Name: At_Far-red-induction_P Parameter: Organism Value: A. thaliana
  misc_feature: MA Experiment 20001450 PARAMETER Experiment Name: At_Far-red-induction_P Parameter: Plant Line Value: Columbia
  misc_feature: MA Experiment 20001450 PARAMETER Experiment Name: At_Far-red-induction_P Parameter: Timepoint (hr) Value: 8
  misc_feature: MA Experiment 20001450 PARAMETER Experiment Name: At_Far-red-induction_P Parameter: Tissue Value: Whole Plant
  misc_feature: MA Experiment ID: 20001451 Result: Up-regulated in Transcription
  misc_feature: MA Experiment 20001451 PARAMETER Experiment Name: At_Far-red-induction_P Parameter: Age (day) Value: 7
  misc_feature: MA Experiment 20001451 PARAMETER Experiment Name: At_Far-red-induction_P Parameter: Light Value: Far-red vs. White
  misc_feature: MA Experiment 20001451 PARAMETER Experiment Name: At_Far-red-induction_P Parameter: Organism Value: A. thaliana
  misc_feature: MA Experiment 20001451 PARAMETER Experiment Name: At_Far-red-induction_P Parameter: Plant Line Value: Columbia
  misc_feature: MA Experiment 20001451 PARAMETER Experiment Name: At_Far-red-induction_P Parameter: Timepoint (hr) Value: 24
  misc_feature: MA Experiment 20001451 PARAMETER Experiment Name: At_Far-red-induction_P Parameter: Tissue Value: Whole Plant
  misc_feature: MA Experiment ID: 20001558 Result: Down-regulated in Transcription
  misc_feature: MA Experiment 20001558 PARAMETER Experiment Name: At_Drought_Soil_Dry_P Parameter: Age (day) Value: 27
  misc_feature: MA Experiment 20001558 PARAMETER Experiment Name: At_Drought_Soil_Dry_P Parameter: Organism Value: A. thaliana
  misc_feature: MA Experiment 20001558 PARAMETER Experiment Name: At_Drought_Soil_Dry_P Parameter: Plant Line Value: WS
  misc_feature: MA Experiment 20001558 PARAMETER Experiment Name: At_Drought_Soil_Dry_P Parameter: Post Timepoint (hr) Value: 6
  misc_feature: MA Experiment 20001558 PARAMETER Experiment Name: At_Drought_Soil_Dry_P Parameter: Post-Treatment Value: Re-Water vs. No Drought
  misc_feature: MA Experiment 20001558 PARAMETER Experiment Name: At_Drought_Soil_Dry_P Parameter: Timepoint (day) Value: 13
  misc_feature: MA Experiment 20001558 PARAMETER Experiment Name: At_Drought_Soil_Dry_P Parameter: Treatment Value: Drought vs. No Drought
  misc_feature: MA Experiment ID: 20001910 Result: Up-regulated in Transcription
  misc_feature: MA Experiment 20001910 PARAMETER Experiment Name: At_Drought_Reproduction_P Parameter: Age (day) Value: 37
  misc_feature: MA Experiment 20001910 PARAMETER Experiment Name: At_Drought_Reproduction_P Parameter: Organism Value: A. thaliana
  misc_feature: MA Experiment 20001910 PARAMETER Experiment Name: At_Drought_Reproduction_P Parameter: Plant Line Value: WS
  misc_feature: MA Experiment 20001910 PARAMETER Experiment Name: At_Drought_Reproduction_P Parameter: Timepoint (day) Value: 7
  misc_feature: MA Experiment 20001910 PARAMETER Experiment Name: At_Drought_Reproduction_P Parameter: Tissue Value: Flowers
  misc_feature: MA Experiment 20001910 PARAMETER Experiment Name: At_Drought_Reproduction_P Parameter: Treatment Value: Drought vs. No Drought
  misc_feature: MA Experiment ID: 20001911 Result: Up-regulated in Transcription
  misc_feature: MA Experiment 20001911 PARAMETER Experiment Name: At_Drought_Reproduction_P Parameter: Age (day) Value: 40
  misc_feature: MA Experiment 20001911 PARAMETER Experiment Name: At_Drought_Reproduction_P Parameter: Organism Value: A. thaliana
  misc_feature: MA Experiment 20001911 PARAMETER Experiment Name: At_Drought_Reproduction_P Parameter: Plant Line Value: WS
  misc_feature: MA Experiment 20001911 PARAMETER Experiment Name: At_Drought_Reproduction_P Parameter: Timepoint (day) Value: 10
  misc_feature: MA Experiment 20001911 PARAMETER Experiment Name: At_Drought_Reproduction_P Parameter: Tissue Value: Flowers
  misc_feature: MA Experiment 20001911 PARAMETER Experiment Name: At_Drought_Reproduction_P Parameter: Treatment Value: Drought vs. No Drought
gaaaagtctgcttcttcttcgccgtctctgtgcggcctcttcctcttcctcttctaaacaatgacggaggaagaggtagctatggaagtggaagctctagaagcagtttacagcgaagactgcgttatactggattcgtatcctcctcatcttcacctccatatcaagccccgtaccgccnaaatctcttctcagcagtatgtgngaagccgttgttagattccaagcaggttctaagtatccagatgaaccacctcggattagtctgattgaatccnagggtcttgacgagcaaaggcaaaagcttttgattggcatagtgcaagagaaagcttctcaactatcatcttctttaatgcttgtagaactttgtgaggaagcagtggagaggctcacaattatgaatcacccggagggagattgtccactgtgtttgtatccgttattccctgaggatggcgggagtaaacaaatgccatttatgaagctgatgtcttgttttcattgtttccactgtgagtgcatcattaggtggtggaattggcttcatgcacaggaagaggctgattcgaaatctggtgacactttacatatgcgtagaggatcaactgctcgagaaggtaattctggatcagcagataaaagcttgggaaactgtccagtgtgccgcaaaatttttcactcgagtgacattgaacatgttcttgacttagttggtgctcaatcatctctacaggactctagtttaataccaggcaaggaccaagacccgctgctccagtcagattcagagaacataagaagagagcggtttgagtctattctaaagacgcaggaagaaaagggtggtttggttcaaccgaagaaaaacatatcggtggtgcccggtatgtatcttcctccaccagctcatgcatcaacgtcacgaaacgaagaagaagaagctggtgaaagccaagaacaaggagaagaggaacccaaagaagctgaatcagagacaaactctagcagctccaccaacaggagaggtcgagggagatggagaggcagaggcagaagcagaggccggggacctactgtcaatgaaaggaagccgaattcgcaagatccaagaaaaccgacgagacaatgggtgcagagagccagagaaggagacaaataatttatgctaatcttgtgtgatacatcaaactcaaactcaaacac

SEQ ID NO: 48878 - protein, 320 aa, Arabidopsis thaliana
  peptide (1)..(320): Ceres Seq. ID no. 12601103
  misc_feature (3)..(63): Pfam Name: RWD domain Pfam Description: RWD domain
  misc_feature (9)..(132): Homolog of NCBI NO: 34876827 NR Description: similar to RING finger protein 25 (RING finger
  misc_feature (9)..(242): Homolog of NCBI NO: 34878787 NR Description: ring finger protein 25; ring finger protein AO7
  misc_feature (9)..(242): Homolog of NCBI NO: 10436180 NR Description: unnamed protein product [Homo sapiens]
  misc_feature (1)..(292): Homolog of NCBI NO: 33416385 NR Description: Unknown (protein for MGC:66260) [Danio rerio]
  misc_feature (68)..(320): Homolog of NCBI NO: 17065268 NR Description: putative protein [Arabidopsis thaliana]
  misc_feature (3)..(63): Homolog of NCBI NO: 11357688 NR Description: hypothetical protein F27H5.90 - Arabidopsis
  misc_feature (119)..(320): Homolog of NCBI NO: 11357688 NR Description: hypothetical protein F27H5.90 - Arabidopsis
  misc_feature (3)..(320): Homolog of NCBI NO: 30695166 NR Description: expressed protein [Arabidopsis thaliana]
  misc_feature (2)..(2): Xaa is any aa, unknown or other
  misc_feature (27)..(27): Xaa is any aa, unknown or other
MXEAVVRFQAGSKYPDEPPRISLIESXGLDEQRQKLLIGIVQEKASQLSSSLMLVELCEEAVERLTIMNHPEGDCPLCLYPLFPEDGGSKQMPFMKLMSCFHCFHCECIIRWWNWLHAQEEADSKSGDTLHMRRGSTAREGNSGSADKSLGNCPVCRKIFHSSDIEHVLDLVGAQSSLQDSSLIPGKDQDPLLQSDSENIRRERFESILKTQEEKGGLVQPKKNISVVPGMYLPPPAHASTSRNEEEEAGESQEQGEEEPKEAESETNSSSSTNRRGRGRWRGRGRSRGRGPTVNERKPNSQDPRKPTRQWVQRAREGDK

SEQ ID NO: 48879 - protein, 268 aa, Arabidopsis thaliana
  peptide (1)..(268): Ceres Seq. ID no. 12601104
  misc_feature (1)..(80): Homolog of NCBI NO: 34876827 NR Description: similar to RING finger protein 25 (RING finger
  misc_feature (1)..(190): Homolog of NCBI NO: 34878787 NR Description: ring finger protein 25; ring finger protein AO7
  misc_feature (1)..(190): Homolog of NCBI NO: 10436180 NR Description: unnamed protein product [Homo sapiens]
  misc_feature (1)..(240): Homolog of NCBI NO: 33416385 NR Description: Unknown (protein for MGC:66260) [Danio rerio]
  misc_feature (16)..(268): Homolog of NCBI NO: 17065268 NR Description: putative protein [Arabidopsis thaliana]
  misc_feature (1)..(11): Homolog of NCBI NO: 11357688 NR Description: hypothetical protein F27H5.90 - Arabidopsis
  misc_feature (67)..(268): Homolog of NCBI NO: 11357688 NR Description: hypothetical protein F27H5.90 - Arabidopsis
  misc_feature (1)..(268): Homolog of NCBI NO: 30695166 NR Description: expressed protein [Arabidopsis thaliana]
MLVELCEEAVERLTIMNHPEGDCPLCLYPLFPEDGGSKQMPFMKLMSCFHCFHCECIIRWWNWLHAQEEADSKSGDTLHMRRGSTAREGNSGSADKSLGNCPVCRKIFHSSDIEHVLDLVGAQSSLQDSSLIPGKDQDPLLQSDSENIRRERFESILKTQEEKGGLVQPKKNISVVPGMYLPPPAHASTSRNEEEEAGESQEQGEEEPKEAESETNSSSSTNRRGRGRWRGRGRSRGRGPTVNERKPNSQDPRKPTRQWVQRAREGDK

SEQ ID NO: 48880 - protein, 253 aa, Arabidopsis thaliana
  peptide (1)..(253): Ceres Seq. ID no. 12601105
  misc_feature (1)..(65): Homolog of NCBI NO: 34876827 NR Description: similar to RING finger protein 25 (RING finger
  misc_feature (1)..(175): Homolog of NCBI NO: 34878787 NR Description: ring finger protein 25; ring finger protein AO7
  misc_feature (1)..(175): Homolog of NCBI NO: 10436180 NR Description: unnamed protein product [Homo sapiens]
  misc_feature (1)..(225): Homolog of NCBI NO: 33416385 NR Description: Unknown (protein for MGC:66260) [Danio rerio]
  misc_feature (1)..(253): Homolog of NCBI NO: 17065268 NR Description: putative protein [Arabidopsis thaliana]
  misc_feature (52)..(253): Homolog of NCBI NO: 11357688 NR Description: hypothetical protein F27H5.90 - Arabidopsis
  misc_feature (1)..(253): Homolog of NCBI NO: 30695166 NR Description: expressed protein [Arabidopsis thaliana]
MNHPEGDCPLCLYPLFPEDGGSKQMPFMKLMSCFHCFHCECIIRWWNWLHAQEEADSKSGDTLHMRRGSTAREGNSGSADKSLGNCPVCRKIFHSSDIEHVLDLVGAQSSLQDSSLIPGKDQDPLLQSDSENIRRERFESILKTQEEKGGLVQPKKNISVVPGMYLPPPAHASTSRNEEEEAGESQEQGEEEPKEAESETNSSSSTNRRGRGRWRGRGRSRGRGPTVNERKPNSQDPRKPTRQWVQRAREGDK

SEQ ID NO: 48881 - DNA, 2307 bp, Arabidopsis thaliana; identical to SEQ ID NO: 46178
  misc_feature (1)..(2307): Ceres Seq. ID no. 12600696
  misc_feature: MA Experiment ID: 20000171 Result: Down-regulated in Transcription
  misc_feature: MA Experiment 20000171 PARAMETER Experiment Name: At_42deg_Heat_P Parameter: Age (day) Value: 14
  misc_feature: MA Experiment 20000171 PARAMETER Experiment Name: At_42deg_Heat_P Parameter: Organism Value: A. thaliana
  misc_feature: MA Experiment 20000171 PARAMETER Experiment Name: At_42deg_Heat_P Parameter: Plant Line Value: WS
  misc_feature: MA Experiment 20000171 PARAMETER Experiment Name: At_42deg_Heat_P Parameter: Temperature (deg C) Value: 42 vs. 22
  misc_feature: MA Experiment 20000171 PARAMETER Experiment Name: At_42deg_Heat_P Parameter: Timepoint (hr) Value: 1
  misc_feature: MA Experiment 20000171 PARAMETER Experiment Name: At_42deg_Heat_P Parameter: Tissue Value: Aerial
  misc_feature: MA Experiment ID: 20000173 Result: Down-regulated in Transcription
  misc_feature: MA Experiment 20000173 PARAMETER Experiment Name: At_42deg_Heat_P Parameter: Age (day) Value: 14
  misc_feature: MA Experiment 20000173 PARAMETER Experiment Name: At_42deg_Heat_P Parameter: Organism Value: A. thaliana
  misc_feature: MA Experiment 20000173 PARAMETER Experiment Name: At_42deg_Heat_P Parameter: Plant Line Value: WS
  misc_feature: MA Experiment 20000173 PARAMETER Experiment Name: At_42deg_Heat_P Parameter: Temperature (deg C) Value: 42 vs. 22
  misc_feature: MA Experiment 20000173 PARAMETER Experiment Name: At_42deg_Heat_P Parameter: Timepoint (hr) Value: 6
  misc_feature: MA Experiment 20000173 PARAMETER Experiment Name: At_42deg_Heat_P Parameter: Tissue Value: Aerial

SEQ ID NO: 48882 - protein, 677 aa, Arabidopsis thaliana; identical to SEQ ID NO: 46179
  peptide (1)..(677): Ceres Seq. ID no. 12600697
  misc_feature (61)..(413): Pfam Name: Atrophin-1 family Pfam Description: Atrophin-1 family
  misc_feature (61)..(413): Pfam Name: Atrophin-1 family Pfam Description: Atrophin-1 family
  misc_feature (67)..(503): Homolog of NCBI NO: 12320748 NR Description: unknown protein [Arabidopsis thaliana]
  misc_feature (67)..(503): Homolog of NCBI NO: 12320748 NR Description: unknown protein [Arabidopsis thaliana]
  misc_feature (182)..(677): Homolog of NCBI NO: 20260584 NR Description: unknown protein [Arabidopsis thaliana]
  misc_feature (182)..(677): Homolog of NCBI NO: 20260584 NR Description: unknown protein [Arabidopsis thaliana]

SEQ ID NO: 48883 - protein, 611 aa, Arabidopsis thaliana; identical to SEQ ID NO: 46180
  peptide (1)..(611): Ceres Seq. ID no. 12600698
  misc_feature (1)..(347): Pfam Name: Atrophin-1 family Pfam Description: Atrophin-1 family
  misc_feature (1)..(347): Pfam Name: Atrophin-1 family Pfam Description: Atrophin-1 family
  misc_feature (1)..(437): Homolog of NCBI NO: 12320748 NR Description: unknown protein [Arabidopsis thaliana]
  misc_feature (1)..(437): Homolog of NCBI NO: 12320748 NR Description: unknown protein [Arabidopsis thaliana]
  misc_feature (116)..(611): Homolog of NCBI NO: 20260584 NR Description: unknown protein [Arabidopsis thaliana]
  misc_feature (116)..(611): Homolog of NCBI NO: 20260584 NR Description: unknown protein [Arabidopsis thaliana]

SEQ ID NO: 48884 - protein, 496 aa, Arabidopsis thaliana; identical to SEQ ID NO: 46181
  peptide (1)..(496): Ceres Seq. ID no. 12600699
  misc_feature (1)..(232): Pfam Name: Atrophin-1 family Pfam Description: Atrophin-1 family
  misc_feature (1)..(232): Pfam Name: Atrophin-1 family Pfam Description: Atrophin-1 family
  misc_feature (1)..(322): Homolog of NCBI NO: 12320748 NR Description: unknown protein [Arabidopsis thaliana]
  misc_feature (1)..(322): Homolog of NCBI NO: 12320748 NR Description: unknown protein [Arabidopsis thaliana]
  misc_feature (1)..(496): Homolog of NCBI NO: 20260584 NR Description: unknown protein [Arabidopsis thaliana]
  misc_feature (1)..(496): Homolog of NCBI NO: 20260584 NR Description: unknown protein [Arabidopsis thaliana]

SEQ ID NO: 48885 - DNA, 1242 bp, Arabidopsis thaliana
  misc_feature (1)..(1242): Ceres Seq. ID no. 14315831
  misc_feature: MA Experiment ID: 20000179 Result: Down-regulated in Transcription
  misc_feature: MA Experiment 20000179 PARAMETER Experiment Name: At_Germinating_Seeds_P Parameter: Age (hr) Value: 6 vs. 0
  misc_feature: MA Experiment 20000179 PARAMETER Experiment Name: At_Germinating_Seeds_P Parameter: Tissue Value: Germinating Seeds
  misc_feature: MA Experiment ID: 20000709 Result: Up-regulated in Transcription
  misc_feature: MA Experiment 20000709 PARAMETER Experiment Name: At_15mM_NH4NO3_L-to-H_P Parameter: Age (hr) Value: 14
  misc_feature: MA Experiment 20000709 PARAMETER Experiment Name: At_15mM_NH4NO3_L-to-H_P Parameter: Organism Value: A. thaliana
  misc_feature: MA Experiment 20000709 PARAMETER Experiment Name: At_15mM_NH4NO3_L-to-H_P Parameter: Plant Line Value: WS
  misc_feature: MA Experiment 20000709 PARAMETER Experiment Name: At_15mM_NH4NO3_L-to-H_P Parameter: Timepoint (hr) Value: 4
  misc_feature: MA Experiment 20000709 PARAMETER Experiment Name: At_15mM_NH4NO3_L-to-H_P Parameter: Tissue Value: Aerial
  misc_feature: MA Experiment 20000709 PARAMETER Experiment Name: At_15mM_NH4NO3_L-to-H_P Parameter: Treatment Value: 15mM NH4NO3 vs. 30mM Mannitol
  misc_feature: MA Experiment ID: 20001247 Result: Down-regulated in Transcription
  misc_feature: MA Experiment 20001247 PARAMETER Experiment Name: At_Far-red-induction_P Parameter: Age (day) Value: 7
  misc_feature: MA Experiment 20001247 PARAMETER Experiment Name: At_Far-red-induction_P Parameter: Light Value: Far-red vs. White
  misc_feature: MA Experiment 20001247 PARAMETER Experiment Name: At_Far-red-induction_P Parameter: Organism Value: A. thaliana
  misc_feature: MA Experiment 20001247 PARAMETER Experiment Name: At_Far-red-induction_P Parameter: Plant Line Value: Columbia
  misc_feature: MA Experiment 20001247 PARAMETER Experiment Name: At_Far-red-induction_P Parameter: Timepoint (hr) Value: 1
  misc_feature: MA Experiment 20001247 PARAMETER Experiment Name: At_Far-red-induction_P Parameter: Tissue Value: Whole Plant
  misc_feature: MA Experiment ID: 20001451 Result: Down-regulated in Transcription
  misc_feature: MA Experiment 20001451 PARAMETER Experiment Name: At_Far-red-induction_P Parameter: Age (day) Value: 7
  misc_feature: MA Experiment 20001451 PARAMETER Experiment Name: At_Far-red-induction_P Parameter: Light Value: Far-red vs. White
  misc_feature: MA Experiment 20001451 PARAMETER Experiment Name: At_Far-red-induction_P Parameter: Organism Value: A. thaliana
  misc_feature: MA Experiment 20001451 PARAMETER Experiment Name: At_Far-red-induction_P Parameter: Plant Line Value: Columbia
  misc_feature: MA Experiment 20001451 PARAMETER Experiment Name: At_Far-red-induction_P Parameter: Timepoint (hr) Value: 24
  misc_feature: MA Experiment 20001451 PARAMETER Experiment Name: At_Far-red-induction_P Parameter: Tissue Value: Whole Plant
  misc_feature: MA Experiment ID: 20001458 Result: Up-regulated in Transcription
  misc_feature: MA Experiment 20001458 PARAMETER Experiment Name: At_50mM_NH4NO3_L-to-H_P Parameter: Age (day) Value: Undefined
  misc_feature: MA Experiment 20001458 PARAMETER Experiment Name: At_50mM_NH4NO3_L-to-H_P Parameter: Organism Value: Undefined
  misc_feature: MA Experiment 20001458 PARAMETER Experiment Name: At_50mM_NH4NO3_L-to-H_P Parameter: Plant Line Value: Undefined
  misc_feature: MA Experiment 20001458 PARAMETER Experiment Name: At_50mM_NH4NO3_L-to-H_P Parameter: Timepoint (hr) Value: 2
  misc_feature: MA Experiment 20001458 PARAMETER Experiment Name: At_50mM_NH4NO3_L-to-H_P Parameter: Tissue Value: Siliques
  misc_feature: MA Experiment 20001458 PARAMETER Experiment Name: At_50mM_NH4NO3_L-to-H_P Parameter: Treatment Value: 50mM NH4NO3 vs. 100mM Manitol
  misc_feature: MA Experiment ID: 20001557 Result: Up-regulated in Transcription
  misc_feature: MA Experiment 20001557 PARAMETER Experiment Name: At_Drought_Soil_Dry_P Parameter: Age (day) Value: 27
  misc_feature: MA Experiment 20001557 PARAMETER Experiment Name: At_Drought_Soil_Dry_P Parameter: Organism Value: A. thaliana
  misc_feature: MA Experiment 20001557 PARAMETER Experiment Name: At_Drought_Soil_Dry_P Parameter: Plant Line Value: WS
  misc_feature: MA Experiment 20001557 PARAMETER Experiment Name: At_Drought_Soil_Dry_P Parameter: Post Timepoint (hr) Value: 3
  misc_feature: MA Experiment 20001557 PARAMETER Experiment Name: At_Drought_Soil_Dry_P Parameter: Post-Treatment Value: Re-Water vs. No Drought
  misc_feature: MA Experiment 20001557 PARAMETER Experiment Name: At_Drought_Soil_Dry_P Parameter: Timepoint (day) Value: 13
  misc_feature: MA Experiment 20001557 PARAMETER Experiment Name: At_Drought_Soil_Dry_P Parameter: Treatment Value: Drought vs. No Drought
  misc_feature: MA Experiment ID: 20001558 Result: Up-regulated in Transcription
  misc_feature: MA Experiment 20001558 PARAMETER Experiment Name: At_Drought_Soil_Dry_P Parameter: Age (day) Value: 27
  misc_feature: MA Experiment 20001558 PARAMETER Experiment Name: At_Drought_Soil_Dry_P Parameter: Organism Value: A. thaliana
  misc_feature: MA Experiment 20001558 PARAMETER Experiment Name: At_Drought_Soil_Dry_P Parameter: Plant Line Value: WS
  misc_feature: MA Experiment 20001558 PARAMETER Experiment Name: At_Drought_Soil_Dry_P Parameter: Post Timepoint (hr) Value: 6
  misc_feature: MA Experiment 20001558 PARAMETER Experiment Name: At_Drought_Soil_Dry_P Parameter: Post-Treatment Value: Re-Water vs. No Drought
  misc_feature: MA Experiment 20001558 PARAMETER Experiment Name: At_Drought_Soil_Dry_P Parameter: Timepoint (day) Value: 13
  misc_feature: MA Experiment 20001558 PARAMETER Experiment Name: At_Drought_Soil_Dry_P Parameter: Treatment Value: Drought vs. No Drought
  misc_feature: MA Experiment ID: 20001560 Result: Up-regulated in Transcription
  misc_feature: MA Experiment 20001560 PARAMETER Experiment Name: At_Drought_Soil_Dry_P Parameter: Age (day) Value: 28
  misc_feature: MA Experiment 20001560 PARAMETER Experiment Name: At_Drought_Soil_Dry_P Parameter: Organism Value: A. thaliana
  misc_feature: MA Experiment 20001560 PARAMETER Experiment Name: At_Drought_Soil_Dry_P Parameter: Plant Line Value: WS
  misc_feature: MA Experiment 20001560 PARAMETER Experiment Name: At_Drought_Soil_Dry_P Parameter: Post Timepoint (hr) Value: None
  misc_feature: MA Experiment 20001560 PARAMETER Experiment Name: At_Drought_Soil_Dry_P Parameter: Post-Treatment Value: None
  misc_feature: MA Experiment 20001560 PARAMETER Experiment Name: At_Drought_Soil_Dry_P Parameter: Timepoint (day) Value: 14
  misc_feature: MA Experiment 20001560 PARAMETER Experiment Name: At_Drought_Soil_Dry_P Parameter: Treatment Value: Drought vs. No Drought
  misc_feature: MA Experiment ID: 20001757 Result: Up-regulated in Transcription
  misc_feature: MA Experiment 20001757 PARAMETER Experiment Name: At_50mM_NH4NO3_L-to-H_P Parameter: Timepoint (hr) Value: 6
  misc_feature: MA Experiment 20001757 PARAMETER Experiment Name: At_50mM_NH4NO3_L-to-H_P Parameter: Tissue Value: Leaf
  misc_feature: MA Experiment 20001757 PARAMETER Experiment Name: At_50mM_NH4NO3_L-to-H_P Parameter: Treatment Value: 50mM NH4NO3 vs 100mM Mannitol
agacttccactttcgaaacctctcaccgaagctacaatgagtatcatcgcaggctcctacgagagattcatttggggtttcaagcttaaacccacgaagcacgacgccgaatctcaaaccctaactctctcccctctcttctcctacccttcccacatctccccaatcaccaccgtcgcttgttccggtcccgccgctgcttccggcggctccgacgatacaatccacctctacgatcttccctcggcctcttccctcggctctctacttgaccacaatcacacagcttcaatcactgctctctccttctacacaccttcttcactctccttccctcgtaatctaatctccgccgccgcagatggctccgttgctatattcgatactgatccttttgttttgcttaagtcgtttcgtcctcataagaaagcggttaatgatttggcgattcatccttcagggaagcttgctttagctgtttatcgtgatgagttctttgcgatgttgaatttagttagaggaaagaggagtttttgttgtaggttaggtcatgaagctagtcttgtgaaatttgatcctagtggtgaaaggttttacatggttgtgagtaataaagttggagttcatcagtctgaagatgctaagcttcttcttgagctcgagaatccgagccgcaaacgtatactctgcgctactcccggagagagtggaactctgtttacaggtggtgaggatcgagctataacagcttgggatacaaatagtgggaagcttgcttattccatagaagatgctcacccagctcgaatcaaaggtattgttgtgcttaccaggaatgaaagtgacggctccttggaagatccatacttgattggttctgcatcatctgatgggatcatacgtgtttgggacgtgcgaatggcggctaaagaaaatataaaaccattggccgagacaaatactaaatcaaggcttacatgtcttgccggctcagctcttaaatctatgagacggccacagattggaaagcaggaatctcagaaggtagacgaagagcatgagaactcagaataagagctgatttttgagtgtttattgaaaaatttgtgagctgacattaattttgatgcaagttttggtagaatccagtagattcttgtcgaattataactataaacattgtcttaaaccatcgattttgtgaaagaaacaaacaaacaaaaaaatcattctactattatc

SEQ ID NO: 48886 - protein, 357 aa, Arabidopsis thaliana
  peptide (1)..(357): Ceres Seq. ID no. 14315832
  misc_feature (258)..(304): Pfam Name: WD domain, G-beta repeat Pfam Description: WD domain, G-beta repeat
  misc_feature (13)..(328): Homolog of NCBI NO: 21311951 NR Description: PAK/PLC-interacting protein 1
  misc_feature (13)..(328): Homolog of NCBI NO: 15012024 NR Description: Unknown (protein for MGC:13426) [Homo sapiens]
  misc_feature (10)..(328): Homolog of NCBI NO: 29436537 NR Description: Similar to hypothetical protein FLJ20624 [Danio
  misc_feature (13)..(328): Homolog of NCBI NO: 14211689 NR Description: PAK/PLC-interacting protein 1 [Homo sapiens]
  misc_feature (13)..(328): Homolog of NCBI NO: 8923577 NR Description: PAK1 interacting protein 1
  misc_feature (13)..(328): Homolog of NCBI NO: 37362258 NR Description: PAK1 interacting protein 1 [Danio rerio]
  misc_feature (216)..(357): Homolog of NCBI NO: 25404514 NR Description: hypothetical protein F16G16.2 [imported] -
  misc_feature (13)..(235): Homolog of NCBI NO: 25404514 NR Description: hypothetical protein F16G16.2 [imported] -
  misc_feature (13)..(357): Homolog of NCBI NO: 23306444 NR Description: Unknown protein [Arabidopsis thaliana]
  misc_feature (13)..(357): Homolog of NCBI NO: 15217832 NR Description: transducin / WD-40 repeat protein family
RLPLSKPLTEATMSIIAGSYERFIWGFKLKPTKHDAESQTLTLSPLFSYPSHISPITTVACSGPAAASGGSDDTIHLYDLPSASSLGSLLDHNHTASITALSFYTPSSLSFPRNLISAAADGSVAIFDTDPFVLLKSFRPHKKAVNDLAIHPSGKLALAVYRDEFFAMLNLVRGKRSFCCRLGHEASLVKFDPSGERFYMVVSNKVGVHQSEDAKLLLELENPSRKRILCATPGESGTLFTGGEDRAITAWDTNSGKLAYSIEDAHPARIKGIVVLTRNESDGSLEDPYLIGSASSDGIIRVWDVRMAAKENIKPLAETNTKSRLTCLAGSALKSMRRPQIGKQESQKVDEEHENSE

SEQ ID NO: 48887 - protein, 345 aa, Arabidopsis thaliana
  peptide (1)..(345): Ceres Seq. ID no. 14315833
  misc_feature (246)..(292): Pfam Name: WD domain, G-beta repeat Pfam Description: WD domain, G-beta repeat
  misc_feature (1)..(316): Homolog of NCBI NO: 21311951 NR Description: PAK/PLC-interacting protein 1
  misc_feature (1)..(316): Homolog of NCBI NO: 15012024 NR Description: Unknown (protein for MGC:13426) [Homo sapiens]
  misc_feature (1)..(316): Homolog of NCBI NO: 29436537 NR Description: Similar to hypothetical protein FLJ20624 [Danio
  misc_feature (1)..(316): Homolog of NCBI NO: 14211689 NR Description: PAK/PLC-interacting protein 1 [Homo sapiens]
  misc_feature (1)..(316): Homolog of NCBI NO: 8923577 NR Description: PAK1 interacting protein 1
  misc_feature (1)..(316): Homolog of NCBI NO: 37362258 NR Description: PAK1 interacting protein 1 [Danio rerio]
  misc_feature (204)..(345): Homolog of NCBI NO: 25404514 NR Description: hypothetical protein F16G16.2 [imported] -
  misc_feature (1)..(223): Homolog of NCBI NO: 25404514 NR Description: hypothetical protein F16G16.2 [imported] -
  misc_feature (1)..(345): Homolog of NCBI NO: 23306444 NR Description: Unknown protein [Arabidopsis thaliana]
  misc_feature (1)..(345): Homolog of NCBI NO: 15217832 NR Description: transducin / WD-40 repeat protein family
MSIIAGSYERFIWGFKLKPTKHDAESQTLTLSPLFSYPSHISPITTVACSGPAAASGGSDDTIHLYDLPSASSLGSLLDHNHTASITALSFYTPSSLSFPRNLISAAADGSVAIFDTDPFVLLKSFRPHKKAVNDLAIHPSGKLALAVYRDEFFAMLNLVRGKRSFCCRLGHEASLVKFDPSGERFYMVVSNKVGVHQSEDAKLLLELENPSRKRILCATPGESGTLFTGGEDRAITAWDTNSGKLAYSIEDAHPARIKGIVVLTRNESDGSLEDPYLIGSASSDGIIRVWDVRMAAKENIKPLAETNTKSRLTCLAGSALKSMRRPQIGKQESQKVDEEHENSE

SEQ ID NO: 48888 - protein, 190 aa, Arabidopsis thaliana
  peptide (1)..(190): Ceres Seq. ID no. 14315834
  misc_feature (91)..(137): Pfam Name: WD domain, G-beta repeat Pfam Description: WD domain, G-beta repeat
  misc_feature (1)..(161): Homolog of NCBI NO: 21311951 NR Description: PAK/PLC-interacting protein 1
  misc_feature (1)..(161): Homolog of NCBI NO: 15012024 NR Description: Unknown (protein for MGC:13426) [Homo sapiens]
  misc_feature (1)..(161): Homolog of NCBI NO: 29436537 NR Description: Similar to hypothetical protein FLJ20624 [Danio
  misc_feature (1)..(161): Homolog of NCBI NO: 14211689 NR Description: PAK/PLC-interacting protein 1 [Homo sapiens]
  misc_feature (1)..(161): Homolog of NCBI NO: 8923577 NR Description: PAK1 interacting protein 1
  misc_feature (1)..(161): Homolog of NCBI NO: 37362258 NR Description: PAK1 interacting protein 1 [Danio rerio]
  misc_feature (49)..(190): Homolog of NCBI NO: 25404514 NR Description: hypothetical protein F16G16.2 [imported] -
  misc_feature (1)..(68): Homolog of NCBI NO: 25404514 NR Description: hypothetical protein F16G16.2 [imported] -
  misc_feature (1)..(190): Homolog of NCBI NO: 23306444 NR Description: Unknown protein [Arabidopsis thaliana]
  misc_feature (1)..(190): Homolog of NCBI NO: 15217832 NR Description: transducin / WD-40 repeat protein family
MLNLVRGKRSFCCRLGHEASLVKFDPSGERFYMVVSNKVGVHQSEDAKLLLELENPSRKRILCATPGESGTLFTGGEDRAITAWDTNSGKLAYSIEDAHPARIKGIVVLTRNESDGSLEDPYLIGSASSDGIIRVWDVRMAAKENIKPLAETNTKSRLTCLAGSALKSMRRPQIGKQESQKVDEEHENSE

SEQ ID NO: 48889 - DNA, 1728 bp, Arabidopsis thaliana
  misc_feature (1)..(1728): Ceres Seq. ID no. 15168822
  misc_feature: MA Experiment ID: 20000171 Result: Down-regulated in Transcription
  misc_feature: MA Experiment 20000171 PARAMETER Experiment Name: At_42deg_Heat_P Parameter: Age (day) Value: 14
  misc_feature: MA Experiment 20000171 PARAMETER Experiment Name: At_42deg_Heat_P Parameter: Organism Value: A. thaliana
  misc_feature: MA Experiment 20000171 PARAMETER Experiment Name: At_42deg_Heat_P Parameter: Plant Line Value: WS
  misc_feature: MA Experiment 20000171 PARAMETER Experiment Name: At_42deg_Heat_P Parameter: Temperature (deg C) Value: 42 vs. 22
  misc_feature: MA Experiment 20000171 PARAMETER Experiment Name: At_42deg_Heat_P Parameter: Timepoint (hr) Value: 1
  misc_feature: MA Experiment 20000171 PARAMETER Experiment Name: At_42deg_Heat_P Parameter: Tissue Value: Aerial
  misc_feature: MA Experiment ID: 20000173 Result: Down-regulated in Transcription
  misc_feature: MA Experiment 20000173 PARAMETER Experiment Name: At_42deg_Heat_P Parameter: Age (day) Value: 14
  misc_feature: MA Experiment 20000173 PARAMETER Experiment Name: At_42deg_Heat_P Parameter: Organism Value: A. thaliana
  misc_feature: MA Experiment 20000173 PARAMETER Experiment Name: At_42deg_Heat_P Parameter: Plant Line Value: WS
  misc_feature: MA Experiment 20000173 PARAMETER Experiment Name: At_42deg_Heat_P Parameter: Temperature (deg C) Value: 42 vs. 22
  misc_feature: MA Experiment 20000173 PARAMETER Experiment Name: At_42deg_Heat_P Parameter: Timepoint (hr) Value: 6
  misc_feature: MA Experiment 20000173 PARAMETER Experiment Name: At_42deg_Heat_P Parameter: Tissue Value: Aerial
  misc_feature: MA Experiment ID: 20000182 Result: Up-regulated in Transcription
  misc_feature: MA Experiment 20000182 PARAMETER Experiment Name: At_2mM_SA_P Parameter: Age (day) Value: 14
  misc_feature: MA Experiment 20000182 PARAMETER Experiment Name: At_2mM_SA_P Parameter: Organism Value: A. thaliana
  misc_feature: MA Experiment 20000182 PARAMETER Experiment Name: At_2mM_SA_P Parameter: Plant Line Value: WS
  misc_feature: MA Experiment 20000182 PARAMETER Experiment Name: At_2mM_SA_P Parameter: Timepoint (hr) Value: 6
  misc_feature: MA Experiment 20000182 PARAMETER Experiment Name: At_2mM_SA_P Parameter: Tissue Value: Aerial
  misc_feature: MA Experiment 20000182 PARAMETER Experiment Name: At_2mM_SA_P Parameter: Treatment Value: 2mM SA vs. No Treatment
  misc_feature: MA Experiment ID: 20000184 Result: Down-regulated in Transcription
  misc_feature: MA Experiment 20000184 PARAMETER Experiment Name: At_Shoots__P Parameter: Age (day) Value: 7
  misc_feature: MA Experiment 20000184 PARAMETER Experiment Name: At_Shoots__P Parameter: Tissue Value: Shoots vs. Whole Plant
  misc_feature: MA Experiment ID: 20000227 Result: Down-regulated in Transcription
  misc_feature: MA Experiment 20000227 PARAMETER Experiment Name: At_Root-Tips-vs-Tops_P Parameter: Tissue Value: Root Tips vs. Root Tops
  misc_feature: MA Experiment ID: 20000234 Result: Down-regulated in Transcription
  misc_feature: MA Experiment 20000234 PARAMETER Experiment Name: At_Siliques_P Parameter: Age (day) Value: 21
  misc_feature: MA Experiment 20000234 PARAMETER Experiment Name: At_Siliques_P Parameter: Organism Value: A. thaliana
  misc_feature: MA Experiment 20000234 PARAMETER Experiment Name: At_Siliques_P Parameter: Plant Line Value: WS
  misc_feature: MA Experiment 20000234 PARAMETER Experiment Name: At_Siliques_P Parameter: Tissue Value: Less Than 5mm Siliques vs. Whole Plant
  misc_feature: MA Experiment ID: 20000235 Result: Down-regulated in Transcription
  misc_feature: MA Experiment 20000235 PARAMETER Experiment Name: At_Siliques_P Parameter: Age (day) Value: 21
  misc_feature: MA Experiment 20000235 PARAMETER Experiment Name: At_Siliques_P Parameter: Organism Value: A. thaliana
  misc_feature: MA Experiment 20000235 PARAMETER Experiment Name: At_Siliques_P Parameter: Plant Line Value: WS
  misc_feature: MA Experiment 20000235 PARAMETER Experiment Name: At_Siliques_P Parameter: Tissue Value: 5-10mm Siliques vs. Whole Plant
  misc_feature: MA Experiment ID: 20000265 Result: Down-regulated in Transcription
  misc_feature: MA Experiment 20000265 PARAMETER Experiment Name: At_Open_Flower_P Parameter: Age (day) Value: 21
  misc_feature: MA Experiment 20000265 PARAMETER Experiment Name: At_Open_Flower_P Parameter: Plant Line Value: WS
  misc_feature: MA Experiment 20000265 PARAMETER Experiment Name: At_Open_Flower_P Parameter: Tissue Value: Closed Flower vs. Whole Plant
  misc_feature: MA Experiment ID: 20000286 Result: Down-regulated in Transcription
  misc_feature: MA Experiment 20000286 PARAMETER Experiment Name: At_Open_Flower_P Parameter: Age (day) Value: 21
  misc_feature: MA Experiment 20000286 PARAMETER Experiment Name: At_Open_Flower_P Parameter: Plant Line Value: WS
  misc_feature: MA Experiment 20000286 PARAMETER Experiment Name: At_Open_Flower_P Parameter: Tissue Value: Half Open vs. Whole Plant
  misc_feature: MA Experiment ID: 20000438 Result: Down-regulated in Transcription
  misc_feature: MA Experiment 20000438 PARAMETER Experiment Name: At_Shoots__P Parameter: Age (day) Value: 14
  misc_feature: MA Experiment 20000438 PARAMETER Experiment Name: At_Shoots__P Parameter: Tissue Value: Shoots vs. Whole Plant
  misc_feature: MA Experiment ID: 20000495 Result: Down-regulated in Transcription
  misc_feature: MA Experiment 20000495 PARAMETER Experiment Name: At_Guard_Cells_P Parameter: Harvest Date Value: 8/2/2002
  misc_feature: MA Experiment 20000495 PARAMETER Experiment Name: At_Guard_Cells_P Parameter: Organism Value: A. thaliana
  misc_feature: MA Experiment 20000495 PARAMETER Experiment Name: At_Guard_Cells_P Parameter: Tissue Value: Guard Cells vs. Leaves
gacccctcgtgcctctctttaacaccaaacccaaaactcccttctctttcttccttcctctccgatctccgttcacatctctctctcatctttatcttcttctttttttgccttgtgggttgaaagtttctatattttctctttctcttctgtttacataatccattttcagctcaagcagctgaagaataacgatcaagaaccaaaaaagaagaaaacgaatctgttcttagctttgatgggttcttgcttcagttctcgagtcaaagcagacatcttccacaatggtaagagcagcgatctttatggtctaagtctctcaagtcggaaatcgtcttcgactgtagcggcggctcagaagacggaaggggagatattgagttcgacccctgtcaaaagcttcacctttaacgaactcaaactcgccacaagaaacttcagaccagatagtgtgatcggagaaggtggctttggttgtgtctttaaaggctggttagatgagtccactctcactccgactaaacctggaaccggtttggtcatcgccgttaaaaagcttaaccaagaaggttttcaaggtcaccgtgaatggctgacagagatcaattacttggggcaactgagtcacccaaatctagttaaactgatcggttattgcttagaagatgaacaccgtcttctagtctacgagtttatgcaaaaaggaagtcttgagaatcatctattcagaagaggtgcatattttaagccactcccatggtttctacgggtcaatgttgcgcttgatgcagcaaaggggcttgcttttcttcacagcgatcccgtcaaagtgatataccgagacattaaagcctcgaacatcttacttgatgcggactacaacgcaaaactttctgactttggactagctagagacggtccaatgggtgatttgagttatgttagtacaagggtcatgggtacttatgggtacgccgcgcctgagtacatgtcatcaggtcacttgaatgcaagaagcgatgtgtacagtttcggagttttgcttctagagattttatctggtaagcgagcgttggatcataacagaccggctaaagaagaaaaccttgtggattgggctcgaccgtacctcacaagcaaacgtaaggttctcctaatcgtggacaatcggctagacacacagtacctacctgaagaagccgtgagaatggcaagcgtggcggtgcagtgtctctcatttgaacccaagtcgcgcccgaccatggaccaagtggtccgtgccttacaacaacttcaggacaacttgggaaaaccgagtcagaccaatccggttaaggataccaagaaacttggttttaaaactggtactactaagtcatccgaaaaacggtttacacaaaaaccttttggcaggcaccttgtgtaggtcaagttggtaactgaattccaggatggacatttttccggcggtttacttgaaactgccgatatccgttttcgacggattgaatgcggttctggacaaaccgtgcaggtcaagactaataaaggatacattaaattttccggttacatgtcccatacccaaccttagagaacatgtgtagcctttagcttaggcttccttgtgtgctgttatattgagtatatatgaggtaatttttgcctcttgtgttgtaacacttgtatttttgttcctttaacatttgatgtagagatttttcctcc

SEQ ID NO: 48890 - protein, 395 aa, Arabidopsis thaliana
  peptide (1)..(395): Ceres Seq. ID no. 15168823
  misc_feature (1)..(254): Homolog of NCBI NO: 8778537 NR Description: F22G5.5 [Arabidopsis thaliana]
  misc_feature (1)..(353): Homolog of NCBI NO: 15222437 NR Description: protein kinase (APK1a) [Arabidopsis thaliana]
  misc_feature (1)..(395): Homolog of NCBI NO: 14719339 NR Description: putative protein kinase [Oryza sativa]
  misc_feature (1)..(364): Homolog of NCBI NO: 15241749 NR Description: protein kinase, putative [Arabidopsis thaliana]
  misc_feature (1)..(364): Homolog of NCBI NO: 166809 NR Description: protein kinase
  misc_feature (1)..(354): Homolog of NCBI NO: 34906046 NR Description: putative serine/threonine-specific protein kinase
  misc_feature (19)..(375): Homolog of NCBI NO: 11259786 NR Description: serine/threonine-specific protein kinase-like -
  misc_feature (1)..(375): Homolog of NCBI NO: 28058890 NR Description: serine/threonine-specific protein kinase -like
  misc_feature (1)..(375): Homolog of NCBI NO: 30694253 NR Description: serine/threonine-specific protein kinase -related
  misc_feature (1)..(395): Homolog of NCBI NO: 15225520 NR Description: protein kinase, putative [Arabidopsis thaliana]
MGSCFSSRVKADIFHNGKSSDLYGLSLSSRKSSSTVAAAQKTEGEILSSTPVKSFTFNELKLATRNFRPDSVIGEGGFGCVFKGWLDESTLTPTKPGTGLVIAVKKLNQEGFQGHREWLTEINYLGQLSHPNLVKLIGYCLEDEHRLLVYEFMQKGSLENHLFRRGAYFKPLPWFLRVNVALDAAKGLAFLHSDPVKVIYRDIKASNILLDADYNAKLSDFGLARDGPMGDLSYVSTRVMGTYGYAAPEYMSSGHLNARSDVYSFGVLLLEILSGKRALDHNRPAKEENLVDWARPYLTSKRKVLLIVDNRLDTQYLPEEAVRMASVAVQCLSFEPKSRPTMDQVVRALQQLQDNLGKPSQTNPVKDTKKLGFKTGTTKSSEKRFTQKPFGRHLV

SEQ ID NO: 48891 - protein, 243 aa, Arabidopsis thaliana
  peptide (1)..(243): Ceres Seq. ID no. 15168824
  misc_feature (1)..(102): Homolog of NCBI NO: 8778537 NR Description: F22G5.5 [Arabidopsis thaliana]
  misc_feature (1)..(201): Homolog of NCBI NO: 15222437 NR Description: protein kinase (APK1a) [Arabidopsis thaliana]
  misc_feature (1)..(243): Homolog of NCBI NO: 14719339 NR Description: putative protein kinase [Oryza sativa]
  misc_feature (1)..(212): Homolog of NCBI NO: 15241749 NR Description: protein kinase, putative [Arabidopsis thaliana]
  misc_feature (1)..(212): Homolog of NCBI NO: 166809 NR Description: protein kinase
  misc_feature (1)..(202): Homolog of NCBI NO: 34906046 NR Description: putative serine/threonine-specific protein kinase
  misc_feature (1)..(223): Homolog of NCBI NO: 11259786 NR Description: serine/threonine-specific protein kinase-like -
  misc_feature (1)..(223): Homolog of NCBI NO: 28058890 NR Description: serine/threonine-specific protein kinase -like
  misc_feature (1)..(223): Homolog of NCBI NO: 30694253 NR Description: serine/threonine-specific protein kinase -related
  misc_feature (1)..(243): Homolog of NCBI NO: 15225520 NR Description: protein kinase, putative [Arabidopsis thaliana]
MQKGSLENHLFRRGAYFKPLPWFLRVNVALDAAKGLAFLHSDPVKVIYRDIKASNILLDADYNAKLSDFGLARDGPMGDLSYVSTRVMGTYGYAAPEYMSSGHLNARSDVYSFGVLLLEILSGKRALDHNRPAKEENLVDWARPYLTSKRKVLLIVDNRLDTQYLPEEAVRMASVAVQCLSFEPKSRPTMDQVVRALQQLQDNLGKPSQTNPVKDTKKLGFKTGTTKSSEKRFTQKPFGRHLV

SEQ ID NO: 48892 - DNA, 2015 bp, Arabidopsis thaliana; identical to SEQ ID NO: 42148
  misc_feature (1)..(2015): Ceres Seq. ID no. 12601323
  misc_feature: MA Experiment ID: 108434 Result: Up-regulated in Transcription
  misc_feature: MA Experiment 108434 PARAMETER Experiment Name: At_Root_Tips_cDNA_P Parameter: Tissue Value: Root Tips
  misc_feature: MA Experiment ID: 108461 Result: Up-regulated in Transcription
  misc_feature: MA Experiment 108461 PARAMETER Experiment Name: At_Germinating_Seeds_cDNA_P Parameter: Age (day) Value: 1 vs. 0
  misc_feature: MA Experiment 108461 PARAMETER Experiment Name: At_Germinating_Seeds_cDNA_P Parameter: Tissue Value: Germinating Seeds
  misc_feature: MA Experiment ID: 108462 Result: Up-regulated in Transcription
  misc_feature: MA Experiment 108462 PARAMETER Experiment Name: At_Germinating_Seeds_cDNA_P Parameter: Age (day) Value: 2 vs. 0
  misc_feature: MA Experiment 108462 PARAMETER Experiment Name: At_Germinating_Seeds_cDNA_P Parameter: Tissue Value: Germinating Seeds
  misc_feature: MA Experiment ID: 108463 Result: Up-regulated in Transcription
  misc_feature: MA Experiment 108463 PARAMETER Experiment Name: At_Germinating_Seeds_cDNA_P Parameter: Age (day) Value: 3 vs. 0
  misc_feature: MA Experiment 108463 PARAMETER Experiment Name: At_Germinating_Seeds_cDNA_P Parameter: Tissue Value: Germinating Seeds
  misc_feature: MA Experiment ID: 108464 Result: Up-regulated in Transcription
  misc_feature: MA Experiment 108464 PARAMETER Experiment Name: At_Germinating_Seeds_cDNA_P Parameter: Age (day) Value: 4 vs. 0
  misc_feature: MA Experiment 108464 PARAMETER Experiment Name: At_Germinating_Seeds_cDNA_P Parameter: Tissue Value: Germinating Seeds
  misc_feature: MA Experiment ID: 108577 Result: Up-regulated in Transcription
  misc_feature: MA Experiment 108577 PARAMETER Experiment Name: At_42deg_Heat_cDNA_P Parameter: Temperature (deg C) Value: 42 vs. 22
  misc_feature: MA Experiment 108577 PARAMETER Experiment Name: At_42deg_Heat_cDNA_P Parameter: Timepoint (hr) Value: 6
  misc_feature: MA Experiment 108577 PARAMETER Experiment Name: At_42deg_Heat_cDNA_P Parameter: Tissue Value: Aerial
  misc_feature: MA Experiment ID: 108579 Result: Up-regulated in Transcription
  misc_feature: MA Experiment 108579 PARAMETER Experiment Name: At_4deg_Cold_cDNA_P Parameter: Temperature (deg C) Value: 4 vs. 22
  misc_feature: MA Experiment 108579 PARAMETER Experiment Name: At_4deg_Cold_cDNA_P Parameter: Timepoint (hr) Value: 6
  misc_feature: MA Experiment 108579 PARAMETER Experiment Name: At_4deg_Cold_cDNA_P Parameter: Tissue Value: Aerial
  misc_feature: MA Experiment ID: 108595 Result: Down-regulated in Transcription
  misc_feature: MA Experiment 108595 PARAMETER Experiment Name: At_Ler-pi_Ovule_cDNA_P Parameter: Plant Line Value: null
  misc_feature: MA Experiment ID: 20000112 Result: Up-regulated in Transcription
  misc_feature: MA Experiment 20000112 PARAMETER Experiment Name: At_42deg_Heat_cDNA_P Parameter: Temperature (deg C) Value: 42 vs. 22
  misc_feature: MA Experiment 20000112 PARAMETER Experiment Name: At_42deg_Heat_cDNA_P Parameter: Timepoint (hr) Value: 2
  misc_feature: MA Experiment 20000112 PARAMETER Experiment Name: At_42deg_Heat_cDNA_P Parameter: Tissue Value: Aerial
  misc_feature: MA Experiment ID: 20000794 Result: Up-regulated in Transcription
  misc_feature: MA Experiment 20000794 PARAMETER Experiment Name: At_Petals_P Parameter: Age (day) Value: 23-25 days
  misc_feature: MA Experiment 20000794 PARAMETER Experiment Name: At_Petals_P Parameter: Plant Line Value: WS
  misc_feature: MA Experiment 20000794 PARAMETER Experiment Name: At_Petals_P Parameter: Tissue Value: Petals vs. Whole plant
  misc_feature: MA Experiment ID: 20001248 Result: Down-regulated in Transcription
  misc_feature: MA Experiment 20001248 PARAMETER Experiment Name: At_Far-red-induction_P Parameter: Age (day) Value: 7
  misc_feature: MA Experiment 20001248 PARAMETER Experiment Name: At_Far-red-induction_P Parameter: Light Value: Far-red vs. White
  misc_feature: MA Experiment 20001248 PARAMETER Experiment Name: At_Far-red-induction_P Parameter: Organism Value: A. thaliana
  misc_feature: MA Experiment 20001248 PARAMETER Experiment Name: At_Far-red-induction_P Parameter: Plant Line Value: Columbia
  misc_feature: MA Experiment 20001248 PARAMETER Experiment Name: At_Far-red-induction_P Parameter: Timepoint (hr) Value: 4
  misc_feature: MA Experiment 20001248 PARAMETER Experiment Name: At_Far-red-induction_P Parameter: Tissue Value: Whole Plant

SEQ ID NO: 48893 - protein, 550 aa, Arabidopsis thaliana; identical to SEQ ID NO: 42149
  peptide (1)..(550): Ceres Seq. ID no. 12601324
  misc_feature (70)..(508): Pfam Name: Aldehyde dehydrogenase family Pfam Description: Aldehyde dehydrogenase family
  misc_feature (70)..(508): Pfam Name: Aldehyde dehydrogenase family Pfam Description: Aldehyde dehydrogenase family
  misc_feature (78)..(532): Homolog of NCBI NO: 17231164 NR Description: aldehyde dehydrogenase [Nostoc sp. PCC 7120]
  misc_feature (79)..(524): Homolog of NCBI NO: 14010869 NR Description: Aldehyde dehydrogenase family 3, subfamily A1
  misc_feature (79)..(524): Homolog of NCBI NO: 2392056 NR Description: Chain A, Class 3 Aldehyde Dehydrogenase Complex
  misc_feature (72)..(548): Homolog of NCBI NO: 33317836 NR Description: aldehyde dehydrogenase [Oryza sativa (indica
  misc_feature (74)..(547): Homolog of NCBI NO: 17065918 NR Description: aldehyde dehydrogenase [Craterostigma
  misc_feature (78)..(532): Homolog of NCBI NO: 17231164 NR Description: aldehyde dehydrogenase [Nostoc sp. PCC 7120]
  misc_feature (79)..(524): Homolog of NCBI NO: 2392056 NR Description: Chain A, Class 3 Aldehyde Dehydrogenase Complex
  misc_feature (74)..(547): Homolog of NCBI NO: 17065918 NR Description: aldehyde dehydrogenase [Craterostigma
  misc_feature (1)..(550): Homolog of NCBI NO: 18418408 NR Description: putative aldehyde dehydrogenase
  misc_feature (1)..(550): Homolog of NCBI NO: 17065876 NR Description: aldehyde dehydrogenase [Arabidopsis thaliana]
  misc_feature (190)..(550): Homolog of NCBI NO: 7484798 NR Description: aldehyde dehydrogenase (NAD+) homolog F10M10.10 -
  misc_feature (70)..(547): Homolog of NCBI NO: 15219358 NR Description: aldehyde dehydrogenase, putative
  misc_feature (70)..(547): Homolog of NCBI NO: 21536879 NR Description: aldehyde dehydrogenase, putative [Arabidopsis
  misc_feature (72)..(548): Homolog of NCBI NO: 33317836 NR Description: aldehyde dehydrogenase [Oryza sativa (indica
  misc_feature (79)..(524): Homolog of NCBI NO: 14010869 NR Description: Aldehyde dehydrogenase family 3, subfamily A1
  misc_feature (70)..(547): Homolog of NCBI NO: 21536879 NR Description: aldehyde dehydrogenase, putative [Arabidopsis
  misc_feature (70)..(547): Homolog of NCBI NO: 15219358 NR Description: aldehyde dehydrogenase, putative
  misc_feature (190)..(550): Homolog of NCBI NO: 7484798 NR Description: aldehyde dehydrogenase (NAD+) homolog F10M10.10 -
  misc_feature (1)..(550): Homolog of NCBI NO: 17065876 NR Description: aldehyde dehydrogenase [Arabidopsis thaliana]
  misc_feature (1)..(550): Homolog of NCBI NO: 18418408 NR Description: putative aldehyde dehydrogenase

SEQ ID NO: 48894 - protein, 444 aa, Arabidopsis thaliana; identical to SEQ ID NO: 42150
  peptide (1)..(444): Ceres Seq. ID no. 12601325
  misc_feature (1)..(402): Pfam Name: Aldehyde dehydrogenase family Pfam Description: Aldehyde dehydrogenase family
  misc_feature (1)..(402): Pfam Name: Aldehyde dehydrogenase family Pfam Description: Aldehyde dehydrogenase family
  misc_feature (1)..(426): Homolog of NCBI NO: 17231164 NR Description: aldehyde dehydrogenase [Nostoc sp. PCC 7120]
  misc_feature (1)..(418): Homolog of NCBI NO: 14010869 NR Description: Aldehyde dehydrogenase family 3, subfamily A1
  misc_feature (1)..(418): Homolog of NCBI NO: 2392056 NR Description: Chain A, Class 3 Aldehyde Dehydrogenase Complex
  misc_feature (1)..(442): Homolog of NCBI NO: 33317836 NR Description: aldehyde dehydrogenase [Oryza sativa (indica
  misc_feature (1)..(441): Homolog of NCBI NO: 17065918 NR Description: aldehyde dehydrogenase [Craterostigma
  misc_feature (1)..(426): Homolog of NCBI NO: 17231164 NR Description: aldehyde dehydrogenase [Nostoc sp. PCC 7120]
  misc_feature (1)..(418): Homolog of NCBI NO: 2392056 NR Description: Chain A, Class 3 Aldehyde Dehydrogenase Complex
  misc_feature (1)..(441): Homolog of NCBI NO: 17065918 NR Description: aldehyde dehydrogenase [Craterostigma
  misc_feature (1)..(444): Homolog of NCBI NO: 18418408 NR Description: putative aldehyde dehydrogenase
  misc_feature (1)..(444): Homolog of NCBI NO: 17065876 NR Description: aldehyde dehydrogenase [Arabidopsis thaliana]
  misc_feature (84)..(444): Homolog of NCBI NO: 7484798 NR Description: aldehyde dehydrogenase (NAD+) homolog F10M10.10 -
  misc_feature (1)..(441): Homolog of NCBI NO: 15219358 NR Description: aldehyde dehydrogenase, putative
  misc_feature (1)..(441): Homolog of NCBI NO: 21536879 NR Description: aldehyde dehydrogenase, putative [Arabidopsis
  misc_feature (1)..(442): Homolog of NCBI NO: 33317836 NR Description: aldehyde dehydrogenase [Oryza sativa (indica
  misc_feature (1)..(418): Homolog of NCBI NO: 14010869 NR Description: Aldehyde dehydrogenase family 3, subfamily A1
  misc_feature (1)..(441): Homolog of NCBI NO: 21536879 NR Description: aldehyde dehydrogenase, putative [Arabidopsis
  misc_feature (1)..(441): Homolog of NCBI NO: 15219358 NR Description: aldehyde dehydrogenase, putative
  misc_feature (84)..(444): Homolog of NCBI NO: 7484798 NR Description: aldehyde dehydrogenase (NAD+) homolog F10M10.10 -
  misc_feature (1)..(444): Homolog of NCBI NO: 17065876 NR Description: aldehyde dehydrogenase [Arabidopsis thaliana]
  misc_feature (1)..(444): Homolog of NCBI NO: 18418408 NR Description: putative aldehyde dehydrogenase

SEQ ID NO: 48895 - protein, 408 aa, Arabidopsis thaliana; identical to SEQ ID NO: 42151
  peptide (1)..(408): Ceres Seq. ID no. 12601326
  misc_feature (1)..(366): Pfam Name: Aldehyde dehydrogenase family Pfam Description: Aldehyde dehydrogenase family
  misc_feature (1)..(366): Pfam Name: Aldehyde dehydrogenase family Pfam Description: Aldehyde dehydrogenase family
  misc_feature (1)..(390): Homolog of NCBI NO: 17231164 NR Description: aldehyde dehydrogenase [Nostoc sp. PCC 7120]
  misc_feature (1)..(382): Homolog of NCBI NO: 14010869 NR Description: Aldehyde dehydrogenase family 3, subfamily A1
  misc_feature (1)..(382): Homolog of NCBI NO: 2392056 NR Description: Chain A, Class 3 Aldehyde Dehydrogenase Complex
  misc_feature (1)..(406): Homolog of NCBI NO: 33317836 NR Description: aldehyde dehydrogenase [Oryza sativa (indica
  misc_feature (1)..(405): Homolog of NCBI NO: 17065918 NR Description: aldehyde dehydrogenase [Craterostigma
  misc_feature (1)..(390): Homolog of NCBI NO: 17231164 NR Description: aldehyde dehydrogenase [Nostoc sp. PCC 7120]
  misc_feature (1)..(382): Homolog of NCBI NO: 2392056 NR Description: Chain A, Class 3 Aldehyde Dehydrogenase Complex
  misc_feature (1)..(405): Homolog of NCBI NO: 17065918 NR Description: aldehyde dehydrogenase [Craterostigma
  misc_feature (1)..(408): Homolog of NCBI NO: 18418408 NR Description: putative aldehyde dehydrogenase
  misc_feature (1)..(408): Homolog of NCBI NO: 17065876 NR Description: aldehyde dehydrogenase [Arabidopsis thaliana]
  misc_feature (48)..(408): Homolog of NCBI NO: 7484798 NR Description: aldehyde dehydrogenase (NAD+) homolog F10M10.10 -
  misc_feature (1)..(405): Homolog of NCBI NO: 15219358 NR Description: aldehyde dehydrogenase, putative
  misc_feature (1)..(405): Homolog of NCBI NO: 21536879 NR Description: aldehyde dehydrogenase, putative [Arabidopsis
  misc_feature (1)..(406): Homolog of NCBI NO: 33317836 NR Description: aldehyde dehydrogenase [Oryza sativa (indica
  misc_feature (1)..(382): Homolog of NCBI NO: 14010869 NR Description: Aldehyde dehydrogenase family 3, subfamily A1
  misc_feature (1)..(405): Homolog of NCBI NO: 21536879 NR Description: aldehyde dehydrogenase, putative [Arabidopsis
  misc_feature (1)..(405): Homolog of NCBI NO: 15219358 NR Description: aldehyde dehydrogenase, putative
  misc_feature (48)..(408): Homolog of NCBI NO: 7484798 NR Description: aldehyde dehydrogenase (NAD+) homolog F10M10.10 -
  misc_feature (1)..(408): Homolog of NCBI NO: 17065876 NR Description: aldehyde dehydrogenase [Arabidopsis thaliana]
  misc_feature (1)..(408): Homolog of NCBI NO: 18418408 NR Description: putative aldehyde dehydrogenase

SEQ ID NO: 48896 - DNA, 1913 bp, Arabidopsis thaliana; identical to SEQ ID NO: 42826
  misc_feature (1)..(1913): Ceres Seq. ID no. 13592068
  misc_feature: MA Experiment ID: 108595 Result: Up-regulated in Transcription
  misc_feature: MA Experiment 108595 PARAMETER Experiment Name: At_Ler-pi_Ovule_cDNA_P Parameter: Plant Line Value: null
  misc_feature: MA Experiment ID: 20000070 Result: Down-regulated in Transcription
  misc_feature: MA Experiment 20000070 PARAMETER Experiment Name: At_100uM_ABA_Mutants_cDNA_P Parameter: Plant Line Value: CS24
  misc_feature: MA Experiment 20000070 PARAMETER Experiment Name: At_100uM_ABA_Mutants_cDNA_P Parameter: Timepoint (hr) Value: 6
  misc_feature: MA Experiment 20000070 PARAMETER Experiment Name: At_100uM_ABA_Mutants_cDNA_P Parameter: Tissue Value: Aerial
  misc_feature: MA Experiment 20000070 PARAMETER Experiment Name: At_100uM_ABA_Mutants_cDNA_P Parameter: Treatment Value: 100uM ABA vs. No Treatment
  misc_feature: MA Experiment ID: 20000171 Result: Down-regulated in Transcription
  misc_feature: MA Experiment 20000171 PARAMETER Experiment Name: At_42deg_Heat_P Parameter: Age (day) Value: 14
  misc_feature: MA Experiment 20000171 PARAMETER Experiment Name: At_42deg_Heat_P Parameter: Organism Value: A. thaliana
  misc_feature: MA Experiment 20000171 PARAMETER Experiment Name: At_42deg_Heat_P Parameter: Plant Line Value: WS
  misc_feature: MA Experiment 20000171 PARAMETER Experiment Name: At_42deg_Heat_P Parameter: Temperature (deg C) Value: 42 vs. 22
  misc_feature: MA Experiment 20000171 PARAMETER Experiment Name: At_42deg_Heat_P Parameter: Timepoint (hr) Value: 1
  misc_feature: MA Experiment 20000171 PARAMETER Experiment Name: At_42deg_Heat_P Parameter: Tissue Value: Aerial
  misc_feature: MA Experiment ID: 20000184 Result: Up-regulated in Transcription
  misc_feature: MA Experiment 20000184 PARAMETER Experiment Name: At_Shoots__P Parameter: Age (day) Value: 7
  misc_feature: MA Experiment 20000184 PARAMETER Experiment Name: At_Shoots__P Parameter: Tissue Value: Shoots vs. Whole Plant
  misc_feature: MA Experiment ID: 20000185 Result: Up-regulated in Transcription
  misc_feature: MA Experiment 20000185 PARAMETER Experiment Name: At_Roots__P Parameter: Age (day) Value: 7 vs. 21
  misc_feature: MA Experiment 20000185 PARAMETER Experiment Name: At_Roots__P Parameter: Organism Value: A. thaliana
  misc_feature: MA Experiment 20000185 PARAMETER Experiment Name: At_Roots__P Parameter: Tissue Value: Roots vs. Whole Plant
  misc_feature: MA Experiment ID: 20000227 Result: Up-regulated in Transcription
  misc_feature: MA Experiment 20000227 PARAMETER Experiment Name: At_Root-Tips-vs-Tops_P Parameter: Tissue Value: Root Tips vs. Root Tops
  misc_feature: MA Experiment ID: 20000234 Result: Up-regulated in Transcription
  misc_feature: MA Experiment 20000234 PARAMETER Experiment Name: At_Siliques_P Parameter: Age (day) Value: 21
  misc_feature: MA Experiment 20000234 PARAMETER Experiment Name: At_Siliques_P Parameter: Organism Value: A. thaliana
  misc_feature: MA Experiment 20000234 PARAMETER Experiment Name: At_Siliques_P Parameter: Plant Line Value: WS
  misc_feature: MA Experiment 20000234 PARAMETER Experiment Name: At_Siliques_P Parameter: Tissue Value: Less Than 5mm Siliques vs. Whole Plant
  misc_feature: MA Experiment ID: 20000235 Result: Up-regulated in Transcription
  misc_feature: MA Experiment 20000235 PARAMETER Experiment Name: At_Siliques_P Parameter: Age (day) Value: 21
  misc_feature: MA Experiment 20000235 PARAMETER Experiment Name: At_Siliques_P Parameter: Organism Value: A. thaliana
  misc_feature: MA Experiment 20000235 PARAMETER Experiment Name: At_Siliques_P Parameter: Plant Line Value: WS
  misc_feature: MA Experiment 20000235 PARAMETER Experiment Name: At_Siliques_P Parameter: Tissue Value: 5-10mm Siliques vs. Whole Plant
  misc_feature: MA Experiment ID: 20000264 Result: Up-regulated in Transcription
  misc_feature: MA Experiment 20000264 PARAMETER Experiment Name: At_Open_Flower_P Parameter: Age (day) Value: 21
  misc_feature: MA Experiment 20000264 PARAMETER Experiment Name: At_Open_Flower_P Parameter: Plant Line Value: WS
  misc_feature: MA Experiment 20000264 PARAMETER Experiment Name: At_Open_Flower_P Parameter: Tissue Value: Open Flower vs. Whole Plant
  misc_feature: MA Experiment ID: 20000265 Result: Up-regulated in Transcription
  misc_feature: MA Experiment 20000265 PARAMETER Experiment Name: At_Open_Flower_P Parameter: Age (day) Value: 21
  misc_feature: MA Experiment 20000265 PARAMETER Experiment Name: At_Open_Flower_P Parameter: Plant Line Value: WS
  misc_feature: MA Experiment 20000265 PARAMETER Experiment Name: At_Open_Flower_P Parameter: Tissue Value: Closed Flower vs. Whole Plant
  misc_feature: MA Experiment ID: 20000286 Result: Up-regulated in Transcription
  misc_feature: MA Experiment 20000286 PARAMETER Experiment Name: At_Open_Flower_P Parameter: Age (day) Value: 21
  misc_feature: MA Experiment 20000286 PARAMETER Experiment Name: At_Open_Flower_P Parameter: Plant Line Value: WS
  misc_feature: MA Experiment 20000286 PARAMETER Experiment Name: At_Open_Flower_P Parameter: Tissue Value: Half Open vs. Whole Plant
  misc_feature: MA Experiment ID: 20000438 Result: Up-regulated in Transcription
  misc_feature: MA Experiment 20000438 PARAMETER Experiment Name: At_Shoots__P Parameter: Age (day) Value: 14
  misc_feature: MA Experiment 20000438 PARAMETER Experiment Name: At_Shoots__P Parameter: Tissue Value: Shoots vs. Whole Plant
  misc_feature: MA Experiment ID: 20000439 Result: Up-regulated in Transcription
  misc_feature: MA Experiment 20000439 PARAMETER Experiment Name: At_Roots__P Parameter: Age (day) Value: 14 vs. 21
  misc_feature: MA Experiment 20000439 PARAMETER Experiment Name: At_Roots__P Parameter: Organism Value: A. thaliana
  misc_feature: MA Experiment 20000439 PARAMETER Experiment Name: At_Roots__P Parameter: Tissue Value: Roots vs. Whole Plant
  misc_feature: MA Experiment ID: 20000495 Result: Up-regulated in Transcription
  misc_feature: MA Experiment 20000495 PARAMETER Experiment Name: At_Guard_Cells_P Parameter: Harvest Date Value: 8/2/2002
  misc_feature: MA Experiment 20000495 PARAMETER Experiment Name: At_Guard_Cells_P Parameter: Organism Value: A. thaliana
  misc_feature: MA Experiment 20000495 PARAMETER Experiment Name: At_Guard_Cells_P Parameter: Tissue Value: Guard Cells vs. Leaves
  misc_feature: MA Experiment ID: 20000794 Result: Up-regulated in Transcription
  misc_feature: MA Experiment 20000794 PARAMETER Experiment Name: At_Petals_P Parameter: Age (day) Value: 23-25 days
  misc_feature: MA Experiment 20000794 PARAMETER Experiment Name: At_Petals_P Parameter: Plant Line Value: WS
  misc_feature: MA Experiment 20000794 PARAMETER Experiment Name: At_Petals_P Parameter: Tissue Value: Petals vs. Whole plant

SEQ ID NO: 48897 - protein, 577 aa, Arabidopsis thaliana; identical to SEQ ID NO: 42827
  peptide (1)..(577): Ceres Seq. ID no. 13592069
  misc_feature (266)..(570): Pfam Name: Pectinesterase Pfam Description: Pectinesterase
  misc_feature (266)..(570): Pfam Name: Pectinesterase Pfam Description: Pectinesterase
  misc_feature (23)..(572): Homolog of NCBI NO: 15230019 NR Description: pectinesterase family [Arabidopsis thaliana]
  misc_feature (27)..(572): Homolog of NCBI NO: 15239814 NR Description: pectinesterase family [Arabidopsis thaliana]
  misc_feature (46)..(572): Homolog of NCBI NO: 24250746 NR Description: putative thermostable pectinesterase [Citrus
  misc_feature (259)..(572): Homolog of NCBI NO: 38344075 NR Description: OSJNBa0006B20.19 [Oryza sativa (japonica
  misc_feature (357)..(577): Homolog of NCBI NO: 21554293 NR Description: pectin methylesterase-like protein [Arabidopsis
  misc_feature (23)..(572): Homolog of NCBI NO: 15230019 NR Description: pectinesterase family [Arabidopsis thaliana]
  misc_feature (46)..(572): Homolog of NCBI NO: 24250746 NR Description: putative thermostable pectinesterase [Citrus
  misc_feature (357)..(577): Homolog of NCBI NO: 21554293 NR Description: pectin methylesterase-like protein [Arabidopsis
  misc_feature (27)..(577): Homolog of NCBI NO: 15242495 NR Description: pectinesterase family [Arabidopsis thaliana]
  misc_feature (10)..(577): Homolog of NCBI NO: 22328058 NR Description: pectinesterase family [Arabidopsis thaliana]
  misc_feature (172)..(577): Homolog of NCBI NO: 22135882 NR Description: pectin methylesterase-like protein [Arabidopsis
  misc_feature (32)..(572): Homolog of NCBI NO: 34907404 NR Description: putative pectin methylesterase
  misc_feature (198)..(577): Homolog of NCBI NO: 1552379 NR Description: pectin methylesterase [Silene latifolia subsp.
  misc_feature (259)..(572): Homolog of NCBI NO: 38344075 NR Description: OSJNBa0006B20.19 [Oryza sativa (japonica
  misc_feature (27)..(572): Homolog of NCBI NO: 15239814 NR Description: pectinesterase family [Arabidopsis thaliana]
  misc_feature (198)..(577): Homolog of NCBI NO: 1552379 NR Description: pectin methylesterase [Silene latifolia subsp.
  misc_feature (32)..(572): Homolog of NCBI NO: 34907404 NR Description: putative pectin methylesterase
  misc_feature (172)..(577): Homolog of NCBI NO: 22135882 NR Description: pectin methylesterase-like protein [Arabidopsis
  misc_feature (10)..(577): Homolog of NCBI NO: 22328058 NR Description: pectinesterase family [Arabidopsis thaliana]
  misc_feature (27)..(577): Homolog of NCBI NO: 15242495 NR Description: pectinesterase family [Arabidopsis thaliana]

SEQ ID NO: 48898 - protein, 551 aa, Arabidopsis thaliana; identical to SEQ ID NO: 42828
  peptide (1)..(551): Ceres Seq. ID no. 13592070
  misc_feature (240)..(544): Pfam Name: Pectinesterase Pfam Description: Pectinesterase
  misc_feature (240)..(544): Pfam Name: Pectinesterase Pfam Description: Pectinesterase
  misc_feature (1)..(546): Homolog of NCBI NO: 15230019 NR Description: pectinesterase family [Arabidopsis thaliana]
  misc_feature (1)..(546): Homolog of NCBI NO: 15239814 NR Description: pectinesterase family [Arabidopsis thaliana]
  misc_feature (20)..(546): Homolog of NCBI NO: 24250746 NR Description: putative thermostable pectinesterase [Citrus
  misc_feature (233)..(546): Homolog of NCBI NO: 38344075 NR Description: OSJNBa0006B20.19 [Oryza sativa (japonica
  misc_feature (331)..(551): Homolog of NCBI NO: 21554293 NR Description: pectin methylesterase-like protein [Arabidopsis
  misc_feature (1)..(546): Homolog of NCBI NO: 15230019 NR Description: pectinesterase family [Arabidopsis thaliana]
  misc_feature (20)..(546): Homolog of NCBI NO: 24250746 NR Description: putative thermostable pectinesterase [Citrus
  misc_feature (331)..(551): Homolog of NCBI NO: 21554293 NR Description: pectin methylesterase-like protein [Arabidopsis
  misc_feature (1)..(551): Homolog of NCBI NO: 15242495 NR Description: pectinesterase family [Arabidopsis thaliana]
  misc_feature (1)..(551): Homolog of NCBI NO: 22328058 NR Description: pectinesterase family [Arabidopsis thaliana]
  misc_feature (146)..(551): Homolog of NCBI NO: 22135882 NR Description: pectin methylesterase-like protein [Arabidopsis
  misc_feature (6)..(546): Homolog of NCBI NO: 34907404 NR Description: putative pectin methylesterase
  misc_feature (172)..(551): Homolog of NCBI NO: 1552379 NR Description: pectin methylesterase [Silene latifolia subsp.
  misc_feature (233)..(546): Homolog of NCBI NO: 38344075 NR Description: OSJNBa0006B20.19 [Oryza sativa (japonica
  misc_feature (1)..(546): Homolog of NCBI NO: 15239814 NR Description: pectinesterase family [Arabidopsis thaliana]
  misc_feature (172)..(551): Homolog of NCBI NO: 1552379 NR Description: pectin methylesterase [Silene latifolia subsp.
  misc_feature (6)..(546): Homolog of NCBI NO: 34907404 NR Description: putative pectin methylesterase
  misc_feature (146)..(551): Homolog of NCBI NO: 22135882 NR Description: pectin methylesterase-like protein [Arabidopsis
  misc_feature (1)..(551): Homolog of NCBI NO: 22328058 NR Description: pectinesterase family [Arabidopsis thaliana]
  misc_feature (1)..(551): Homolog of NCBI NO: 15242495 NR Description: pectinesterase family [Arabidopsis thaliana]

SEQ ID NO: 48899 - protein, 406 aa, Arabidopsis thaliana; identical to SEQ ID NO: 42829
  peptide (1)..(406): Ceres Seq. ID no. 13592071
  misc_feature (95)..(399): Pfam Name: Pectinesterase Pfam Description: Pectinesterase
  misc_feature (95)..(399): Pfam Name: Pectinesterase Pfam Description: Pectinesterase
  misc_feature (1)..(401): Homolog of NCBI NO: 15230019 NR Description: pectinesterase family [Arabidopsis thaliana]
  misc_feature (1)..(401): Homolog of NCBI NO: 15239814 NR Description: pectinesterase family [Arabidopsis thaliana]
  misc_feature (1)..(401): Homolog of NCBI NO: 24250746 NR Description: putative thermostable pectinesterase [Citrus
  misc_feature (88)..(401): Homolog of NCBI NO: 38344075 NR Description: OSJNBa0006B20.19 [Oryza sativa (japonica
  misc_feature (186)..(406): Homolog of NCBI NO: 21554293 NR Description: pectin methylesterase-like protein [Arabidopsis
  misc_feature (1)..(401): Homolog of NCBI NO: 15230019 NR Description: pectinesterase family [Arabidopsis thaliana]
  misc_feature (1)..(401): Homolog of NCBI NO: 24250746 NR Description: putative thermostable pectinesterase [Citrus
  misc_feature (186)..(406): Homolog of NCBI NO: 21554293 NR Description: pectin methylesterase-like protein [Arabidopsis
  misc_feature (1)..(406): Homolog of NCBI NO: 15242495 NR Description: pectinesterase family [Arabidopsis thaliana]
  misc_feature (1)..(406): Homolog of NCBI NO: 22328058 NR Description: pectinesterase family [Arabidopsis thaliana]
  misc_feature (1)..(406): Homolog of NCBI NO: 22135882 NR Description: pectin methylesterase-like protein [Arabidopsis
  misc_feature (1)..(401): Homolog of NCBI NO: 34907404 NR Description: putative pectin methylesterase
  misc_feature (27)..(406): Homolog of NCBI NO: 1552379 NR Description: pectin methylesterase [Silene latifolia subsp.
  misc_feature (88)..(401): Homolog of NCBI NO: 38344075 NR Description: OSJNBa0006B20.19 [Oryza sativa (japonica
  misc_feature (1)..(401): Homolog of NCBI NO: 15239814 NR Description: pectinesterase family [Arabidopsis thaliana]
  misc_feature (27)..(406): Homolog of NCBI NO: 1552379 NR Description: pectin methylesterase [Silene latifolia subsp.
  misc_feature (1)..(401): Homolog of NCBI NO: 34907404 NR Description: putative pectin methylesterase
  misc_feature (1)..(406): Homolog of NCBI NO: 22135882 NR Description: pectin methylesterase-like protein [Arabidopsis
  misc_feature (1)..(406): Homolog of NCBI NO: 22328058 NR Description: pectinesterase family [Arabidopsis thaliana]
  misc_feature (1)..(406): Homolog of NCBI NO: 15242495 NR Description: pectinesterase family [Arabidopsis thaliana]

SEQ ID NO: 48900 - DNA, 1919 bp, Arabidopsis thaliana
  misc_feature (1)..(1919): Ceres Seq. ID no. 14313178
  misc_feature: MA Experiment ID: 20000166 Result: Up-regulated in Transcription
  misc_feature: MA Experiment 20000166 PARAMETER Experiment Name: At_100uM_ABA_P Parameter: Age (day) Value: 14
  misc_feature: MA Experiment 20000166 PARAMETER Experiment Name: At_100uM_ABA_P Parameter: Organism Value: A. thaliana
  misc_feature: MA Experiment 20000166 PARAMETER Experiment Name: At_100uM_ABA_P Parameter: Plant Line Value: WS
  misc_feature: MA Experiment 20000166 PARAMETER Experiment Name: At_100uM_ABA_P Parameter: Timepoint (hr) Value: 1
  misc_feature: MA Experiment 20000166 PARAMETER Experiment Name: At_100uM_ABA_P Parameter: Tissue Value: Aerial
  misc_feature: MA Experiment 20000166 PARAMETER Experiment Name: At_100uM_ABA_P Parameter: Treatment Value: 100uM ABA vs. No Treatment
  misc_feature: MA Experiment ID: 20000169 Result: Up-regulated in Transcription
  misc_feature: MA Experiment 20000169 PARAMETER Experiment Name: At_100uM_ABA_P Parameter: Age (day) Value: 14
  misc_feature: MA Experiment 20000169 PARAMETER Experiment Name: At_100uM_ABA_P Parameter: Organism Value: A. thaliana
  misc_feature: MA Experiment 20000169 PARAMETER Experiment Name: At_100uM_ABA_P Parameter: Plant Line Value: WS
  misc_feature: MA Experiment 20000169 PARAMETER Experiment Name: At_100uM_ABA_P Parameter: Timepoint (hr) Value: 6
  misc_feature: MA Experiment 20000169 PARAMETER Experiment Name: At_100uM_ABA_P Parameter: Tissue Value: Aerial
  misc_feature: MA Experiment 20000169 PARAMETER Experiment Name: At_100uM_ABA_P Parameter: Treatment Value: 100uM ABA vs. No Treatment
  misc_feature: MA Experiment ID: 20000184 Result: Down-regulated in Transcription
  misc_feature: MA Experiment 20000184 PARAMETER Experiment Name: At_Shoots__P Parameter: Age (day) Value: 7
  misc_feature: MA Experiment 20000184 PARAMETER Experiment Name: At_Shoots__P Parameter: Tissue Value: Shoots vs. Whole Plant
  misc_feature: MA Experiment ID: 20000185 Result: Up-regulated in Transcription
  misc_feature: MA Experiment 20000185 PARAMETER Experiment Name: At_Roots__P Parameter: Age (day) Value: 7 vs. 21
  misc_feature: MA Experiment 20000185 PARAMETER Experiment Name: At_Roots__P Parameter: Organism Value: A. thaliana
  misc_feature: MA Experiment 20000185 PARAMETER Experiment Name: At_Roots__P Parameter: Tissue Value: Roots vs. Whole Plant
  misc_feature: MA Experiment ID: 20000439 Result: Up-regulated in Transcription
  misc_feature: MA Experiment 20000439 PARAMETER Experiment Name: At_Roots__P Parameter: Age (day) Value: 14 vs. 21
  misc_feature: MA Experiment 20000439 PARAMETER Experiment Name: At_Roots__P Parameter: Organism Value: A. thaliana
  misc_feature: MA Experiment 20000439 PARAMETER Experiment Name: At_Roots__P Parameter: Tissue Value: Roots vs. Whole Plant
  misc_feature: MA Experiment ID: 20001905 Result: Up-regulated in Transcription
  misc_feature: MA Experiment 20001905 PARAMETER Experiment Name: At_Drought_Reproduction_P Parameter: Age (day) Value: 40
  misc_feature: MA Experiment 20001905 PARAMETER Experiment Name: At_Drought_Reproduction_P Parameter: Organism Value: A. thaliana
  misc_feature: MA Experiment 20001905 PARAMETER Experiment Name: At_Drought_Reproduction_P Parameter: Plant Line Value: WS
  misc_feature: MA Experiment 20001905 PARAMETER Experiment Name: At_Drought_Reproduction_P Parameter: Timepoint (day) Value: 10
  misc_feature: MA Experiment 20001905 PARAMETER Experiment Name: At_Drought_Reproduction_P Parameter: Tissue Value: Rosettes
  misc_feature: MA Experiment 20001905 PARAMETER Experiment Name: At_Drought_Reproduction_P Parameter: Treatment Value: Drought vs. No Drought
ggattggaaacatatctcaagcttcttcttcgtgttacgcactttcttcttcttcttctctctctctctttcttcttcgtcttcgatcacagaagacagaattcaatgtcgtcgacctacaagctcaatcatactgattcatttgcaaatggagatgcaaagagtttgttgccgaacccagagaatggtttcactcatttgacttcacttgctcaatcagagaaggctgttcaggagcttcttcttcaacagactcctatgcaggctactgacgaccatctcgttgagttctctgaggctttgagaactgttgcaaaggcactaaggggagctgctgaaggaaaggcgttggctcaagctgaggctgctgaatggaagcgtagatacgagttagagaggtctaagaacgtggagttgcagcataaagaactgtcaaatggagtgtgtgccgatgaatctaatggtcaaaggatggagcacttagcaaagtctccgcggctttatgctcaggaaatcagttctaatggcatggagactatttgctctcatgaagtgctccaagatggtggatttaacagttttaataacaaattgaagaggaaggcatcatttaaactttcatggggatgtaaggggatggctaatgatcaacacaaaaaagaaattgtttcgtttgagagagggaatatcagcacagcagagcgcagtagtaaacagatttcactgacatgggagtctgatccacaaactgtacttattatcactaagcctaattcaacttccgtgcgagttctctctgtggatatggtcagatggttgagaacgcaaaaaggactaaatatttatgtggaacctcgagtaaaggaagaactcttatcagagtcaagttccttcaacttcgtacaaacttgggaagatgacaaggaaatttcacttctacacacaaaggttgaccttcttataactcttggtggggatggcacagtgctatgggctgcatcgatgtttaaaggaccagtgcctccaattgttccattctccatgggatctcttggatttatgactccttttcacagcgaacaataccgagattgtcttgaagcgattttgaagggtcctatcagtataacactacgacacaggttgcagtgtcacatcatcagagataaagcaacacatgaatatgaaccagaagagactatgcttgttctgaatgaagtcaccattgaccgtggaatatcttcttacctcacaaaccttgaatgctactgtgacaactcattcgtcacatgtgtgcaaggcgatggacttatactgtctacaacatctggtagcaccgcgtattcacttgctgctggagggtcaatggtccatcctcaggttcctgggatcttattcacgcctatctgtccgcattctctatcattccgcccactaatattaccggaacacgtgacagtgagagtccaagtgccattcaacagcagaagctccgcttgggtctcctttgatgggaaagaccggaaacagcttgaagcaggggatgcactagtgtgtagcatggcaccatggcccgtctcaaccgcttgtcaagttgaatccactaacgacttcttacgcagcatccacgatggtcttcactggaacctaagaaagactcaatctgctgatggaccttagaaacaaattcctccagcttttttctctttcattcttaaccaataaccatatatagtctcgacgtctatctatctatctatatgcatatagataaatgtgaaatggaaagtgatgggttctgtgagagaatgtggtctgtatccattgttgtgtagagaatgtaataatgtagctgctatgacccataattctgttgatgtgataatcactcaaagttaatgaataaaagatatttctgc

SEQ ID NO: 48901 - protein, 559 aa, Arabidopsis thaliana
  peptide (1)..(559): Ceres Seq. ID no. 14313179
  misc_feature (250)..(532): Pfam Name: ATP-NAD kinase Pfam Description: ATP-NAD kinase
  misc_feature (242)..(554): Homolog of NCBI NO: 28573832 NR Description: CG33156-PB [Drosophila melanogaster]
  misc_feature (242)..(554): Homolog of NCBI NO: 28573826 NR Description: CG33156-PC [Drosophila melanogaster]
  misc_feature (242)..(554): Homolog of NCBI NO: 31201153 NR Description: ENSANGP00000012587 [Anopheles gambiae]
  misc_feature (307)..(331): Homolog of NCBI NO: 34905734 NR Description: putative inorganic polyphosphate/ATP-NAD kinase
  misc_feature (69)..(239): Homolog of NCBI NO: 34905734 NR Description: putative inorganic polyphosphate/ATP-NAD kinase
  misc_feature (359)..(559): Homolog of NCBI NO: 34905734 NR Description: putative inorganic polyphosphate/ATP-NAD kinase
  misc_feature (87)..(559): Homolog of NCBI NO: 11994267 NR Description: contains similarity to unknown
  misc_feature (36)..(559): Homolog of NCBI NO: 39843359 NR Description: NADK1 [Arabidopsis thaliana]
  misc_feature (3)..(559): Homolog of NCBI NO: 20259322 NR Description: unknown protein [Arabidopsis thaliana]
  misc_feature (2)..(559): Homolog of NCBI NO: 22331228 NR Description: expressed protein [Arabidopsis thaliana]
GLETYLKLLLRVTHFLLLLLSLSFFFVFDHRRQNSMSSTYKLNHTDSFANGDAKSLLPNPENGFTHLTSLAQSEKAVQELLLQQTPMQATDDHLVEFSEALRTVAKALRGAAEGKALAQAEAAEWKRRYELERSKNVELQHKELSNGVCADESNGQRMEHLAKSPRLYAQEISSNGMETICSHEVLQDGGFNSFNNKLKRKASFKLSWGCKGMANDQHKKEIVSFERGNISTAERSSKQISLTWESDPQTVLIITKPNSTSVRVLSVDMVRWLRTQKGLNIYVEPRVKEELLSESSSFNFVQTWEDDKEISLLHTKVDLLITLGGDGTVLWAASMFKGPVPPIVPFSMGSLGFMTPFHSEQYRDCLEAILKGPISITLRHRLQCHIIRDKATHEYEPEETMLVLNEVTIDRGISSYLTNLECYCDNSFVTCVQGDGLILSTTSGSTAYSLAAGGSMVHPQVPGILFTPICPHSLSFRPLILPEHVTVRVQVPFNSRSSAWVSFDGKDRKQLEAGDALVCSMAPWPVSTACQVESTNDFLRSIHDGLHWNLRKTQSADGP

SEQ ID NO: 48902 - protein, 524 aa, Arabidopsis thaliana
  peptide (1)..(524): Ceres Seq. ID no. 14313180
  misc_feature (215)..(497): Pfam Name: ATP-NAD kinase Pfam Description: ATP-NAD kinase
  misc_feature (207)..(519): Homolog of NCBI NO: 28573828 NR Description: CG33156-PA [Drosophila melanogaster]
  misc_feature (207)..(519): Homolog of NCBI NO: 28573826 NR Description: CG33156-PC [Drosophila melanogaster]
  misc_feature (207)..(519): Homolog of NCBI NO: 31201153 NR Description: ENSANGP00000012587 [Anopheles gambiae]
  misc_feature (272)..(296): Homolog of NCBI NO: 34905734 NR Description: putative inorganic polyphosphate/ATP-NAD kinase
  misc_feature (34)..(204): Homolog of NCBI NO: 34905734 NR Description: putative inorganic polyphosphate/ATP-NAD kinase
  misc_feature (324)..(524): Homolog of NCBI NO: 34905734 NR Description: putative inorganic polyphosphate/ATP-NAD kinase
  misc_feature (52)..(524): Homolog of NCBI NO: 11994267 NR Description: contains similarity to unknown
  misc_feature (1)..(524): Homolog of NCBI NO: 39843359 NR Description: NADK1 [Arabidopsis thaliana]
  misc_feature (1)..(524): Homolog of NCBI NO: 20259322 NR Description: unknown protein [Arabidopsis thaliana]
  misc_feature (1)..(524): Homolog of NCBI NO: 22331228 NR Description: expressed protein [Arabidopsis thaliana]
MSSTYKLNHTDSFANGDAKSLLPNPENGFTHLTSLAQSEKAVQELLLQQTPMQATDDHLVEFSEALRTVAKALRGAAEGKALAQAEAAEWKRRYELERSKNVELQHKELSNGVCADESNGQRMEHLAKSPRLYAQEISSNGMETICSHEVLQDGGFNSFNNKLKRKASFKLSWGCKGMANDQHKKEIVSFERGNISTAERSSKQISLTWESDPQTVLIITKPNSTSVRVLSVDMVRWLRTQKGLNIYVEPRVKEELLSESSSFNFVQTWEDDKEISLLHTKVDLLITLGGDGTVLWAASMFKGPVPPIVPFSMGSLGFMTPFHSEQYRDCLEAILKGPISITLRHRLQCHIIRDKATHEYEPEETMLVLNEVTIDRGISSYLTNLECYCDNSFVTCVQGDGLILSTTSGSTAYSLAAGGSMVHPQVPGILFTPICPHSLSFRPLILPEHVTVRVQVPFNSRSSAWVSFDGKDRKQLEAGDALVCSMAPWPVSTACQVESTNDFLRSIHDGLHWNLRKTQSADGP

SEQ ID NO: 48903 - protein, 473 aa, Arabidopsis thaliana
  peptide (1)..(473): Ceres Seq. ID no. 14313181
  misc_feature (164)..(446): Pfam Name: ATP-NAD kinase Pfam Description: ATP-NAD kinase
  misc_feature (156)..(468): Homolog of NCBI NO: 28573828 NR Description: CG33156-PA [Drosophila melanogaster]
  misc_feature (156)..(468): Homolog of NCBI NO: 28573826 NR Description: CG33156-PC [Drosophila melanogaster]
  misc_feature (156)..(468): Homolog of NCBI NO: 31201153 NR Description: ENSANGP00000012587 [Anopheles gambiae]
  misc_feature (221)..(245): Homolog of NCBI NO: 34905734 NR Description: putative inorganic polyphosphate/ATP-NAD kinase
  misc_feature (1)..(153): Homolog of NCBI NO: 34905734 NR Description: putative inorganic polyphosphate/ATP-NAD kinase
  misc_feature (273)..(473): Homolog of NCBI NO: 34905734 NR Description: putative inorganic polyphosphate/ATP-NAD kinase
  misc_feature (1)..(473): Homolog of NCBI NO: 11994267 NR Description: contains similarity to unknown
  misc_feature (1)..(473): Homolog of NCBI NO: 39843359 NR Description: NADK1 [Arabidopsis thaliana]
  misc_feature (1)..(473): Homolog of NCBI NO: 20259322 NR Description: unknown protein [Arabidopsis thaliana]
  misc_feature (1)..(473): Homolog of NCBI NO: 22331228 NR Description: expressed protein [Arabidopsis thaliana]
MQATDDHLVEFSEALRTVAKALRGAAEGKALAQAEAAEWKRRYELERSKNVELQHKELSNGVCADESNGQRMEHLAKSPRLYAQEISSNGMETICSHEVLQDGGFNSFNNKLKRKASFKLSWGCKGMANDQHKKEIVSFERGNISTAERSSKQISLTWESDPQTVLIITKPNSTSVRVLSVDMVRWLRTQKGLNIYVEPRVKEELLSESSSFNFVQTWEDDKEISLLHTKVDLLITLGGDGTVLWAASMFKGPVPPIVPFSMGSLGFMTPFHSEQYRDCLEAILKGPISITLRHRLQCHIIRDKATHEYEPEETMLVLNEVTIDRGISSYLTNLECYCDNSFVTCVQGDGLILSTTSGSTAYSLAAGGSMVHPQVPGILFTPICPHSLSFRPLILPEHVTVRVQVPFNSRSSAWVSFDGKDRKQLEAGDALVCSMAPWPVSTACQVESTNDFLRSIHDGLHWNLRKTQSADGP

SEQ ID NO: 48904 - DNA, 1524 bp, Arabidopsis thaliana
  misc_feature (1)..(1524): Ceres Seq. ID no. 14316557
  misc_feature: MA Experiment ID: 20000182 Result: Down-regulated in Transcription
  misc_feature: MA Experiment 20000182 PARAMETER Experiment Name: At_2mM_SA_P Parameter: Age (day) Value: 14
  misc_feature: MA Experiment 20000182 PARAMETER Experiment Name: At_2mM_SA_P Parameter: Organism Value: A. thaliana
  misc_feature: MA Experiment 20000182 PARAMETER Experiment Name: At_2mM_SA_P Parameter: Plant Line Value: WS
  misc_feature: MA Experiment 20000182 PARAMETER Experiment Name: At_2mM_SA_P Parameter: Timepoint (hr) Value: 6
  misc_feature: MA Experiment 20000182 PARAMETER Experiment Name: At_2mM_SA_P Parameter: Tissue Value: Aerial
  misc_feature: MA Experiment 20000182 PARAMETER Experiment Name: At_2mM_SA_P Parameter: Treatment Value: 2mM SA vs. No Treatment
  misc_feature: MA Experiment ID: 20000185 Result: Down-regulated in Transcription
  misc_feature: MA Experiment 20000185 PARAMETER Experiment Name: At_Roots__P Parameter: Age (day) Value: 7 vs. 21
  misc_feature: MA Experiment 20000185 PARAMETER Experiment Name: At_Roots__P Parameter: Organism Value: A. thaliana
  misc_feature: MA Experiment 20000185 PARAMETER Experiment Name: At_Roots__P Parameter: Tissue Value: Roots vs. Whole Plant
  misc_feature: MA Experiment ID: 20000437 Result: Down-regulated in Transcription
  misc_feature: MA Experiment 20000437 PARAMETER Experiment Name: At_Drought_P Parameter: Age (day) Value: 8
  misc_feature: MA Experiment 20000437 PARAMETER Experiment Name: At_Drought_P Parameter: Organism Value: A. thaliana
  misc_feature: MA Experiment 20000437 PARAMETER Experiment Name: At_Drought_P Parameter: Plant Line Value: WS
  misc_feature: MA Experiment 20000437 PARAMETER Experiment Name: At_Drought_P Parameter: Timepoint (hr) Value: 24
  misc_feature: MA Experiment 20000437 PARAMETER Experiment Name: At_Drought_P Parameter: Tissue Value: Whole Plant
  misc_feature: MA Experiment 20000437 PARAMETER Experiment Name: At_Drought_P Parameter: Treatment Value: Drought vs. No Drought
  misc_feature: MA Experiment ID: 20000438 Result: Up-regulated in Transcription
  misc_feature: MA Experiment 20000438 PARAMETER Experiment Name: At_Shoots__P Parameter: Age (day) Value: 14
  misc_feature: MA Experiment 20000438 PARAMETER Experiment Name: At_Shoots__P Parameter: Tissue Value: Shoots vs. Whole Plant
  misc_feature: MA Experiment ID: 20000445 Result: Down-regulated in Transcription
  misc_feature: MA Experiment 20000445 PARAMETER Experiment Name: At_100uM_NAA__P Parameter: Age (day) Value: 14
  misc_feature: MA Experiment 20000445 PARAMETER Experiment Name: At_100uM_NAA__P Parameter: Organism Value: A. thaliana
  misc_feature: MA Experiment 20000445 PARAMETER Experiment Name: At_100uM_NAA__P Parameter: Plant Line Value: WS
  misc_feature: MA Experiment 20000445 PARAMETER Experiment Name: At_100uM_NAA__P Parameter: Timepoint (hr) Value: 6
  misc_feature: MA Experiment 20000445 PARAMETER Experiment Name: At_100uM_NAA__P Parameter: Tissue Value: Aerial
  misc_feature: MA Experiment 20000445 PARAMETER Experiment Name: At_100uM_NAA__P Parameter: Treatment Value: 100uM NAA vs. No Treatment
  misc_feature: MA Experiment ID: 20000451 Result: Up-regulated in Transcription
  misc_feature: MA Experiment 20000451 PARAMETER Experiment Name: At_CS6879_Shoots-Roots_P Parameter: Age (day) Value: 14
  misc_feature: MA Experiment 20000451 PARAMETER Experiment Name: At_CS6879_Shoots-Roots_P Parameter: Organism Value: A. thaliana
  misc_feature: MA Experiment 20000451 PARAMETER Experiment Name: At_CS6879_Shoots-Roots_P Parameter: Plant Line Value: CS6879 vs. WS
  misc_feature: MA Experiment 20000451 PARAMETER Experiment Name: At_CS6879_Shoots-Roots_P Parameter: Tissue Value: Roots
  misc_feature: MA Experiment ID: 20001247 Result: Down-regulated in Transcription
  misc_feature: MA Experiment 20001247 PARAMETER Experiment Name: At_Far-red-induction_P Parameter: Age (day) Value: 7
  misc_feature: MA Experiment 20001247 PARAMETER Experiment Name: At_Far-red-induction_P Parameter: Light Value: Far-red vs. White
  misc_feature: MA Experiment 20001247 PARAMETER Experiment Name: At_Far-red-induction_P Parameter: Organism Value: A. thaliana
  misc_feature: MA Experiment 20001247 PARAMETER Experiment Name: At_Far-red-induction_P Parameter: Plant Line Value: Columbia
  misc_feature: MA Experiment 20001247 PARAMETER Experiment Name: At_Far-red-induction_P Parameter: Timepoint (hr) Value: 1
  misc_feature: MA Experiment 20001247 PARAMETER Experiment Name: At_Far-red-induction_P Parameter: Tissue Value: Whole Plant
  misc_feature: MA Experiment ID: 20001248 Result: Down-regulated in Transcription
  misc_feature: MA Experiment 20001248 PARAMETER Experiment Name: At_Far-red-induction_P Parameter: Age (day) Value: 7
  misc_feature: MA Experiment 20001248 PARAMETER Experiment Name: At_Far-red-induction_P Parameter: Light Value: Far-red vs. White
  misc_feature: MA Experiment 20001248 PARAMETER Experiment Name: At_Far-red-induction_P Parameter: Organism Value: A. thaliana
  misc_feature: MA Experiment 20001248 PARAMETER Experiment Name: At_Far-red-induction_P Parameter: Plant Line Value: Columbia
  misc_feature: MA Experiment 20001248 PARAMETER Experiment Name: At_Far-red-induction_P Parameter: Timepoint (hr) Value: 4
  misc_feature: MA Experiment 20001248 PARAMETER Experiment Name: At_Far-red-induction_P Parameter: Tissue Value: Whole Plant
  misc_feature: MA Experiment ID: 20001450 Result: Down-regulated in Transcription
  misc_feature: MA Experiment 20001450 PARAMETER Experiment Name: At_Far-red-induction_P Parameter: Age (day) Value: 7
  misc_feature: MA Experiment 20001450 PARAMETER Experiment Name: At_Far-red-induction_P Parameter: Light Value: Far-red vs. White
  misc_feature: MA Experiment 20001450 PARAMETER Experiment Name: At_Far-red-induction_P Parameter: Organism Value: A. thaliana
  misc_feature: MA Experiment 20001450 PARAMETER Experiment Name: At_Far-red-induction_P Parameter: Plant Line Value: Columbia
  misc_feature: MA Experiment 20001450 PARAMETER Experiment Name: At_Far-red-induction_P Parameter: Timepoint (hr) Value: 8
  misc_feature: MA Experiment 20001450 PARAMETER Experiment Name: At_Far-red-induction_P Parameter: Tissue Value: Whole Plant
  misc_feature: MA Experiment ID: 20001560 Result: Up-regulated in Transcription
  misc_feature: MA Experiment 20001560 PARAMETER Experiment Name: At_Drought_Soil_Dry_P Parameter: Age (day) Value: 28
  misc_feature: MA Experiment 20001560 PARAMETER Experiment Name: At_Drought_Soil_Dry_P Parameter: Organism Value: A. thaliana
  misc_feature: MA Experiment 20001560 PARAMETER Experiment Name: At_Drought_Soil_Dry_P Parameter: Plant Line Value: WS
  misc_feature: MA Experiment 20001560 PARAMETER Experiment Name: At_Drought_Soil_Dry_P Parameter: Post Timepoint (hr) Value: None
  misc_feature: MA Experiment 20001560 PARAMETER Experiment Name: At_Drought_Soil_Dry_P Parameter: Post-Treatment Value: None
  misc_feature: MA Experiment 20001560 PARAMETER Experiment Name: At_Drought_Soil_Dry_P Parameter: Timepoint (day) Value: 14
  misc_feature: MA Experiment 20001560 PARAMETER Experiment Name: At_Drought_Soil_Dry_P Parameter: Treatment Value: Drought vs. No Drought
  misc_feature: MA Experiment ID: 20001756 Result: Up-regulated in Transcription
  misc_feature: MA Experiment 20001756 PARAMETER Experiment Name: At_50mM_NH4NO3_L-to-H_P Parameter: Timepoint (hr) Value: 4
  misc_feature: MA Experiment 20001756 PARAMETER Experiment Name: At_50mM_NH4NO3_L-to-H_P Parameter: Tissue Value: Leaf
  misc_feature: MA Experiment 20001756 PARAMETER Experiment Name: At_50mM_NH4NO3_L-to-H_P Parameter: Treatment Value: 50mM NH4NO3 vs 100mM Mannitol
  misc_feature: MA Experiment ID: 20001905 Result: Down-regulated in Transcription
  misc_feature: MA Experiment 20001905 PARAMETER Experiment Name: At_Drought_Reproduction_P Parameter: Age (day) Value: 40
  misc_feature: MA Experiment 20001905 PARAMETER Experiment Name: At_Drought_Reproduction_P Parameter: Organism Value: A. thaliana
  misc_feature: MA Experiment 20001905 PARAMETER Experiment Name: At_Drought_Reproduction_P Parameter: Plant Line Value: WS
  misc_feature: MA Experiment 20001905 PARAMETER Experiment Name: At_Drought_Reproduction_P Parameter: Timepoint (day) Value: 10
  misc_feature: MA Experiment 20001905 PARAMETER Experiment Name: At_Drought_Reproduction_P Parameter: Tissue Value: Rosettes
  misc_feature: MA Experiment 20001905 PARAMETER Experiment Name: At_Drought_Reproduction_P Parameter: Treatment Value: Drought vs. No Drought
gatccattacaaggccacattaacccaatgatccaactcgctaaacgcttatccaaaaagggcatcaccagcacactcatcatcgcctccaaagaccaccgtgaaccttacacctccgacgactactccatcaccgtccacaccatccacgacggtttctttccacatgaacaccctcacgccaagttcgtagatcttgaccgtttccacaactctacttctcgaagcctgaccgatttcatctctagtgcgaagttgtcggacaatcctccaaaagctctgatctatgatccatttatgccctttgcattggacatagccaaggacttggatctatacgtagtggcatatttcactcaaccatggttggctagtcttgtttactaccatatcaacgaaggcacctacgatgttcccgttgatagacacgagaacccaacacttgcatcgtttcctggtttcccattgttaagccaagatgatctgccttcgttcgcctgcgaaaaagggtcgtaccctcttctacacgagtttgtggttaggcaattctctaatttattgcaagctgattgcattctctgcaacacttttgatcaacttgaaccaaaggtagtgaaatggatgaatgatcaatggccggtgaagaacattggaccggtggttccatcgaagttcttggataaccggttgccagaagacaaagattacgaactcgagaactccaagacagagccagacgagtctgttttgaagtggttgggaaacaggccggcgaagtcggtggtttacgtggcgtttgggacattggtggctttgagcgaaaaacagatgaaggaaattgcaatggcgattagccaaaccggatatcacttcttgtggtctgttagagaatccgagagaagcaaactaccctctggttttatcgaagaggcagaggagaaagactctggacttgtggctaagtgggttcctcagctagaggttttagcacatgaatcaatcgggtgtttcgtgtcacactgtggatggaactcgacattggaggcactatgcttaggggttccaatggtgggcgtgcctcagtggactgatcagcccacaaatgctaagtttatagaggatgtgtggaagattggggttagagtgaggaccgatggagaagggctttcgagtaaagaagagattgcgagatgcattgttgaggtcatggaaggagagagagggaaagagataaggaagaatgttgagaagcttaaggtgttggctcgcgaagctatctctgaaggaggtagttccgacaagaagattgatgagtttgttgctcttttgacttaacaatttgaaactgagatgtcatcagtttgttagttgattacctaataacggcttctttgtcatctaaatttgaattatcctgttggttccattggttgtcccctgcgaacaaatccatatatgaactctgtattaaaaaacggagatgtttgaatttgaagcataacaagaataaagagctttcttgat

SEQ ID NO: 48905 - protein, 444 aa, Arabidopsis thaliana
  peptide (1)..(444): Ceres Seq. ID no. 14316558
  misc_feature (2)..(444): Pfam Name: UDP-glucoronosyl and UDP-glucosyl transferase Pfam Description: UDP-glucoronosyl and UDP-glucosyl transferase
  misc_feature (2)..(443): Homolog of NCBI NO: 15221668 NR Description: UDP-glycosyltransferase family [Arabidopsis
  misc_feature (2)..(443): Homolog of NCBI NO: 15824451 NR Description: thiohydroximate S-glucosyltransferase [Brassica
  misc_feature (2)..(441): Homolog of NCBI NO: 15224372 NR Description: glycosyltransferase family [Arabidopsis thaliana]
  misc_feature (2)..(441): Homolog of NCBI NO: 15224368 NR Description: glycosyltransferase family [Arabidopsis thaliana]
  misc_feature (2)..(443): Homolog of NCBI NO: 7385017 NR Description: UDP-glucose:salicylic acid glucosyltransferase
  misc_feature (2)..(441): Homolog of NCBI NO: 15225134 NR Description: glycosyltransferase family [Arabidopsis thaliana]
  misc_feature (2)..(441): Homolog of NCBI NO: 21536917 NR Description: putative glucosyltransferase [Arabidopsis
  misc_feature (2)..(427): Homolog of NCBI NO: 15221232 NR Description: indole-3-acetate beta-glucosyltransferase
  misc_feature (2)..(442): Homolog of NCBI NO: 15221233 NR Description: glycosyltransferase family [Arabidopsis thaliana]
  misc_feature (2)..(444): Homolog of NCBI NO: 15225138 NR Description: UDP-glycosyltransferase family [Arabidopsis
DPLQGHINPMIQLAKRLSKKGITSTLIIASKDHREPYTSDDYSITVHTIHDGFFPHEHPHAKFVDLDRFHNSTSRSLTDFISSAKLSDNPPKALIYDPFMPFALDIAKDLDLYVVAYFTQPWLASLVYYHINEGTYDVPVDRHENPTLASFPGFPLLSQDDLPSFACEKGSYPLLHEFVVRQFSNLLQADCILCNTFDQLEPKVVKWMNDQWPVKNIGPVVPSKFLDNRLPEDKDYELENSKTEPDESVLKWLGNRPAKSVVYVAFGTLVALSEKQMKEIAMAISQTGYHFLWSVRESERSKLPSGFIEEAEEKDSGLVAKWVPQLEVLAHESIGCFVSHCGWNSTLEALCLGVPMVGVPQWTDQPTNAKFIEDVWKIGVRVRTDGEGLSSKEEIARCIVEVMEGERGKEIRKNVEKLKVLAREAISEGGSSDKKIDEFVALLT

SEQ ID NO: 48906 - protein, 435 aa, Arabidopsis thaliana; identical to SEQ ID NO: 48097
  peptide (1)..(435): Ceres Seq. ID no. 14316559
  misc_feature (1)..(435): Pfam Name: UDP-glucoronosyl and UDP-glucosyl transferase Pfam Description: UDP-glucoronosyl and UDP-glucosyl transferase
  misc_feature (1)..(434): Homolog of NCBI NO: 15221668 NR Description: UDP-glycosyltransferase family [Arabidopsis
  misc_feature (1)..(434): Homolog of NCBI NO: 15824451 NR Description: thiohydroximate S-glucosyltransferase [Brassica
  misc_feature (1)..(432): Homolog of NCBI NO: 15224372 NR Description: glycosyltransferase family [Arabidopsis thaliana]
  misc_feature (1)..(432): Homolog of NCBI NO: 15224368 NR Description: glycosyltransferase family [Arabidopsis thaliana]
  misc_feature (1)..(434): Homolog of NCBI NO: 7385017 NR Description: UDP-glucose:salicylic acid glucosyltransferase
  misc_feature (1)..(432): Homolog of NCBI NO: 15225134 NR Description: glycosyltransferase family [Arabidopsis thaliana]
  misc_feature (1)..(432): Homolog of NCBI NO: 21536917 NR Description: putative glucosyltransferase [Arabidopsis
  misc_feature (1)..(418): Homolog of NCBI NO: 15221232 NR Description: indole-3-acetate beta-glucosyltransferase
  misc_feature (1)..(433): Homolog of NCBI NO: 15221233 NR Description: glycosyltransferase family [Arabidopsis thaliana]
  misc_feature (1)..(435): Homolog of NCBI NO: 15225138 NR Description: UDP-glycosyltransferase family [Arabidopsis

SEQ ID NO: 48907 - protein, 345 aa, Arabidopsis thaliana
  peptide (1)..(345): Ceres Seq. ID no. 14316560
  misc_feature (1)..(345): Pfam Name: UDP-glucoronosyl and UDP-glucosyl transferase Pfam Description: UDP-glucoronosyl and UDP-glucosyl transferase
  misc_feature (1)..(344): Homolog of NCBI NO: 15221668 NR Description: UDP-glycosyltransferase family [Arabidopsis
  misc_feature (1)..(344): Homolog of NCBI NO: 15824451 NR Description: thiohydroximate S-glucosyltransferase [Brassica
  misc_feature (1)..(342): Homolog of NCBI NO: 15224372 NR Description: glycosyltransferase family [Arabidopsis thaliana]
  misc_feature (1)..(342): Homolog of NCBI NO: 15224368 NR Description: glycosyltransferase family [Arabidopsis thaliana]
  misc_feature (1)..(344): Homolog of NCBI NO: 7385017 NR Description: UDP-glucose:salicylic acid glucosyltransferase
  misc_feature (1)..(342): Homolog of NCBI NO: 15225134 NR Description: glycosyltransferase family [Arabidopsis thaliana]
  misc_feature (1)..(342): Homolog of NCBI NO: 21536917 NR Description: putative glucosyltransferase [Arabidopsis
  misc_feature (1)..(328): Homolog of NCBI NO: 15221232 NR Description: indole-3-acetate beta-glucosyltransferase
  misc_feature (1)..(343): Homolog of NCBI NO: 15221233 NR Description: glycosyltransferase family [Arabidopsis thaliana]
  misc_feature (1)..(345): Homolog of NCBI NO: 15225138 NR Description: UDP-glycosyltransferase family [Arabidopsis
MPFALDIAKDLDLYVVAYFTQPWLASLVYYHINEGTYDVPVDRHENPTLASFPGFPLLSQDDLPSFACEKGSYPLLHEFVVRQFSNLLQADCILCNTFDQLEPKVVKWMNDQWPVKNIGPVVPSKFLDNRLPEDKDYELENSKTEPDESVLKWLGNRPAKSVVYVAFGTLVALSEKQMKEIAMAISQTGYHFLWSVRESERSKLPSGFIEEAEEKDSGLVAKWVPQLEVLAHESIGCFVSHCGWNSTLEALCLGVPMVGVPQWTDQPTNAKFIEDVWKIGVRVRTDGEGLSSKEEIARCIVEVMEGERGKEIRKNVEKLKVLAREAISEGGSSDKKIDEFVALLT

SEQ ID NO: 48908 - DNA, 922 bp, Arabidopsis thaliana
  misc_feature (1)..(922): Ceres Seq. ID no. 13579117
  misc_feature: MA Experiment ID: 20000184 Result: Up-regulated in Transcription
  misc_feature: MA Experiment 20000184 PARAMETER Experiment Name: At_Shoots__P Parameter: Age (day) Value: 7
  misc_feature: MA Experiment 20000184 PARAMETER Experiment Name: At_Shoots__P Parameter: Tissue Value: Shoots vs. Whole Plant
  misc_feature: MA Experiment ID: 20000235 Result: Up-regulated in Transcription
  misc_feature: MA Experiment 20000235 PARAMETER Experiment Name: At_Siliques_P Parameter: Age (day) Value: 21
  misc_feature: MA Experiment 20000235 PARAMETER Experiment Name: At_Siliques_P Parameter: Organism Value: A. thaliana
  misc_feature: MA Experiment 20000235 PARAMETER Experiment Name: At_Siliques_P Parameter: Plant Line Value: WS
  misc_feature: MA Experiment 20000235 PARAMETER Experiment Name: At_Siliques_P Parameter: Tissue Value: 5-10mm Siliques vs. Whole Plant
  misc_feature: MA Experiment ID: 20000264 Result: Up-regulated in Transcription
  misc_feature: MA Experiment 20000264 PARAMETER Experiment Name: At_Open_Flower_P Parameter: Age (day) Value: 21
  misc_feature: MA Experiment 20000264 PARAMETER Experiment Name: At_Open_Flower_P Parameter: Plant Line Value: WS
  misc_feature: MA Experiment 20000264 PARAMETER Experiment Name: At_Open_Flower_P Parameter: Tissue Value: Open Flower vs. Whole Plant
  misc_feature: MA Experiment ID: 20000527 Result: Down-regulated in Transcription
  misc_feature: MA Experiment 20000527 PARAMETER Experiment Name: At_10percent_PEG_P Parameter: Age (day) Value: 20
  misc_feature: MA Experiment 20000527 PARAMETER Experiment Name: At_10percent_PEG_P Parameter: Organism Value: A. thaliana
  misc_feature: MA Experiment 20000527 PARAMETER Experiment Name: At_10percent_PEG_P Parameter: Plant Line Value: WS
  misc_feature: MA Experiment 20000527 PARAMETER Experiment Name: At_10percent_PEG_P Parameter: Timepoint (day) Value: 20
  misc_feature: MA Experiment 20000527 PARAMETER Experiment Name: At_10percent_PEG_P Parameter: Tissue Value: Whole Plant
  misc_feature: MA Experiment 20000527 PARAMETER Experiment Name: At_10percent_PEG_P Parameter: Treatment Value: 10percent PEG vs. No Treatment
  misc_feature: MA Experiment ID: 20001450 Result: Down-regulated in Transcription
  misc_feature: MA Experiment 20001450 PARAMETER Experiment Name: At_Far-red-induction_P Parameter: Age (day) Value: 7
  misc_feature: MA Experiment 20001450 PARAMETER Experiment Name: At_Far-red-induction_P Parameter: Light Value: Far-red vs. White
  misc_feature: MA Experiment 20001450 PARAMETER Experiment Name: At_Far-red-induction_P Parameter: Organism Value: A. thaliana
  misc_feature: MA Experiment 20001450 PARAMETER Experiment Name: At_Far-red-induction_P Parameter: Plant Line Value: Columbia
  misc_feature: MA Experiment 20001450 PARAMETER Experiment Name: At_Far-red-induction_P Parameter: Timepoint (hr) Value: 8
  misc_feature: MA Experiment 20001450 PARAMETER Experiment Name: At_Far-red-induction_P Parameter: Tissue Value: Whole Plant
  misc_feature: MA Experiment ID: 20001458 Result: Up-regulated in Transcription
  misc_feature: MA Experiment 20001458 PARAMETER Experiment Name: At_50mM_NH4NO3_L-to-H_P Parameter: Age (day) Value: Undefined
  misc_feature: MA Experiment 20001458 PARAMETER Experiment Name: At_50mM_NH4NO3_L-to-H_P Parameter: Organism Value: Undefined
  misc_feature: MA Experiment 20001458 PARAMETER Experiment Name: At_50mM_NH4NO3_L-to-H_P Parameter: Plant Line Value: Undefined
  misc_feature: MA Experiment 20001458 PARAMETER Experiment Name: At_50mM_NH4NO3_L-to-H_P Parameter: Timepoint (hr) Value: 2
  misc_feature: MA Experiment 20001458 PARAMETER Experiment Name: At_50mM_NH4NO3_L-to-H_P Parameter: Tissue Value: Siliques
  misc_feature: MA Experiment 20001458 PARAMETER Experiment Name: At_50mM_NH4NO3_L-to-H_P Parameter: Treatment Value: 50mM NH4NO3 vs. 100mM Manitol
  misc_feature: MA Experiment ID: 20001556 Result: Up-regulated in Transcription
  misc_feature: MA Experiment 20001556 PARAMETER Experiment Name: At_Drought_Soil_Dry_P Parameter: Age (day) Value: 26
  misc_feature: MA Experiment 20001556 PARAMETER Experiment Name: At_Drought_Soil_Dry_P Parameter: Organism Value: A. thaliana
  misc_feature: MA Experiment 20001556 PARAMETER Experiment Name: At_Drought_Soil_Dry_P Parameter: Plant Line Value: WS
  misc_feature: MA Experiment 20001556 PARAMETER Experiment Name: At_Drought_Soil_Dry_P Parameter: Post Timepoint (hr) Value: None
  misc_feature: MA Experiment 20001556 PARAMETER Experiment Name: At_Drought_Soil_Dry_P Parameter: Post-Treatment Value: None
  misc_feature: MA Experiment 20001556 PARAMETER Experiment Name: At_Drought_Soil_Dry_P Parameter: Timepoint (day) Value: 12
  misc_feature: MA Experiment 20001556 PARAMETER Experiment Name: At_Drought_Soil_Dry_P Parameter: Treatment Value: Drought vs. No Drought
  misc_feature: MA Experiment ID: 20001756 Result: Up-regulated in Transcription
  misc_feature: MA Experiment 20001756 PARAMETER Experiment Name: At_50mM_NH4NO3_L-to-H_P Parameter: Timepoint (hr) Value: 4
  misc_feature: MA Experiment 20001756 PARAMETER Experiment Name: At_50mM_NH4NO3_L-to-H_P Parameter: Tissue Value: Leaf
  misc_feature: MA Experiment 20001756 PARAMETER Experiment Name: At_50mM_NH4NO3_L-to-H_P Parameter: Treatment Value: 50mM NH4NO3 vs 100mM Mannitol
  misc_feature: MA Experiment ID: 20001911 Result: Down-regulated in Transcription
  misc_feature: MA Experiment 20001911 PARAMETER Experiment Name: At_Drought_Reproduction_P Parameter: Age (day) Value: 40
  misc_feature: MA Experiment 20001911 PARAMETER Experiment Name: At_Drought_Reproduction_P Parameter: Organism Value: A. thaliana
  misc_feature: MA Experiment 20001911 PARAMETER Experiment Name: At_Drought_Reproduction_P Parameter: Plant Line Value: WS
  misc_feature: MA Experiment 20001911 PARAMETER Experiment Name: At_Drought_Reproduction_P Parameter: Timepoint (day) Value: 10
  misc_feature: MA Experiment 20001911 PARAMETER Experiment Name: At_Drought_Reproduction_P Parameter: Tissue Value: Flowers
  misc_feature: MA Experiment 20001911 PARAMETER Experiment Name: At_Drought_Reproduction_P Parameter: Treatment Value: Drought vs. No Drought
aaaatatcacattctttcttcttctcattttctctaaagattgttgtttgtgtgtgaggctaaggatcaaagatggttttgtgggtatttggatatggttctttgatctggaacccaggttttgattttgatgaaaaactcattggttatatcaaggactataaacgtgtcttcgatctagcgtgtattgatcatagaggtactcctgaacatcctgctaggacttgtacgctggagcaatccaccggagctatttgctggggtgctgcttattgtgttcgtggaggaccagagaaagagaaactagcaatggagtacttggaacgaagagagtgtgaatacgactcaaaaacacttgttgagttttacactgaaaatgacacttccacgccaatcgttaccggagttattgtcttcacgtcaacaccagacaaagtgtcgaacaaatactacttaggtccagctccattggaagaaatggcgaggcaaatcgctacggcttcgggaccttgtgggaacaaccgagagtatcttttcaagctagagaaagcaatgttcgacattgagcatgaggaagagtatgtgattgagttagcgaatgaggttaggaagcaactcgatttaccggaggaagtgaaggcattgttgaagcctattgtttctcatgtatccgtcaagtctcaagctcatgtttccactcgtcaacgggtctttgcatcatgaagacagcaaaagttatggagctaacttaaaaaagcattgtggtgacgaggctaatgttaactctttatctttcagcttaatatttgatcacatcttgaccttgagatgttttgttttgctctgcatttattgagaattcataacattgtatgatatgagatgcaatttatgagaataataaccgatctttagctctgcc

SEQ ID NO: 48909 - protein, 216 aa, Arabidopsis thaliana
  peptide (1)..(216): Ceres Seq. ID no. 13579118
  misc_feature (3)..(181): Pfam Name: ChaC-like protein Pfam Description: ChaC-like protein
  misc_feature (1)..(188): Homolog of NCBI NO: 18401334 NR Description: expressed protein [Arabidopsis thaliana]
  misc_feature (1)..(183): Homolog of NCBI NO: 38344831 NR Description: OSJNBa0064H22.12 [Oryza sativa (japonica
  misc_feature (148)..(213): Homolog of NCBI NO: 7486662 NR Description: hypothetical protein F8F16.110 - Arabidopsis
  misc_feature (1)..(164): Homolog of NCBI NO: 7486662 NR Description: hypothetical protein F8F16.110 - Arabidopsis
  misc_feature (1)..(213): Homolog of NCBI NO: 27525010 NR Description: putative cation transporter [Beta procumbens]
  misc_feature (1)..(213): Homolog of NCBI NO: 21593515 NR Description: unknown [Arabidopsis thaliana]
  misc_feature (1)..(213): Homolog of NCBI NO: 18417778 NR Description: expressed protein [Arabidopsis thaliana]
  misc_feature (1)..(81): Homolog of NCBI NO: 7486723 NR Description: hypothetical protein F9D12.14 - Arabidopsis
  misc_feature (101)..(216): Homolog of NCBI NO: 7486723 NR Description: hypothetical protein F9D12.14 - Arabidopsis
  misc_feature (1)..(216): Homolog of NCBI NO: 15239626 NR Description: expressed protein [Arabidopsis thaliana]
MVLWVFGYGSLIWNPGFDFDEKLIGYIKDYKRVFDLACIDHRGTPEHPARTCTLEQSTGAICWGAAYCVRGGPEKEKLAMEYLERRECEYDSKTLVEFYTENDTSTPIVTGVIVFTSTPDKVSNKYYLGPAPLEEMARQIATASGPCGNNREYLFKLEKAMFDIEHEEEYVIELANEVRKQLDLPEEVKALLKPIVSHVSVKSQAHVSTRQRVFAS

SEQ ID NO: 48910 - protein, 137 aa, Arabidopsis thaliana
  peptide (1)..(137): Ceres Seq. ID no. 13579119
  misc_feature (1)..(102): Pfam Name: ChaC-like protein Pfam Description: ChaC-like protein
  misc_feature (1)..(109): Homolog of NCBI NO: 12083292 NR Description: unknown protein [Arabidopsis thaliana]
  misc_feature (1)..(109): Homolog of NCBI NO: 18401334 NR Description: expressed protein [Arabidopsis thaliana]
  misc_feature (1)..(104): Homolog of NCBI NO: 38344831 NR Description: OSJNBa0064H22.12 [Oryza sativa (japonica
  misc_feature (69)..(134): Homolog of NCBI NO: 7486662 NR Description: hypothetical protein F8F16.110 - Arabidopsis
  misc_feature (1)..(85): Homolog of NCBI NO: 7486662 NR Description: hypothetical protein F8F16.110 - Arabidopsis
  misc_feature (1)..(134): Homolog of NCBI NO: 27525010 NR Description: putative cation transporter [Beta procumbens]
  misc_feature (1)..(134): Homolog of NCBI NO: 21593515 NR Description: unknown [Arabidopsis thaliana]
  misc_feature (1)..(134): Homolog of NCBI NO: 18417778 NR Description: expressed protein [Arabidopsis thaliana]
  misc_feature (22)..(137): Homolog of NCBI NO: 7486723 NR Description: hypothetical protein F9D12.14 - Arabidopsis
  misc_feature (1)..(137): Homolog of NCBI NO: 15239626 NR Description: expressed protein [Arabidopsis thaliana]
MEYLERRECEYDSKTLVEFYTENDTSTPIVTGVIVFTSTPDKVSNKYYLGPAPLEEMARQIATASGPCGNNREYLFKLEKAMFDIEHEEEYVIELANEVRKQLDLPEEVKALLKPIVSHVSVKSQAHVSTRQRVFAS

SEQ ID NO: 48911 - DNA, 1245 bp, Arabidopsis thaliana; identical to SEQ ID NO: 36382
  misc_feature (1)..(1245): Ceres Seq. ID no. 12600816
  misc_feature: MA Experiment ID: 20000173 Result: Down-regulated in Transcription
  misc_feature: MA Experiment 20000173 PARAMETER Experiment Name: At_42deg_Heat_P Parameter: Age (day) Value: 14
  misc_feature: MA Experiment 20000173 PARAMETER Experiment Name: At_42deg_Heat_P Parameter: Organism Value: A. thaliana
  misc_feature: MA Experiment 20000173 PARAMETER Experiment Name: At_42deg_Heat_P Parameter: Plant Line Value: WS
  misc_feature: MA Experiment 20000173 PARAMETER Experiment Name: At_42deg_Heat_P Parameter: Temperature (deg C) Value: 42 vs. 22
  misc_feature: MA Experiment 20000173 PARAMETER Experiment Name: At_42deg_Heat_P Parameter: Timepoint (hr) Value: 6
  misc_feature: MA Experiment 20000173 PARAMETER Experiment Name: At_42deg_Heat_P Parameter: Tissue Value: Aerial
  misc_feature: MA Experiment ID: 20000180 Result: Up-regulated in Transcription
  misc_feature: MA Experiment 20000180 PARAMETER Experiment Name: At_Germinating_Seeds_P Parameter: Age (hr) Value: 24 vs. 0
  misc_feature: MA Experiment 20000180 PARAMETER Experiment Name: At_Germinating_Seeds_P Parameter: Tissue Value: Germinating Seeds
  misc_feature: MA Experiment ID: 20000184 Result: Down-regulated in Transcription
  misc_feature: MA Experiment 20000184 PARAMETER Experiment Name: At_Shoots__P Parameter: Age (day) Value: 7
  misc_feature: MA Experiment 20000184 PARAMETER Experiment Name: At_Shoots__P Parameter: Tissue Value: Shoots vs. Whole Plant
  misc_feature: MA Experiment ID: 20000185 Result: Down-regulated in Transcription
  misc_feature: MA Experiment 20000185 PARAMETER Experiment Name: At_Roots__P Parameter: Age (day) Value: 7 vs. 21
  misc_feature: MA Experiment 20000185 PARAMETER Experiment Name: At_Roots__P Parameter: Organism Value: A. thaliana
  misc_feature: MA Experiment 20000185 PARAMETER Experiment Name: At_Roots__P Parameter: Tissue Value: Roots vs. Whole Plant
  misc_feature: MA Experiment ID: 20000227 Result: Up-regulated in Transcription
  misc_feature: MA Experiment 20000227 PARAMETER Experiment Name: At_Root-Tips-vs-Tops_P Parameter: Tissue Value: Root Tips vs. Root Tops
  misc_feature: MA Experiment ID: 20000234 Result: Down-regulated in Transcription
  misc_feature: MA Experiment 20000234 PARAMETER Experiment Name: At_Siliques_P Parameter: Age (day) Value: 21
  misc_feature: MA Experiment 20000234 PARAMETER Experiment Name: At_Siliques_P Parameter: Organism Value: A. thaliana
  misc_feature: MA Experiment 20000234 PARAMETER Experiment Name: At_Siliques_P Parameter: Plant Line Value: WS
  misc_feature: MA Experiment 20000234 PARAMETER Experiment Name: At_Siliques_P Parameter: Tissue Value: Less Than 5mm Siliques vs. Whole Plant
  misc_feature: MA Experiment ID: 20000265 Result: Down-regulated in Transcription
  misc_feature: MA Experiment 20000265 PARAMETER Experiment Name: At_Open_Flower_P Parameter: Age (day) Value: 21
  misc_feature: MA Experiment 20000265 PARAMETER Experiment Name: At_Open_Flower_P Parameter: Plant Line Value: WS
  misc_feature: MA Experiment 20000265 PARAMETER Experiment Name: At_Open_Flower_P Parameter: Tissue Value: Closed Flower vs. Whole Plant
  misc_feature: MA Experiment ID: 20000438 Result: Down-regulated in Transcription
  misc_feature: MA Experiment 20000438 PARAMETER Experiment Name: At_Shoots__P Parameter: Age (day) Value: 14
  misc_feature: MA Experiment 20000438 PARAMETER Experiment Name: At_Shoots__P Parameter: Tissue Value: Shoots vs. Whole Plant
  misc_feature: MA Experiment ID: 20000439 Result: Down-regulated in Transcription
  misc_feature: MA Experiment 20000439 PARAMETER Experiment Name: At_Roots__P Parameter: Age (day) Value: 14 vs. 21
  misc_feature: MA Experiment 20000439 PARAMETER Experiment Name: At_Roots__P Parameter: Organism Value: A. thaliana
  misc_feature: MA Experiment 20000439 PARAMETER Experiment Name: At_Roots__P Parameter: Tissue Value: Roots vs. Whole Plant
  misc_feature: MA Experiment ID: 20000451 Result: Down-regulated in Transcription
  misc_feature: MA Experiment 20000451 PARAMETER Experiment Name: At_CS6879_Shoots-Roots_P Parameter: Age (day) Value: 14
  misc_feature: MA Experiment 20000451 PARAMETER Experiment Name: At_CS6879_Shoots-Roots_P Parameter: Organism Value: A. thaliana
  misc_feature: MA Experiment 20000451 PARAMETER Experiment Name: At_CS6879_Shoots-Roots_P Parameter: Plant Line Value: CS6879 vs. WS
  misc_feature: MA Experiment 20000451 PARAMETER Experiment Name: At_CS6879_Shoots-Roots_P Parameter: Tissue Value: Roots
  misc_feature: MA Experiment ID: 20000453 Result: Up-regulated in Transcription
  misc_feature: MA Experiment 20000453 PARAMETER Experiment Name: At_100uM_ABA_P Parameter: Age (day) Value: 15
  misc_feature: MA Experiment 20000453 PARAMETER Experiment Name: At_100uM_ABA_P Parameter: Organism Value: A. thaliana
  misc_feature: MA Experiment 20000453 PARAMETER Experiment Name: At_100uM_ABA_P Parameter: Plant Line Value: WS
  misc_feature: MA Experiment 20000453 PARAMETER Experiment Name: At_100uM_ABA_P Parameter: Timepoint (hr) Value: 24
  misc_feature: MA Experiment 20000453 PARAMETER Experiment Name: At_100uM_ABA_P Parameter: Tissue Value: Aerial
  misc_feature: MA Experiment 20000453 PARAMETER Experiment Name: At_100uM_ABA_P Parameter: Treatment Value: 100uM ABA vs. No Treatment
  misc_feature: MA Experiment ID: 20001248 Result: Up-regulated in Transcription
  misc_feature: MA Experiment 20001248 PARAMETER Experiment Name: At_Far-red-induction_P Parameter: Age (day) Value: 7
  misc_feature: MA Experiment 20001248 PARAMETER Experiment Name: At_Far-red-induction_P Parameter: Light Value: Far-red vs. White
  misc_feature: MA Experiment 20001248 PARAMETER Experiment Name: At_Far-red-induction_P Parameter: Organism Value: A. thaliana
  misc_feature: MA Experiment 20001248 PARAMETER Experiment Name: At_Far-red-induction_P Parameter: Plant Line Value: Columbia
  misc_feature: MA Experiment 20001248 PARAMETER Experiment Name: At_Far-red-induction_P Parameter: Timepoint (hr) Value: 4
  misc_feature: MA Experiment 20001248 PARAMETER Experiment Name: At_Far-red-induction_P Parameter: Tissue Value: Whole Plant
  misc_feature: MA Experiment ID: 20001558 Result: Down-regulated in Transcription
  misc_feature: MA Experiment 20001558 PARAMETER Experiment Name: At_Drought_Soil_Dry_P Parameter: Age (day) Value: 27
  misc_feature: MA Experiment 20001558 PARAMETER Experiment Name: At_Drought_Soil_Dry_P Parameter: Organism Value: A. thaliana
  misc_feature: MA Experiment 20001558 PARAMETER Experiment Name: At_Drought_Soil_Dry_P Parameter: Plant Line Value: WS
  misc_feature: MA Experiment 20001558 PARAMETER Experiment Name: At_Drought_Soil_Dry_P Parameter: Post Timepoint (hr) Value: 6
  misc_feature: MA Experiment 20001558 PARAMETER Experiment Name: At_Drought_Soil_Dry_P Parameter: Post-Treatment Value: Re-Water vs. No Drought
  misc_feature: MA Experiment 20001558 PARAMETER Experiment Name: At_Drought_Soil_Dry_P Parameter: Timepoint (day) Value: 13
  misc_feature: MA Experiment 20001558 PARAMETER Experiment Name: At_Drought_Soil_Dry_P Parameter: Treatment Value: Drought vs. No Drought
  misc_feature: MA Experiment ID: 20001560 Result: Down-regulated in Transcription
  misc_feature: MA Experiment 20001560 PARAMETER Experiment Name: At_Drought_Soil_Dry_P Parameter: Age (day) Value: 28
  misc_feature: MA Experiment 20001560 PARAMETER Experiment Name: At_Drought_Soil_Dry_P Parameter: Organism Value: A. thaliana
  misc_feature: MA Experiment 20001560 PARAMETER Experiment Name: At_Drought_Soil_Dry_P Parameter: Plant Line Value: WS
  misc_feature: MA Experiment 20001560 PARAMETER Experiment Name: At_Drought_Soil_Dry_P Parameter: Post Timepoint (hr) Value: None
  misc_feature: MA Experiment 20001560 PARAMETER Experiment Name: At_Drought_Soil_Dry_P Parameter: Post-Treatment Value: None
  misc_feature: MA Experiment 20001560 PARAMETER Experiment Name: At_Drought_Soil_Dry_P Parameter: Timepoint (day) Value: 14
  misc_feature: MA Experiment 20001560 PARAMETER Experiment Name: At_Drought_Soil_Dry_P Parameter: Treatment Value: Drought vs. No Drought
  misc_feature: MA Experiment ID: 20001905 Result: Down-regulated in Transcription
  misc_feature: MA Experiment 20001905 PARAMETER Experiment Name: At_Drought_Reproduction_P Parameter: Age (day) Value: 40
  misc_feature: MA Experiment 20001905 PARAMETER Experiment Name: At_Drought_Reproduction_P Parameter: Organism Value: A. thaliana
  misc_feature: MA Experiment 20001905 PARAMETER Experiment Name: At_Drought_Reproduction_P Parameter: Plant Line Value: WS
  misc_feature: MA Experiment 20001905 PARAMETER Experiment Name: At_Drought_Reproduction_P Parameter: Timepoint (day) Value: 10
  misc_feature: MA Experiment 20001905 PARAMETER Experiment Name: At_Drought_Reproduction_P Parameter: Tissue Value: Rosettes
  misc_feature: MA Experiment 20001905 PARAMETER Experiment Name: At_Drought_Reproduction_P Parameter: Treatment Value: Drought vs. No Drought

SEQ ID NO: 48912 - protein, 285 aa, Arabidopsis thaliana; identical to SEQ ID NO: 36383
  peptide (1)..(285): Ceres Seq. ID no. 12600817
  misc_feature (12)..(99): Pfam Name: MtN3/saliva family Pfam Description: MtN3/saliva family
  misc_feature (12)..(99): Pfam Name: MtN3/saliva family Pfam Description: MtN3/saliva family
  misc_feature (11)..(246): Homolog of NCBI NO: 15241265 NR Description: MtN3-like protein
  misc_feature (1)..(276): Homolog of NCBI NO: 15240040 NR Description: senescence-associated protein (SAG29)
  misc_feature (1)..(232): Homolog of NCBI NO: 21593422 NR Description: senescence-associated protein (SAG29)
  misc_feature (6)..(245): Homolog of NCBI NO: 14715258 NR Description: N3 like protein [Medicago truncatula]
  misc_feature (6)..(238): Homolog of NCBI NO: 1619602 NR Description: MtN3 [Medicago truncatula]
  misc_feature (11)..(246): Homolog of NCBI NO: 15241265 NR Description: MtN3-like protein
  misc_feature (1)..(232): Homolog of NCBI NO: 21593422 NR Description: senescence-associated protein (SAG29)
  misc_feature (6)..(238): Homolog of NCBI NO: 1619602 NR Description: MtN3 [Medicago truncatula]
  misc_feature (1)..(285): Homolog of NCBI NO: 15237803 NR Description: MtN3-like protein
  misc_feature (1)..(276): Homolog of NCBI NO: 15229019 NR Description: MTN3-like protein
  misc_feature (1)..(246): Homolog of NCBI NO: 21593109 NR Description: MtN3-like protein [Arabidopsis thaliana]
  misc_feature (1)..(246): Homolog of NCBI NO: 15241278 NR Description: MtN3-like protein
  misc_feature (6)..(261): Homolog of NCBI NO: 15234863 NR Description: MtN3 - like protein; protein id: At4g25010.1
  misc_feature (6)..(245): Homolog of NCBI NO: 14715258 NR Description: N3 like protein [Medicago truncatula]
  misc_feature (1)..(276): Homolog of NCBI NO: 15240040 NR Description: senescence-associated protein (SAG29)
  misc_feature (6)..(261): Homolog of NCBI NO: 15234863 NR Description: MtN3 - like protein; protein id: At4g25010.1
  misc_feature (1)..(246): Homolog of NCBI NO: 15241278 NR Description: MtN3-like protein
  misc_feature (1)..(246): Homolog of NCBI NO: 21593109 NR Description: MtN3-like protein [Arabidopsis thaliana]
  misc_feature (1)..(276): Homolog of NCBI NO: 15229019 NR Description: MTN3-like protein
  misc_feature (1)..(285): Homolog of NCBI NO: 15237803 NR Description: MtN3-like protein

SEQ ID NO: 48913 - protein, 228 aa, Arabidopsis thaliana; identical to SEQ ID NO: 36384
  peptide (1)..(228): Ceres Seq. ID no. 12600818
  misc_feature (1)..(189): Homolog of NCBI NO: 15241265 NR Description: MtN3-like protein
  misc_feature (1)..(219): Homolog of NCBI NO: 15240040 NR Description: senescence-associated protein (SAG29)
  misc_feature (1)..(175): Homolog of NCBI NO: 21593422 NR Description: senescence-associated protein (SAG29)
  misc_feature (1)..(188): Homolog of NCBI NO: 14715258 NR Description: N3 like protein [Medicago truncatula]
  misc_feature (1)..(181): Homolog of NCBI NO: 1619602 NR Description: MtN3 [Medicago truncatula]
  misc_feature (1)..(204): Homolog of NCBI NO: 15234863 NR Description: MtN3 - like protein; protein id: At4g25010.1
  misc_feature (1)..(189): Homolog of NCBI NO: 15241278 NR Description: MtN3-like protein
  misc_feature (1)..(189): Homolog of NCBI NO: 21593109 NR Description: MtN3-like protein [Arabidopsis thaliana]
  misc_feature (1)..(219): Homolog of NCBI NO: 15229019 NR Description: MTN3-like protein
  misc_feature (1)..(228): Homolog of NCBI NO: 15237803 NR Description: MtN3-like protein
  misc_feature (1)..(189): Homolog of NCBI NO: 15241265 NR Description: MtN3-like protein
  misc_feature (1)..(219): Homolog of NCBI NO: 15240040 NR Description: senescence-associated protein (SAG29)
  misc_feature (1)..(175): Homolog of NCBI NO: 21593422 NR Description: senescence-associated protein (SAG29)
  misc_feature (1)..(188): Homolog of NCBI NO: 14715258 NR Description: N3 like protein [Medicago truncatula]
  misc_feature (1)..(181): Homolog of NCBI NO: 1619602 NR Description: MtN3 [Medicago truncatula]
  misc_feature (1)..(204): Homolog of NCBI NO: 15234863 NR Description: MtN3 - like protein; protein id: At4g25010.1
  misc_feature (1)..(189): Homolog of NCBI NO: 15241278 NR Description: MtN3-like protein
  misc_feature (1)..(189): Homolog of NCBI NO: 21593109 NR Description: MtN3-like protein [Arabidopsis thaliana]
  misc_feature (1)..(219): Homolog of NCBI NO: 15229019 NR Description: MTN3-like protein
  misc_feature (1)..(228): Homolog of NCBI NO: 15237803 NR Description: MtN3-like protein

SEQ ID NO: 48914 - protein, 185 aa, Arabidopsis thaliana; identical to SEQ ID NO: 36385
  peptide (1)..(185): Ceres Seq. ID no. 12600819
  misc_feature (1)..(146): Homolog of NCBI NO: 15241265 NR Description: MtN3-like protein
  misc_feature (1)..(176): Homolog of NCBI NO: 15240040 NR Description: senescence-associated protein (SAG29)
  misc_feature (1)..(132): Homolog of NCBI NO: 21593422 NR Description: senescence-associated protein (SAG29)
  misc_feature (1)..(145): Homolog of NCBI NO: 14715258 NR Description: N3 like protein [Medicago truncatula]
  misc_feature (1)..(138): Homolog of NCBI NO: 1619602 NR Description: MtN3 [Medicago truncatula]
  misc_feature (1)..(161): Homolog of NCBI NO: 15234863 NR Description: MtN3 - like protein; protein id: At4g25010.1
  misc_feature (1)..(146): Homolog of NCBI NO: 15241278 NR Description: MtN3-like protein
  misc_feature (1)..(146): Homolog of NCBI NO: 21593109 NR Description: MtN3-like protein [Arabidopsis thaliana]
  misc_feature (1)..(176): Homolog of NCBI NO: 15229019 NR Description: MTN3-like protein
  misc_feature (1)..(185): Homolog of NCBI NO: 15237803 NR Description: MtN3-like protein
  misc_feature (1)..(146): Homolog of NCBI NO: 15241265 NR Description: MtN3-like protein
  misc_feature (1)..(176): Homolog of NCBI NO: 15240040 NR Description: senescence-associated protein (SAG29)
  misc_feature (1)..(132): Homolog of NCBI NO: 21593422 NR Description: senescence-associated protein (SAG29)
  misc_feature (1)..(145): Homolog of NCBI NO: 14715258 NR Description: N3 like protein [Medicago truncatula]
  misc_feature (1)..(138): Homolog of NCBI NO: 1619602 NR Description: MtN3 [Medicago truncatula]
  misc_feature (1)..(161): Homolog of NCBI NO: 15234863 NR Description: MtN3 - like protein; protein id: At4g25010.1
  misc_feature (1)..(146): Homolog of NCBI NO: 15241278 NR Description: MtN3-like protein
  misc_feature (1)..(146): Homolog of NCBI NO: 21593109 NR Description: MtN3-like protein [Arabidopsis thaliana]
  misc_feature (1)..(176): Homolog of NCBI NO: 15229019 NR Description: MTN3-like protein
  misc_feature (1)..(185): Homolog of NCBI NO: 15237803 NR Description: MtN3-like protein

SEQ ID NO: 48915 - DNA, 2202 bp, Arabidopsis thaliana
  misc_feature (1)..(2202): Ceres Seq. ID no. 12574853
  misc_feature: MA Experiment ID: 20001458 Result: Up-regulated in Transcription
  misc_feature: MA Experiment 20001458 PARAMETER Experiment Name: At_50mM_NH4NO3_L-to-H_P Parameter: Age (day) Value: Undefined
  misc_feature: MA Experiment 20001458 PARAMETER Experiment Name: At_50mM_NH4NO3_L-to-H_P Parameter: Organism Value: Undefined
  misc_feature: MA Experiment 20001458 PARAMETER Experiment Name: At_50mM_NH4NO3_L-to-H_P Parameter: Plant Line Value: Undefined
  misc_feature: MA Experiment 20001458 PARAMETER Experiment Name: At_50mM_NH4NO3_L-to-H_P Parameter: Timepoint (hr) Value: 2
  misc_feature: MA Experiment 20001458 PARAMETER Experiment Name: At_50mM_NH4NO3_L-to-H_P Parameter: Tissue Value: Siliques
  misc_feature: MA Experiment 20001458 PARAMETER Experiment Name: At_50mM_NH4NO3_L-to-H_P Parameter: Treatment Value: 50mM NH4NO3 vs. 100mM Manitol
  misc_feature: MA Experiment ID: 20001557 Result: Up-regulated in Transcription
  misc_feature: MA Experiment 20001557 PARAMETER Experiment Name: At_Drought_Soil_Dry_P Parameter: Age (day) Value: 27
  misc_feature: MA Experiment 20001557 PARAMETER Experiment Name: At_Drought_Soil_Dry_P Parameter: Organism Value: A. thaliana
  misc_feature: MA Experiment 20001557 PARAMETER Experiment Name: At_Drought_Soil_Dry_P Parameter: Plant Line Value: WS
  misc_feature: MA Experiment 20001557 PARAMETER Experiment Name: At_Drought_Soil_Dry_P Parameter: Post Timepoint (hr) Value: 3
  misc_feature: MA Experiment 20001557 PARAMETER Experiment Name: At_Drought_Soil_Dry_P Parameter: Post-Treatment Value: Re-Water vs. No Drought
  misc_feature: MA Experiment 20001557 PARAMETER Experiment Name: At_Drought_Soil_Dry_P Parameter: Timepoint (day) Value: 13
  misc_feature: MA Experiment 20001557 PARAMETER Experiment Name: At_Drought_Soil_Dry_P Parameter: Treatment Value: Drought vs. No Drought
  misc_feature: MA Experiment ID: 20001558 Result: Up-regulated in Transcription
  misc_feature: MA Experiment 20001558 PARAMETER Experiment Name: At_Drought_Soil_Dry_P Parameter: Age (day) Value: 27
  misc_feature: MA Experiment 20001558 PARAMETER Experiment Name: At_Drought_Soil_Dry_P Parameter: Organism Value: A. thaliana
  misc_feature: MA Experiment 20001558 PARAMETER Experiment Name: At_Drought_Soil_Dry_P Parameter: Plant Line Value: WS
  misc_feature: MA Experiment 20001558 PARAMETER Experiment Name: At_Drought_Soil_Dry_P Parameter: Post Timepoint (hr) Value: 6
  misc_feature: MA Experiment 20001558 PARAMETER Experiment Name: At_Drought_Soil_Dry_P Parameter: Post-Treatment Value: Re-Water vs. No Drought
  misc_feature: MA Experiment 20001558 PARAMETER Experiment Name: At_Drought_Soil_Dry_P Parameter: Timepoint (day) Value: 13
  misc_feature: MA Experiment 20001558 PARAMETER Experiment Name: At_Drought_Soil_Dry_P Parameter: Treatment Value: Drought vs. No Drought
  misc_feature: MA Experiment ID: 20001757 Result: Up-regulated in Transcription
  misc_feature: MA Experiment 20001757 PARAMETER Experiment Name: At_50mM_NH4NO3_L-to-H_P Parameter: Timepoint (hr) Value: 6
  misc_feature: MA Experiment 20001757 PARAMETER Experiment Name: At_50mM_NH4NO3_L-to-H_P Parameter: Tissue Value: Leaf
  misc_feature: MA Experiment 20001757 PARAMETER Experiment Name: At_50mM_NH4NO3_L-to-H_P Parameter: Treatment Value: 50mM NH4NO3 vs 100mM Mannitol
agaacactctcgaattcgaagaaaatacgtagcaaaacccttatttttgaatttcagacgaattccgatttcttaatcaaaaatccgataagagctttggatttggcggcgaataagaaaacatggcgaatttggatatggagcaacattcatccgaaaacgaagagattaagaagaagaagcataagaaaagagcgagagacgaagctaagaaactaaagcagccagcaatggaagaagaacccgatcatgaagatggtgatgccaaagagaacaatgcgttaattgacgaagaaccgaagaagaagaagaagaagaaaaataagaagcgtggagatactgatgatggagaggacgaagcggtagcagaagaagagccgaagaagaagaagaagaaaaataaaaagctacagcagcgtggagatactaatgacgaagaggacgaagtgatagcagaagaagaagagccgaagaagaagaagaagaaacagaggaaggacacggaagcgaagtctgaagaagaagaagtagaagataaggaagaagaaaaaaaattggaagaaactagcataatgactaataaaacgtttgagtcattgtcattatctgataacacttataaatctatcaaggagatgggttttgcacgcatgactcagatacaagctaaagcaattccaccattgatgatgggagaagatgtacttggagctgccaggaccggttctggtaaaaccttagcttttcttattcctgctgttgagcttctttaccgtgttaagtttactcctcgcaatggaactggtgttcttgttatttgcccaacaagagagcttgctattcagtcttatggagtggcaaaagaacttcttaagtatcattcacagactgtgggaaaagttattggcggtgagaaaagaaagacagaagctgagattcttgcgaaaggtgttaatttattagtagctacccctggaagacttctcgaccaccttgaaaatactaatggttttattttcaagaacttaaagtttcttgtaatggatgaggctgataggatattggaacagaactttgaagaagacctcaagaagattttgaaccttctaccaaagactagacagacgtcactattttcagccacacagagcgcaaaggttgaggatcttgctcgggtgtcacttacctcacctgtttatattgatgtggatgaaggacgaaaagaggttacaaatgaaggcttggagcaaggttattgcgttgtgccaagtgcgatgcggttactttttttacttaccttcttgaagagattccaagggaaaaagaaaattatggtgtttttctctacatgcaagtcgacaaagttccacgccgagctctttcgatatatcaaattcgattgccttgaaatccgtggagggatagaccagaacaaaagaactccaacatttttgcaattcataaaggcggaaaccggtattttgttgtgtactaatgtcgctgcccgaggtcttgattttcctcatgtggactggattgtgcagtatgatcctcctgataacccaacggattatattcatcgagttggtagaacagctcgtggtgaaggagcaaaaggaaaggctctgcttgtcctaactccacaggagttgaagtttatacagtatctcaaggcggcgaaaattcctgttgaggaacatgaatttgaagaaaagaaattgctcgatgtgaaaccttttgtggagaatttgatatctgaaaactatgcattgaaggagtcagcaaaagaagcatacaagacatacatttcaggatatgattctcactctatgaaagatgtctttaatgttcaccaactcaatctcacggaggttgcgacttcgtttggtttctcagatcctcccaaagttgctctgaagatagatcgaggagggtacagaagtaagagagaaccggttaataagtttaagagaggtcgtggtggtggtagacccggcggtaaaagcaagttcgagaggtactaaaaatacagttgcacaaacaacgtcatacttagtagtatggcacatgccttttaacgaatgttgtatcttatttttggattcatttacgattgtgttgtcttaagctgtttccagagatatcagacgagataccagttttgtccccgttacttagaaatattgatcattttgttttgcg

SEQ ID NO: 48916 - protein, 633 aa, Arabidopsis thaliana
  peptide (1)..(633): Ceres Seq. ID no. 12574854
  misc_feature (167)..(377): Pfam Name: DEAD/DEAH box helicase Pfam Description: DEAD/DEAH box helicase
  misc_feature (111)..(596): Homolog of NCBI NO: 26342749 NR Description: unnamed protein product [Mus musculus]
  misc_feature (132)..(596): Homolog of NCBI NO: 29247203 NR Description: GLP_47_37459_39102 [Giardia lamblia ATCC 50803]
  misc_feature (1)..(563): Homolog of NCBI NO: 23483000 NR Description: probable ATP-dependent RNA helicase has1
  misc_feature (88)..(600): Homolog of NCBI NO: 39589822 NR Description: Hypothetical protein CBG12465 [Caenorhabditis
  misc_feature (47)..(632): Homolog of NCBI NO: 40745958 NR Description: hypothetical protein AN1949.2 [Aspergillus
  misc_feature (46)..(629): Homolog of NCBI NO: 34879479 NR Description: similar to RIKEN cDNA 2310005B10 [Rattus
  misc_feature (65)..(610): Homolog of NCBI NO: 19115400 NR Description: probable ATP-dependent RNA helicase
  misc_feature (1)..(629): Homolog of NCBI NO: 12654791 NR Description: DEAD/H (Asp-Glu-Ala-Asp/His) box polypeptide 18
  misc_feature (63)..(625): Homolog of NCBI NO: 29150366 NR Description: putative RNA helicase [Oryza sativa (japonica
  misc_feature (78)..(628): Homolog of NCBI NO: 15229677 NR Description: DEAD/DEAH box RNA helicase protein, putative
MANLDMEQHSSENEEIKKKKHKKRARDEAKKLKQPAMEEEPDHEDGDAKENNALIDEEPKKKKKKKNKKRGDTDDGEDEAVAEEEPKKKKKKNKKLQQRGDTNDEEDEVIAEEEEPKKKKKKQRKDTEAKSEEEEVEDKEEEKKLEETSIMTNKTFESLSLSDNTYKSIKEMGFARMTQIQAKAIPPLMMGEDVLGAARTGSGKTLAFLIPAVELLYRVKFTPRNGTGVLVICPTRELAIQSYGVAKELLKYHSQTVGKVIGGEKRKTEAEILAKGVNLLVATPGRLLDHLENTNGFIFKNLKFLVMDEADRILEQNFEEDLKKILNLLPKTRQTSLFSATQSAKVEDLARVSLTSPVYIDVDEGRKEVTNEGLEQGYCVVPSAMRLLFLLTFLKRFQGKKKIMVFFSTCKSTKFHAELFRYIKFDCLEIRGGIDQNKRTPTFLQFIKAETGILLCTNVAARGLDFPHVDWIVQYDPPDNPTDYIHRVGRTARGEGAKGKALLVLTPQELKFIQYLKAAKIPVEEHEFEEKKLLDVKPFVENLISENYALKESAKEAYKTYISGYDSHSMKDVFNVHQLNLTEVATSFGFSDPPKVALKIDRGGYRSKREPVNKFKRGRGGGRPGGKSKFERY

SEQ ID NO: 48917 - protein, 628 aa, Arabidopsis thaliana
  peptide (1)..(628): Ceres Seq. ID no. 12574855
  misc_feature (162)..(372): Pfam Name: DEAD/DEAH box helicase Pfam Description: DEAD/DEAH box helicase
  misc_feature (106)..(591): Homolog of NCBI NO: 26342749 NR Description: unnamed protein product [Mus musculus]
  misc_feature (127)..(591): Homolog of NCBI NO: 29247203 NR Description: GLP_47_37459_39102 [Giardia lamblia ATCC 50803]
  misc_feature (1)..(558): Homolog of NCBI NO: 23483000 NR Description: probable ATP-dependent RNA helicase has1
  misc_feature (83)..(595): Homolog of NCBI NO: 39589822 NR Description: Hypothetical protein CBG12465 [Caenorhabditis
  misc_feature (42)..(627): Homolog of NCBI NO: 40745958 NR Description: hypothetical protein AN1949.2 [Aspergillus
  misc_feature (41)..(624): Homolog of NCBI NO: 34879479 NR Description: similar to RIKEN cDNA 2310005B10 [Rattus
  misc_feature (60)..(605): Homolog of NCBI NO: 19115400 NR Description: probable ATP-dependent RNA helicase
  misc_feature (1)..(624): Homolog of NCBI NO: 12654791 NR Description: DEAD/H (Asp-Glu-Ala-Asp/His) box polypeptide 18
  misc_feature (58)..(620): Homolog of NCBI NO: 29150366 NR Description: putative RNA helicase [Oryza sativa (japonica
  misc_feature (73)..(623): Homolog of NCBI NO: 15229677 NR Description: DEAD/DEAH box RNA helicase protein, putative
MEQHSSENEEIKKKKHKKRARDEAKKLKQPAMEEEPDHEDGDAKENNALIDEEPKKKKKKKNKKRGDTDDGEDEAVAEEEPKKKKKKNKKLQQRGDTNDEEDEVIAEEEEPKKKKKKQRKDTEAKSEEEEVEDKEEEKKLEETSIMTNKTFESLSLSDNTYKSIKEMGFARMTQIQAKAIPPLMMGEDVLGAARTGSGKTLAFLIPAVELLYRVKFTPRNGTGVLVICPTRELAIQSYGVAKELLKYHSQTVGKVIGGEKRKTEAEILAKGVNLLVATPGRLLDHLENTNGFIFKNLKFLVMDEADRILEQNFEEDLKKILNLLPKTRQTSLFSATQSAKVEDLARVSLTSPVYIDVDEGRKEVTNEGLEQGYCVVPSAMRLLFLLTFLKRFQGKKKIMVFFSTCKSTKFHAELFRYIKFDCLEIRGGIDQNKRTPTFLQFIKAETGILLCTNVAARGLDFPHVDWIVQYDPPDNPTDYIHRVGRTARGEGAKGKALLVLTPQELKFIQYLKAAKIPVEEHEFEEKKLLDVKPFVENLISENYALKESAKEAYKTYISGYDSHSMKDVFNVHQLNLTEVATSFGFSDPPKVALKIDRGGYRSKREPVNKFKRGRGGGRPGGKSKFERY

SEQ ID NO: 48918 - protein, 597 aa, Arabidopsis thaliana
  peptide (1)..(597): Ceres Seq. ID no. 12574856
  misc_feature (131)..(341): Pfam Name: DEAD/DEAH box helicase Pfam Description: DEAD/DEAH box helicase
  misc_feature (75)..(560): Homolog of NCBI NO: 26342749 NR Description: unnamed protein product [Mus musculus]
  misc_feature (96)..(560): Homolog of NCBI NO: 29247203 NR Description: GLP_47_37459_39102 [Giardia lamblia ATCC 50803]
  misc_feature (1)..(527): Homolog of NCBI NO: 23483000 NR Description: probable ATP-dependent RNA helicase has1
  misc_feature (52)..(564): Homolog of NCBI NO: 39589822 NR Description: Hypothetical protein CBG12465 [Caenorhabditis
  misc_feature (11)..(596): Homolog of NCBI NO: 40745958 NR Description: hypothetical protein AN1949.2 [Aspergillus
  misc_feature (10)..(593): Homolog of NCBI NO: 34879479 NR Description: similar to RIKEN cDNA 2310005B10 [Rattus
  misc_feature (29)..(574): Homolog of NCBI NO: 19115400 NR Description: probable ATP-dependent RNA helicase
  misc_feature (1)..(593): Homolog of NCBI NO: 12654791 NR Description: DEAD/H (Asp-Glu-Ala-Asp/His) box polypeptide 18
  misc_feature (27)..(589): Homolog of NCBI NO: 29150366 NR Description: putative RNA helicase [Oryza sativa (japonica
  misc_feature (42)..(592): Homolog of NCBI NO: 15229677 NR Description: DEAD/DEAH box RNA helicase protein, putative
MEEEPDHEDGDAKENNALIDEEPKKKKKKKNKKRGDTDDGEDEAVAEEEPKKKKKKNKKLQQRGDTNDEEDEVIAEEEEPKKKKKKQRKDTEAKSEEEEVEDKEEEKKLEETSIMTNKTFESLSLSDNTYKSIKEMGFARMTQIQAKAIPPLMMGEDVLGAARTGSGKTLAFLIPAVELLYRVKFTPRNGTGVLVICPTRELAIQSYGVAKELLKYHSQTVGKVIGGEKRKTEAEILAKGVNLLVATPGRLLDHLENTNGFIFKNLKFLVMDEADRILEQNFEEDLKKILNLLPKTRQTSLFSATQSAKVEDLARVSLTSPVYIDVDEGRKEVTNEGLEQGYCVVPSAMRLLFLLTFLKRFQGKKKIMVFFSTCKSTKFHAELFRYIKFDCLEIRGGIDQNKRTPTFLQFIKAETGILLCTNVAARGLDFPHVDWIVQYDPPDNPTDYIHRVGRTARGEGAKGKALLVLTPQELKFIQYLKAAKIPVEEHEFEEKKLLDVKPFVENLISENYALKESAKEAYKTYISGYDSHSMKDVFNVHQLNLTEVATSFGFSDPPKVALKIDRGGYRSKREPVNKFKRGRGGGRPGGKSKFERY

SEQ ID NO: 48919 - DNA, 1679 bp, Arabidopsis thaliana
  misc_feature (1)..(1679): Ceres Seq. ID no. 15168844
  misc_feature: MA Experiment ID: 20000180 Result: Up-regulated in Transcription
  misc_feature: MA Experiment 20000180 PARAMETER Experiment Name: At_Germinating_Seeds_P Parameter: Age (hr) Value: 24 vs. 0
  misc_feature: MA Experiment 20000180 PARAMETER Experiment Name: At_Germinating_Seeds_P Parameter: Tissue Value: Germinating Seeds
  misc_feature: MA Experiment ID: 20000227 Result: Up-regulated in Transcription
  misc_feature: MA Experiment 20000227 PARAMETER Experiment Name: At_Root-Tips-vs-Tops_P Parameter: Tissue Value: Root Tips vs. Root Tops
  misc_feature: MA Experiment ID: 20000234 Result: Down-regulated in Transcription
  misc_feature: MA Experiment 20000234 PARAMETER Experiment Name: At_Siliques_P Parameter: Age (day) Value: 21
  misc_feature: MA Experiment 20000234 PARAMETER Experiment Name: At_Siliques_P Parameter: Organism Value: A. thaliana
  misc_feature: MA Experiment 20000234 PARAMETER Experiment Name: At_Siliques_P Parameter: Plant Line Value: WS
  misc_feature: MA Experiment 20000234 PARAMETER Experiment Name: At_Siliques_P Parameter: Tissue Value: Less Than 5mm Siliques vs. Whole Plant
  misc_feature: MA Experiment ID: 20000264 Result: Up-regulated in Transcription
  misc_feature: MA Experiment 20000264 PARAMETER Experiment Name: At_Open_Flower_P Parameter: Age (day) Value: 21
  misc_feature: MA Experiment 20000264 PARAMETER Experiment Name: At_Open_Flower_P Parameter: Plant Line Value: WS
  misc_feature: MA Experiment 20000264 PARAMETER Experiment Name: At_Open_Flower_P Parameter: Tissue Value: Open Flower vs. Whole Plant
  misc_feature: MA Experiment ID: 20000265 Result: Up-regulated in Transcription
  misc_feature: MA Experiment 20000265 PARAMETER Experiment Name: At_Open_Flower_P Parameter: Age (day) Value: 21
  misc_feature: MA Experiment 20000265 PARAMETER Experiment Name: At_Open_Flower_P Parameter: Plant Line Value: WS
  misc_feature: MA Experiment 20000265 PARAMETER Experiment Name: At_Open_Flower_P Parameter: Tissue Value: Closed Flower vs. Whole Plant
  misc_feature: MA Experiment ID: 20000286 Result: Up-regulated in Transcription
  misc_feature: MA Experiment 20000286 PARAMETER Experiment Name: At_Open_Flower_P Parameter: Age (day) Value: 21
  misc_feature: MA Experiment 20000286 PARAMETER Experiment Name: At_Open_Flower_P Parameter: Plant Line Value: WS
  misc_feature: MA Experiment 20000286 PARAMETER Experiment Name: At_Open_Flower_P Parameter: Tissue Value: Half Open vs. Whole Plant
  misc_feature: MA Experiment ID: 20000438 Result: Down-regulated in Transcription
  misc_feature: MA Experiment 20000438 PARAMETER Experiment Name: At_Shoots__P Parameter: Age (day) Value: 14
  misc_feature: MA Experiment 20000438 PARAMETER Experiment Name: At_Shoots__P Parameter: Tissue Value: Shoots vs. Whole Plant
  misc_feature: MA Experiment ID: 20000794 Result: Up-regulated in Transcription
  misc_feature: MA Experiment 20000794 PARAMETER Experiment Name: At_Petals_P Parameter: Age (day) Value: 23-25 days
  misc_feature: MA Experiment 20000794 PARAMETER Experiment Name: At_Petals_P Parameter: Plant Line Value: WS
  misc_feature: MA Experiment 20000794 PARAMETER Experiment Name: At_Petals_P Parameter: Tissue Value: Petals vs. Whole plant
  misc_feature: MA Experiment ID: 20001555 Result: Up-regulated in Transcription
  misc_feature: MA Experiment 20001555 PARAMETER Experiment Name: At_Drought_Soil_Dry_P Parameter: Age (day) Value: 24
  misc_feature: MA Experiment 20001555 PARAMETER Experiment Name: At_Drought_Soil_Dry_P Parameter: Organism Value: A. thaliana
  misc_feature: MA Experiment 20001555 PARAMETER Experiment Name: At_Drought_Soil_Dry_P Parameter: Plant Line Value: WS
  misc_feature: MA Experiment 20001555 PARAMETER Experiment Name: At_Drought_Soil_Dry_P Parameter: Post Timepoint (hr) Value: None
  misc_feature: MA Experiment 20001555 PARAMETER Experiment Name: At_Drought_Soil_Dry_P Parameter: Post-Treatment Value: None
  misc_feature: MA Experiment 20001555 PARAMETER Experiment Name: At_Drought_Soil_Dry_P Parameter: Timepoint (day) Value: 10
  misc_feature: MA Experiment 20001555 PARAMETER Experiment Name: At_Drought_Soil_Dry_P Parameter: Treatment Value: Drought vs. No Drought
  misc_feature: MA Experiment ID: 20001904 Result: Up-regulated in Transcription
  misc_feature: MA Experiment 20001904 PARAMETER Experiment Name: At_Drought_Reproduction_P Parameter: Age (day) Value: 37
  misc_feature: MA Experiment 20001904 PARAMETER Experiment Name: At_Drought_Reproduction_P Parameter: Organism Value: A. thaliana
  misc_feature: MA Experiment 20001904 PARAMETER Experiment Name: At_Drought_Reproduction_P Parameter: Plant Line Value: WS
  misc_feature: MA Experiment 20001904 PARAMETER Experiment Name: At_Drought_Reproduction_P Parameter: Timepoint (day) Value: 7
  misc_feature: MA Experiment 20001904 PARAMETER Experiment Name: At_Drought_Reproduction_P Parameter: Tissue Value: Rosettes
  misc_feature: MA Experiment 20001904 PARAMETER Experiment Name: At_Drought_Reproduction_P Parameter: Treatment Value: Drought vs. No Drought
  misc_feature: MA Experiment ID: 20001905 Result: Up-regulated in Transcription
  misc_feature: MA Experiment 20001905 PARAMETER Experiment Name: At_Drought_Reproduction_P Parameter: Age (day) Value: 40
  misc_feature: MA Experiment 20001905 PARAMETER Experiment Name: At_Drought_Reproduction_P Parameter: Organism Value: A. thaliana
  misc_feature: MA Experiment 20001905 PARAMETER Experiment Name: At_Drought_Reproduction_P Parameter: Plant Line Value: WS
  misc_feature: MA Experiment 20001905 PARAMETER Experiment Name: At_Drought_Reproduction_P Parameter: Timepoint (day) Value: 10
  misc_feature: MA Experiment 20001905 PARAMETER Experiment Name: At_Drought_Reproduction_P Parameter: Tissue Value: Rosettes
  misc_feature: MA Experiment 20001905 PARAMETER Experiment Name: At_Drought_Reproduction_P Parameter: Treatment Value: Drought vs. No Drought
  misc_feature: MA Experiment ID: 20001911 Result: Down-regulated in Transcription
  misc_feature: MA Experiment 20001911 PARAMETER Experiment Name: At_Drought_Reproduction_P Parameter: Age (day) Value: 40
  misc_feature: MA Experiment 20001911 PARAMETER Experiment Name: At_Drought_Reproduction_P Parameter: Organism Value: A. thaliana
  misc_feature: MA Experiment 20001911 PARAMETER Experiment Name: At_Drought_Reproduction_P Parameter: Plant Line Value: WS
  misc_feature: MA Experiment 20001911 PARAMETER Experiment Name: At_Drought_Reproduction_P Parameter: Timepoint (day) Value: 10
  misc_feature: MA Experiment 20001911 PARAMETER Experiment Name: At_Drought_Reproduction_P Parameter: Tissue Value: Flowers
  misc_feature: MA Experiment 20001911 PARAMETER Experiment Name: At_Drought_Reproduction_P Parameter: Treatment Value: Drought vs. No Drought
ggttaagcttttaagaatctctactcacattttctctgtaaaaatgggaactaggttccaatcattcttgctcgtgttcttgctttcatgtttaatcctcatatcaactgcctcgtgtgagcgaaatggtgatggaacgattagaattggattgaagaagaggaaactagaccggagcaacaggctagcttctcagctttttttgaaaaaccgagggtctcattggtctcccaaacactattttcgcctgaacgatgaaaatgcggatatggttccgctgaaaaactatttggatgctcaatactatggtgacattaccattggtactcctcctcagaagttcactgtgatctttgatactggtagctccaatctctggataccatctactaaatgttacctatcggttgcttgttatttccactccaagtacaaggctagccagtcatcgtcatatagaaagaacggaaaacccgcgtctatccgctatgggacgggtgctatttctggttactttagcaatgatgatgttaaagttggtgatattgttgtgaaagagcaggaattcatagaggctactagtgagcctggtataacattcttgctagcaaagtttgatggtatcctcggtttgggtttcaaagagatttctgtaggaaactcaactccggtttggtataacatggtagaaaaaggtttagttaaggaaccgattttttcgttctggcttaaccgtaacccgaaagatccagaaggcggtgagattgttttcggtggagtcgacccgaagcacttcaaaggagagcatacttttgttcctgtgacacataaaggttactggcagtttgacatgggtgatctccaaattgctggcgaaccaaccggatattgtgctaaaggttgttctgctattgctgattccggaacttctctgctcaccggtccatcgactgtcatcacgatgatcaatcacgcgataggagcacaaggaattgtaagccgtgaatgcaaggccgtggtggatcaatacggaaaaaccatgttgaattctcttctagctcagaaagtatgctcacaaattggagtctgcgcttatgatggtacacagagtgtgagtatggggatccagtcagttgtagacgatggaacatcgggtcttttaaaccaagcgatgtgcagtgcttgcgaaatggcagccgtgtggatggagagcgaattgactcagaatcaaacacaagaacgcatactcgcttatgctgctgagctatgtgaccatataccaacccaaaaccaacaatcagcagtggactgtgggagggtttcgtcgatgcctatagtcacattctcaattggtggcagaagctttgatctaactcctcaagactatatattcaagatcggggaaggagttgagtctcagtgcaccagcggtttcacggcaatggatattgctccgcctcgtggacctctctggatcttgggtgatatcttcatgggaccataccacacagtgttcgattatgggaaaggaagagttggattcgccaaagctgcttaaacaatatctcttctttaataccctcgttttttatatgatgtttgtgaatgtgtttgtaataacttaaaacatattgctatcctagaatggtatcatcttaatacagatttttatttggttt

SEQ ID NO: 48920 - protein, 518 aa, Arabidopsis thaliana
  peptide (1)..(518): Ceres Seq. ID no. 15168845
  misc_feature (46)..(332): Pfam Name: Eukaryotic aspartyl protease Pfam Description: Eukaryotic aspartyl protease
  misc_feature (15)..(518): Homolog of NCBI NO: 7435838 NR Description: probable aspartic proteinase (EC 3.4.23.-) 1 -
  misc_feature (15)..(518): Homolog of NCBI NO: 21616053 NR Description: aspartic proteinase [Theobroma cacao]
  misc_feature (15)..(518): Homolog of NCBI NO: 15233518 NR Description: aspartic protease -related [Arabidopsis thaliana]
VKLLRISTHIFSVKMGTRFQSFLLVFLLSCLILISTASCERNGDGTIRIGLKKRKLDRSNRLASQLFLKNRGSHWSPKHYFRLNDENADMVPLKNYLDAQYYGDITIGTPPQKFTVIFDTGSSNLWIPSTKCYLSVACYFHSKYKASQSSSYRKNGKPASIRYGTGAISGYFSNDDVKVGDIVVKEQEFIEATSEPGITFLLAKFDGILGLGFKEISVGNSTPVWYNMVEKGLVKEPIFSFWLNRNPKDPEGGEIVFGGVDPKHFKGEHTFVPVTHKGYWQFDMGDLQIAGEPTGYCAKGCSAIADSGTSLLTGPSTVITMINHAIGAQGIVSRECKAVVDQYGKTMLNSLLAQKVCSQIGVCAYDGTQSVSMGIQSVVDDGTSGLLNQAMCSACEMAAVWMESELTQNQTQERILAYAAELCDHIPTQNQQSAVDCGRVSSMPIVTFSIGGRSFDLTPQDYIFKIGEGVESQCTSGFTAMDIAPPRGPLWILGDIFMGPYHTVFDYGKGRVGFAKAA

SEQ ID NO: 48921 - protein, 504 aa, Arabidopsis thaliana
  peptide (1)..(504): Ceres Seq. ID no. 15168846
  misc_feature (32)..(318): Pfam Name: Eukaryotic aspartyl protease Pfam Description: Eukaryotic aspartyl protease
  misc_feature (1)..(504): Homolog of NCBI NO: 7435838 NR Description: probable aspartic proteinase (EC 3.4.23.-) 1 -
  misc_feature (1)..(504): Homolog of NCBI NO: 21616053 NR Description: aspartic proteinase [Theobroma cacao]
  misc_feature (1)..(504): Homolog of NCBI NO: 15233518 NR Description: aspartic protease -related [Arabidopsis thaliana]
MGTRFQSFLLVFLLSCLILISTASCERNGDGTIRIGLKKRKLDRSNRLASQLFLKNRGSHWSPKHYFRLNDENADMVPLKNYLDAQYYGDITIGTPPQKFTVIFDTGSSNLWIPSTKCYLSVACYFHSKYKASQSSSYRKNGKPASIRYGTGAISGYFSNDDVKVGDIVVKEQEFIEATSEPGITFLLAKFDGILGLGFKEISVGNSTPVWYNMVEKGLVKEPIFSFWLNRNPKDPEGGEIVFGGVDPKHFKGEHTFVPVTHKGYWQFDMGDLQIAGEPTGYCAKGCSAIADSGTSLLTGPSTVITMINHAIGAQGIVSRECKAVVDQYGKTMLNSLLAQKVCSQIGVCAYDGTQSVSMGIQSVVDDGTSGLLNQAMCSACEMAAVWMESELTQNQTQERILAYAAELCDHIPTQNQQSAVDCGRVSSMPIVTFSIGGRSFDLTPQDYIFKIGEGVESQCTSGFTAMDIAPPRGPLWILGDIFMGPYHTVFDYGKGRVGFAKAA

SEQ ID NO: 48922 - protein, 429 aa, Arabidopsis thaliana
  peptide (1)..(429): Ceres Seq. ID no. 15168847
  misc_feature (1)..(243): Pfam Name: Eukaryotic aspartyl protease Pfam Description: Eukaryotic aspartyl protease
  misc_feature (1)..(429): Homolog of NCBI NO: 7435838 NR Description: probable aspartic proteinase (EC 3.4.23.-) 1 -
  misc_feature (1)..(429): Homolog of NCBI NO: 21616053 NR Description: aspartic proteinase [Theobroma cacao]
  misc_feature (1)..(429): Homolog of NCBI NO: 15233518 NR Description: aspartic protease -related [Arabidopsis thaliana]
MVPLKNYLDAQYYGDITIGTPPQKFTVIFDTGSSNLWIPSTKCYLSVACYFHSKYKASQSSSYRKNGKPASIRYGTGAISGYFSNDDVKVGDIVVKEQEFIEATSEPGITFLLAKFDGILGLGFKEISVGNSTPVWYNMVEKGLVKEPIFSFWLNRNPKDPEGGEIVFGGVDPKHFKGEHTFVPVTHKGYWQFDMGDLQIAGEPTGYCAKGCSAIADSGTSLLTGPSTVITMINHAIGAQGIVSRECKAVVDQYGKTMLNSLLAQKVCSQIGVCAYDGTQSVSMGIQSVVDDGTSGLLNQAMCSACEMAAVWMESELTQNQTQERILAYAAELCDHIPTQNQQSAVDCGRVSSMPIVTFSIGGRSFDLTPQDYIFKIGEGVESQCTSGFTAMDIAPPRGPLWILGDIFMGPYHTVFDYGKGRVGFAKAA

SEQ ID NO: 48923 - DNA, 2011 bp, Arabidopsis thaliana
  misc_feature (1)..(2011): Ceres Seq. ID no. 12601061
  misc_feature: MA Experiment ID: 20000169 Result: Up-regulated in Transcription
  misc_feature: MA Experiment 20000169 PARAMETER Experiment Name: At_100uM_ABA_P Parameter: Age (day) Value: 14
  misc_feature: MA Experiment 20000169 PARAMETER Experiment Name: At_100uM_ABA_P Parameter: Organism Value: A. thaliana
  misc_feature: MA Experiment 20000169 PARAMETER Experiment Name: At_100uM_ABA_P Parameter: Plant Line Value: WS
  misc_feature: MA Experiment 20000169 PARAMETER Experiment Name: At_100uM_ABA_P Parameter: Timepoint (hr) Value: 6
  misc_feature: MA Experiment 20000169 PARAMETER Experiment Name: At_100uM_ABA_P Parameter: Tissue Value: Aerial
  misc_feature: MA Experiment 20000169 PARAMETER Experiment Name: At_100uM_ABA_P Parameter: Treatment Value: 100uM ABA vs. No Treatment
  misc_feature: MA Experiment ID: 20000180 Result: Up-regulated in Transcription
  misc_feature: MA Experiment 20000180 PARAMETER Experiment Name: At_Germinating_Seeds_P Parameter: Age (hr) Value: 24 vs. 0
  misc_feature: MA Experiment 20000180 PARAMETER Experiment Name: At_Germinating_Seeds_P Parameter: Tissue Value: Germinating Seeds
  misc_feature: MA Experiment ID: 20000269 Result: Down-regulated in Transcription
  misc_feature: MA Experiment 20000269 PARAMETER Experiment Name: At_1mM_KNO3_L-vs-H_Roots_P Parameter: Age (day) Value: 7,10,12
  misc_feature: MA Experiment 20000269 PARAMETER Experiment Name: At_1mM_KNO3_L-vs-H_Roots_P Parameter: Organism Value: A. thaliana
  misc_feature: MA Experiment 20000269 PARAMETER Experiment Name: At_1mM_KNO3_L-vs-H_Roots_P Parameter: Plant Line Value: WS
  misc_feature: MA Experiment 20000269 PARAMETER Experiment Name: At_1mM_KNO3_L-vs-H_Roots_P Parameter: Timepoint (day) Value: 7,10,12
  misc_feature: MA Experiment 20000269 PARAMETER Experiment Name: At_1mM_KNO3_L-vs-H_Roots_P Parameter: Tissue Value: Roots
  misc_feature: MA Experiment 20000269 PARAMETER Experiment Name: At_1mM_KNO3_L-vs-H_Roots_P Parameter: Treatment Value: 1mM KNO3 vs. 50mM KNO3
  misc_feature: MA Experiment ID: 20000437 Result: Up-regulated in Transcription
  misc_feature: MA Experiment 20000437 PARAMETER Experiment Name: At_Drought_P Parameter: Age (day) Value: 8
  misc_feature: MA Experiment 20000437 PARAMETER Experiment Name: At_Drought_P Parameter: Organism Value: A. thaliana
  misc_feature: MA Experiment 20000437 PARAMETER Experiment Name: At_Drought_P Parameter: Plant Line Value: WS
  misc_feature: MA Experiment 20000437 PARAMETER Experiment Name: At_Drought_P Parameter: Timepoint (hr) Value: 24
  misc_feature: MA Experiment 20000437 PARAMETER Experiment Name: At_Drought_P Parameter: Tissue Value: Whole Plant
  misc_feature: MA Experiment 20000437 PARAMETER Experiment Name: At_Drought_P Parameter: Treatment Value: Drought vs. No Drought
  misc_feature: MA Experiment ID: 20000453 Result: Up-regulated in Transcription
  misc_feature: MA Experiment 20000453 PARAMETER Experiment Name: At_100uM_ABA_P Parameter: Age (day) Value: 15
  misc_feature: MA Experiment 20000453 PARAMETER Experiment Name: At_100uM_ABA_P Parameter: Organism Value: A. thaliana
  misc_feature: MA Experiment 20000453 PARAMETER Experiment Name: At_100uM_ABA_P Parameter: Plant Line Value: WS
  misc_feature: MA Experiment 20000453 PARAMETER Experiment Name: At_100uM_ABA_P Parameter: Timepoint (hr) Value: 24
  misc_feature: MA Experiment 20000453 PARAMETER Experiment Name: At_100uM_ABA_P Parameter: Tissue Value: Aerial
  misc_feature: MA Experiment 20000453 PARAMETER Experiment Name: At_100uM_ABA_P Parameter: Treatment Value: 100uM ABA vs. No Treatment
  misc_feature: MA Experiment ID: 20000794 Result: Up-regulated in Transcription
  misc_feature: MA Experiment 20000794 PARAMETER Experiment Name: At_Petals_P Parameter: Age (day) Value: 23-25 days
  misc_feature: MA Experiment 20000794 PARAMETER Experiment Name: At_Petals_P Parameter: Plant Line Value: WS
  misc_feature: MA Experiment 20000794 PARAMETER Experiment Name: At_Petals_P Parameter: Tissue Value: Petals vs. Whole plant
  misc_feature: MA Experiment ID: 20001554 Result: Up-regulated in Transcription
  misc_feature: MA Experiment 20001554 PARAMETER Experiment Name: At_Drought_Soil_Dry_P Parameter: Age (day) Value: 21
  misc_feature: MA Experiment 20001554 PARAMETER Experiment Name: At_Drought_Soil_Dry_P Parameter: Organism Value: A. thaliana
  misc_feature: MA Experiment 20001554 PARAMETER Experiment Name: At_Drought_Soil_Dry_P Parameter: Plant Line Value: WS
  misc_feature: MA Experiment 20001554 PARAMETER Experiment Name: At_Drought_Soil_Dry_P Parameter: Post Timepoint (hr) Value: None
  misc_feature: MA Experiment 20001554 PARAMETER Experiment Name: At_Drought_Soil_Dry_P Parameter: Post-Treatment Value: None
  misc_feature: MA Experiment 20001554 PARAMETER Experiment Name: At_Drought_Soil_Dry_P Parameter: Timepoint (day) Value: 7
  misc_feature: MA Experiment 20001554 PARAMETER Experiment Name: At_Drought_Soil_Dry_P Parameter: Treatment Value: Drought vs. No Drought
  misc_feature: MA Experiment ID: 20001555 Result: Up-regulated in Transcription
  misc_feature: MA Experiment 20001555 PARAMETER Experiment Name: At_Drought_Soil_Dry_P Parameter: Age (day) Value: 24
  misc_feature: MA Experiment 20001555 PARAMETER Experiment Name: At_Drought_Soil_Dry_P Parameter: Organism Value: A. thaliana
  misc_feature: MA Experiment 20001555 PARAMETER Experiment Name: At_Drought_Soil_Dry_P Parameter: Plant Line Value: WS
  misc_feature: MA Experiment 20001555 PARAMETER Experiment Name: At_Drought_Soil_Dry_P Parameter: Post Timepoint (hr) Value: None
  misc_feature: MA Experiment 20001555 PARAMETER Experiment Name: At_Drought_Soil_Dry_P Parameter: Post-Treatment Value: None
  misc_feature: MA Experiment 20001555 PARAMETER Experiment Name: At_Drought_Soil_Dry_P Parameter: Timepoint (day) Value: 10
  misc_feature: MA Experiment 20001555 PARAMETER Experiment Name: At_Drought_Soil_Dry_P Parameter: Treatment Value: Drought vs. No Drought
  misc_feature: MA Experiment ID: 20001556 Result: Up-regulated in Transcription
  misc_feature: MA Experiment 20001556 PARAMETER Experiment Name: At_Drought_Soil_Dry_P Parameter: Age (day) Value: 26
  misc_feature: MA Experiment 20001556 PARAMETER Experiment Name: At_Drought_Soil_Dry_P Parameter: Organism Value: A. thaliana
  misc_feature: MA Experiment 20001556 PARAMETER Experiment Name: At_Drought_Soil_Dry_P Parameter: Plant Line Value: WS
  misc_feature: MA Experiment 20001556 PARAMETER Experiment Name: At_Drought_Soil_Dry_P Parameter: Post Timepoint (hr) Value: None
  misc_feature: MA Experiment 20001556 PARAMETER Experiment Name: At_Drought_Soil_Dry_P Parameter: Post-Treatment Value: None
  misc_feature: MA Experiment 20001556 PARAMETER Experiment Name: At_Drought_Soil_Dry_P Parameter: Timepoint (day) Value: 12
  misc_feature: MA Experiment 20001556 PARAMETER Experiment Name: At_Drought_Soil_Dry_P Parameter: Treatment Value: Drought vs. No Drought
  misc_feature: MA Experiment ID: 20001904 Result: Up-regulated in Transcription
  misc_feature: MA Experiment 20001904 PARAMETER Experiment Name: At_Drought_Reproduction_P Parameter: Age (day) Value: 37
  misc_feature: MA Experiment 20001904 PARAMETER Experiment Name: At_Drought_Reproduction_P Parameter: Organism Value: A. thaliana
  misc_feature: MA Experiment 20001904 PARAMETER Experiment Name: At_Drought_Reproduction_P Parameter: Plant Line Value: WS
  misc_feature: MA Experiment 20001904 PARAMETER Experiment Name: At_Drought_Reproduction_P Parameter: Timepoint (day) Value: 7
  misc_feature: MA Experiment 20001904 PARAMETER Experiment Name: At_Drought_Reproduction_P Parameter: Tissue Value: Rosettes
  misc_feature: MA Experiment 20001904 PARAMETER Experiment Name: At_Drought_Reproduction_P Parameter: Treatment Value: Drought vs. No Drought
  misc_feature: MA Experiment ID: 20001911 Result: Up-regulated in Transcription
  misc_feature: MA Experiment 20001911 PARAMETER Experiment Name: At_Drought_Reproduction_P Parameter: Age (day) Value: 40
  misc_feature: MA Experiment 20001911 PARAMETER Experiment Name: At_Drought_Reproduction_P Parameter: Organism Value: A. thaliana
  misc_feature: MA Experiment 20001911 PARAMETER Experiment Name: At_Drought_Reproduction_P Parameter: Plant Line Value: WS
  misc_feature: MA Experiment 20001911 PARAMETER Experiment Name: At_Drought_Reproduction_P Parameter: Timepoint (day) Value: 10
  misc_feature: MA Experiment 20001911 PARAMETER Experiment Name: At_Drought_Reproduction_P Parameter: Tissue Value: Flowers
  misc_feature: MA Experiment 20001911 PARAMETER Experiment Name: At_Drought_Reproduction_P Parameter: Treatment Value: Drought vs. No Drought
attcgctattttatcaccaatcttcttgaatcctctcatccaatcgtctgattctcatctttctccgttacttgtggatcttacgcaatgtatagagtttttgcgagccgagcactgagagctaagtctctctgtgacaaatcatccacctcgcttgcttctttgactctctccagattgaatcattccataccttttgctaccgtagatgccgaggagctctctggtgctcatcctgctgaagtacagagctttgtgcagggaaagtggataggatcgtcaaatcataacacgcttctagatcctctaaatggagaaccgtttatcaaagttgcggaagtggatgaatcaggaactcagccatttgtggacagcttatcccagtgcccgaaacatggtctccataaccctttcaaatctccagagagataccttttatatggagatatctcgacaaaggcagctcatatgctcgccttacctaaggttgctgatttcttcgcgaggttaattcaaagggttgctccaaagagttaccagcaagctgctggagaagtctttgtcacacggaagtttttagaaaacttttgtggtgatcaggtgcggttcctggcacggtcttttgcaatccctgggaatcatcttgggcagcaaagtcatggttaccgttggccttatggtcctgtaacgattgttacaccatttaattttccacttgagattccactacttcagttgatgggggcattatacatgggtaacaaacctcttcttaaagtggacagcaaggtaagcattgttatggagcaaatgatgcgattgctccactattgtggtttacccgctgaagatgtggactttataaattctgatgggaagacaatgaacaagatattgttagaggcgaacccacggatgaccctcttcacgggtagttctagagtagctgaaaagttggcacttgaccttaagggtcgaatcagattggaagatgctggatttgattggaaagtcttaggaccagatgttcaggaggttgattatgttgcatggcaatgtgatcaagatgcatacgcgtgcagtggacagaagtgttctgcacagtctatgctttttgttcatgagaactggtcaaaaacccctcttgtttccaaattaaaagaactagcggaaagacgcaaactggaagacttaaccattggtcctgtccttacatttacaactgaggcaatgttggagcacatggagaatctgcttcagattcctggctcaaagctactctttggtggcaaggaattgaagaatcattcgattccttcaatctacggagctttggagccaactgcagtttatgttcccattgaagaaatcttgaaggataataaaacctacgaactcgtcaccaaagaaatctttggaccatttcagattgtaacggaatacaaaaaggatcaacttcctctagtgttggaagcattggagaggatgcacgctcatctaactgcagctgttgtttcaaacgatcccatctttcttcaggaagtaatagggaactcagtgaatgggactacatatgctggactaagaggaagaacaactggagctcctcagaatcactggtttggacctgcgggggacccgagaggggccgggatagggacaccagaggctataaagctggtttggtcatgccacagagaagtcatctacgattatggtccggttccacaaggttgggaacttcctccatctacttagaagtggtgtgtccactaataattaataaactaagatcttagtgtgctgttgcatcaaataaatatgagttttgtagttttatctctacgagtagtttccgtgtgagggaataagagcttgaaacatgaagttttcaacgacgttgacttagtcaaggggtagagggattaagacagagagagaactattgtaaaactcagtccaccagaaattttcttcagctcaaagccagacaataatacaaatgtttttg

SEQ ID NO: 48924 - protein, 556 aa, Arabidopsis thaliana
  peptide (1)..(556): Ceres Seq. ID no. 12601062
  misc_feature (54)..(543): Homolog of NCBI NO: 14601625 NR Description: aldehyde dehydrogenase [Aeropyrum pernix]
  misc_feature (71)..(506): Homolog of NCBI NO: 16081701 NR Description: aldehyde dehydrogenase related protein
  misc_feature (53)..(524): Homolog of NCBI NO: 23098316 NR Description: aldehyde dehydrogenase [Oceanobacillus iheyensis
  misc_feature (1)..(556): Homolog of NCBI NO: 18449337 NR Description: putative aldehyde dehydrogenase BIS1 [Hordeum
  misc_feature (28)..(556): Homolog of NCBI NO: 18449341 NR Description: putative aldehyde dehydrogenase MIS1 [Zea mays]
  misc_feature (1)..(556): Homolog of NCBI NO: 18449343 NR Description: putative aldehyde dehydrogenase WIS1 [Triticum
  misc_feature (1)..(556): Homolog of NCBI NO: 34921534 NR Description: Probable aldehyde dehydrogenase (Flax inducible
  misc_feature (1)..(556): Homolog of NCBI NO: 10178084 NR Description: dehydrogenase [Arabidopsis thaliana]
  misc_feature (1)..(556): Homolog of NCBI NO: 15383744 NR Description: delta-1-pyrroline-5-carboxylate dehydrogenase
  misc_feature (1)..(556): Homolog of NCBI NO: 18424599 NR Description: dehydrogenase
MYRVFASRALRAKSLCDKSSTSLASLTLSRLNHSIPFATVDAEELSGAHPAEVQSFVQGKWIGSSNHNTLLDPLNGEPFIKVAEVDESGTQPFVDSLSQCPKHGLHNPFKSPERYLLYGDISTKAAHMLALPKVADFFARLIQRVAPKSYQQAAGEVFVTRKFLENFCGDQVRFLARSFAIPGNHLGQQSHGYRWPYGPVTIVTPFNFPLEIPLLQLMGALYMGNKPLLKVDSKVSIVMEQMMRLLHYCGLPAEDVDFINSDGKTMNKILLEANPRMTLFTGSSRVAEKLALDLKGRIRLEDAGFDWKVLGPDVQEVDYVAWQCDQDAYACSGQKCSAQSMLFVHENWSKTPLVSKLKELAERRKLEDLTIGPVLTFTTEAMLEHMENLLQIPGSKLLFGGKELKNHSIPSIYGALEPTAVYVPIEEILKDNKTYELVTKEIFGPFQIVTEYKKDQLPLVLEALERMHAHLTAAVVSNDPIFLQEVIGNSVNGTTYAGLRGRTTGAPQNHWFGPAGDPRGAGIGTPEAIKLVWSCHREVIYDYGPVPQGWELPPST

SEQ ID NO: 48925 - protein, 429 aa, Arabidopsis thaliana
  peptide (1)..(429): Ceres Seq. ID no. 12601063
  misc_feature (1)..(416): Homolog of NCBI NO: 14601625 NR Description: aldehyde dehydrogenase [Aeropyrum pernix]
  misc_feature (1)..(379): Homolog of NCBI NO: 16081701 NR Description: aldehyde dehydrogenase related protein
  misc_feature (1)..(397): Homolog of NCBI NO: 23098316 NR Description: aldehyde dehydrogenase [Oceanobacillus iheyensis
  misc_feature (1)..(429): Homolog of NCBI NO: 18449337 NR Description: putative aldehyde dehydrogenase BIS1 [Hordeum
  misc_feature (1)..(429): Homolog of NCBI NO: 18449341 NR Description: putative aldehyde dehydrogenase MIS1 [Zea mays]
  misc_feature (1)..(429): Homolog of NCBI NO: 18449343 NR Description: putative aldehyde dehydrogenase WIS1 [Triticum
  misc_feature (1)..(429): Homolog of NCBI NO: 34921534 NR Description: Probable aldehyde dehydrogenase (Flax inducible
  misc_feature (1)..(429): Homolog of NCBI NO: 10178084 NR Description: dehydrogenase [Arabidopsis thaliana]
  misc_feature (1)..(429): Homolog of NCBI NO: 15383744 NR Description: delta-1-pyrroline-5-carboxylate dehydrogenase
  misc_feature (1)..(429): Homolog of NCBI NO: 18424599 NR Description: dehydrogenase
MLALPKVADFFARLIQRVAPKSYQQAAGEVFVTRKFLENFCGDQVRFLARSFAIPGNHLGQQSHGYRWPYGPVTIVTPFNFPLEIPLLQLMGALYMGNKPLLKVDSKVSIVMEQMMRLLHYCGLPAEDVDFINSDGKTMNKILLEANPRMTLFTGSSRVAEKLALDLKGRIRLEDAGFDWKVLGPDVQEVDYVAWQCDQDAYACSGQKCSAQSMLFVHENWSKTPLVSKLKELAERRKLEDLTIGPVLTFTTEAMLEHMENLLQIPGSKLLFGGKELKNHSIPSIYGALEPTAVYVPIEEILKDNKTYELVTKEIFGPFQIVTEYKKDQLPLVLEALERMHAHLTAAVVSNDPIFLQEVIGNSVNGTTYAGLRGRTTGAPQNHWFGPAGDPRGAGIGTPEAIKLVWSCHREVIYDYGPVPQGWELPPST

SEQ ID NO: 48926 - protein, 339 aa, Arabidopsis thaliana
  peptide (1)..(339): Ceres Seq. ID no. 12601064
  misc_feature (1)..(326): Homolog of NCBI NO: 14601625 NR Description: aldehyde dehydrogenase [Aeropyrum pernix]
  misc_feature (1)..(289): Homolog of NCBI NO: 16081701 NR Description: aldehyde dehydrogenase related protein
  misc_feature (1)..(307): Homolog of NCBI NO: 23098316 NR Description: aldehyde dehydrogenase [Oceanobacillus iheyensis
  misc_feature (1)..(339): Homolog of NCBI NO: 18449337 NR Description: putative aldehyde dehydrogenase BIS1 [Hordeum
  misc_feature (1)..(339): Homolog of NCBI NO: 18449341 NR Description: putative aldehyde dehydrogenase MIS1 [Zea mays]
  misc_feature (1)..(339): Homolog of NCBI NO: 18449343 NR Description: putative aldehyde dehydrogenase WIS1 [Triticum
  misc_feature (1)..(339): Homolog of NCBI NO: 34921534 NR Description: Probable aldehyde dehydrogenase (Flax inducible
  misc_feature (1)..(339): Homolog of NCBI NO: 10178084 NR Description: dehydrogenase [Arabidopsis thaliana]
  misc_feature (1)..(339): Homolog of NCBI NO: 15383744 NR Description: delta-1-pyrroline-5-carboxylate dehydrogenase
  misc_feature (1)..(339): Homolog of NCBI NO: 18424599 NR Description: dehydrogenase
MGALYMGNKPLLKVDSKVSIVMEQMMRLLHYCGLPAEDVDFINSDGKTMNKILLEANPRMTLFTGSSRVAEKLALDLKGRIRLEDAGFDWKVLGPDVQEVDYVAWQCDQDAYACSGQKCSAQSMLFVHENWSKTPLVSKLKELAERRKLEDLTIGPVLTFTTEAMLEHMENLLQIPGSKLLFGGKELKNHSIPSIYGALEPTAVYVPIEEILKDNKTYELVTKEIFGPFQIVTEYKKDQLPLVLEALERMHAHLTAAVVSNDPIFLQEVIGNSVNGTTYAGLRGRTTGAPQNHWFGPAGDPRGAGIGTPEAIKLVWSCHREVIYDYGPVPQGWELPPST

SEQ ID NO: 48927 - DNA, 2543 bp, Arabidopsis thaliana
  misc_feature (1)..(2543): Ceres Seq. ID no. 13579120
  misc_feature: MA Experiment ID: 20000307 Result: Down-regulated in Transcription
  misc_feature: MA Experiment 20000307 PARAMETER Experiment Name: At_Germinating_Seeds_Sub_P Parameter: Age (hr) Value: 24 vs. 0
  misc_feature: MA Experiment 20000307 PARAMETER Experiment Name: At_Germinating_Seeds_Sub_P Parameter: Organism Value: A. thaliana
  misc_feature: MA Experiment 20000307 PARAMETER Experiment Name: At_Germinating_Seeds_Sub_P Parameter: Plant Line Value: WS
  misc_feature: MA Experiment 20000307 PARAMETER Experiment Name: At_Germinating_Seeds_Sub_P Parameter: Tissue Value: Germinating Seeds
  misc_feature: MA Experiment ID: 20000327 Result: Down-regulated in Transcription
  misc_feature: MA Experiment 20000327 PARAMETER Experiment Name: At_42deg_Heat_Sub_P Parameter: Age (day) Value: 14
  misc_feature: MA Experiment 20000327 PARAMETER Experiment Name: At_42deg_Heat_Sub_P Parameter: Organism Value: A. thaliana
  misc_feature: MA Experiment 20000327 PARAMETER Experiment Name: At_42deg_Heat_Sub_P Parameter: Plant Line Value: WS
  misc_feature: MA Experiment 20000327 PARAMETER Experiment Name: At_42deg_Heat_Sub_P Parameter: Temperature (deg C) Value: 42 vs. 22
  misc_feature: MA Experiment 20000327 PARAMETER Experiment Name: At_42deg_Heat_Sub_P Parameter: Timepoint (hr) Value: 1
  misc_feature: MA Experiment 20000327 PARAMETER Experiment Name: At_42deg_Heat_Sub_P Parameter: Tissue Value: Aerial
  misc_feature: MA Experiment ID: 20000328 Result: Down-regulated in Transcription
  misc_feature: MA Experiment 20000328 PARAMETER Experiment Name: At_42deg_Heat_Sub_P Parameter: Age (day) Value: 14
  misc_feature: MA Experiment 20000328 PARAMETER Experiment Name: At_42deg_Heat_Sub_P Parameter: Organism Value: A. thaliana
  misc_feature: MA Experiment 20000328 PARAMETER Experiment Name: At_42deg_Heat_Sub_P Parameter: Plant Line Value: WS
  misc_feature: MA Experiment 20000328 PARAMETER Experiment Name: At_42deg_Heat_Sub_P Parameter: Temperature (deg C) Value: 42 vs. 22
  misc_feature: MA Experiment 20000328 PARAMETER Experiment Name: At_42deg_Heat_Sub_P Parameter: Timepoint (hr) Value: 6
  misc_feature: MA Experiment 20000328 PARAMETER Experiment Name: At_42deg_Heat_Sub_P Parameter: Tissue Value: Aerial
  misc_feature: MA Experiment ID: 20000346 Result: Down-regulated in Transcription
  misc_feature: MA Experiment 20000346 PARAMETER Experiment Name: At_2mM_SA_Sub_P Parameter: Age (day) Value: 14
  misc_feature: MA Experiment 20000346 PARAMETER Experiment Name: At_2mM_SA_Sub_P Parameter: Organism Value: A. thaliana
  misc_feature: MA Experiment 20000346 PARAMETER Experiment Name: At_2mM_SA_Sub_P Parameter: Plant Line Value: WS
  misc_feature: MA Experiment 20000346 PARAMETER Experiment Name: At_2mM_SA_Sub_P Parameter: Timepoint (hr) Value: 1
  misc_feature: MA Experiment 20000346 PARAMETER Experiment Name: At_2mM_SA_Sub_P Parameter: Tissue Value: Aerial
  misc_feature: MA Experiment 20000346 PARAMETER Experiment Name: At_2mM_SA_Sub_P Parameter: Treatment Value: 2mM SA vs. No Treatment
  misc_feature: MA Experiment ID: 20000355 Result: Up-regulated in Transcription
  misc_feature: MA Experiment 20000355 PARAMETER Experiment Name: At_Siliques_Sub_P Parameter: Age (day) Value: 21
  misc_feature: MA Experiment 20000355 PARAMETER Experiment Name: At_Siliques_Sub_P Parameter: Organism Value: A. thaliana
  misc_feature: MA Experiment 20000355 PARAMETER Experiment Name: At_Siliques_Sub_P Parameter: Plant Line Value: WS
  misc_feature: MA Experiment 20000355 PARAMETER Experiment Name: At_Siliques_Sub_P Parameter: Tissue Value: Less Than 5mm Siliques vs. Whole Plant
ataaatagcccatcaaacccctacaacggattagggctataacattccaccaaacacaaaagatacaagtttaagaccatgaagaagcttacttctctcttccctctcctctttctcattcccctcttagcctcatgtgctgaagaaaaacaggtgtatattgtctattttggagaacataaaggtgataaagcctttcatgaaattgaagaacatcatcattcttatcttcaatcggttaaagaatccgaagaagacgctagagcatcgctcttgtatagctacaaacatagcatcaatggcttcgcggctgagctaacccctgaccaagcctctaaactagaaaaattagcagaggttgtttcagtattcaagagccatccaagaaaatatgaagcacatacgacacggtcatgggaatttgtaggattggaggaggaagaaaccgacagtgatgttccacgtcgaaaaaatgatgccgatgatcggtttcgtgtgggaagaaattttttgaagaaggcaaagcatggtgatggaatcatcgtcggtgttctcgacagtggtgtgtggccagaatcaaagagtttcaatgacaaaggaatgggaccagttccaaaatcatggaaaggaatctgccaaaccggagttgcctttaactcttctcactgtaaccggaaaattattggagcgaggtattacgtgaaagggtacgaaagatattacggagcgttcaacgctacagcaaacaaagacttcttgtctccaagagatcccgacggacatgggtcccacacagcttctactgccgttggccgtcgagttctcggtgcatccgcacttggcggtttcgccaagggctcggcatcgggcggtgcaccgttagctcgtctagctatttacaaagcttgttgggccaagcccaatgcggaaaaagttgaaggaaatatctgtctagaagaggacatgcttgccgcgatcgatgacgccatcgctgatggcgttcacgtcatcagcatttccatcggaacgaccgagccttttccatttacacaagatggaatcgcgatgggggcgttgcatgcggttaagaggaatattgtggttgctgctagcgctgggaattcagggccaaagccgggaactttgtcgaatctggcaccgtggattataactgtcggagctagtactcttgatcgggctttcgttggcggtcttgttcttggcaatggctatacaatcaagacggattcgataacggcatttaaaatggacaaatttgcccctcttgtttacgcttctaacgtggttgttcccggcattgcattgaacgagacatcgcaatgtttaccaaattcactaaaaccggagcttgtgagtggtaaagtggtcttgtgtttaagaggagccggttcaagaatcggtaaaggcatggaggtaaaacgagctggaggagccggtatgattctcggaaatatcgcagctaacggcaatgaagttccttcagactctcattttgttccgactgccggggttaccccaaccgtggtcgataaaattctggagtacatcaaaaccgataaaaacccgaaggcttttatcaaaccggggaaaacggtttacaaataccaagcagctccttccatgaccgggttttctagccgcggcccaaacgttgtagaccccaacattctaaagccggatataaccgccccaggactgtacatactggctgcatggagcggagcagattcaccgagcaaaatgtcagtagatcaaagagttgcaggttataacatctactcaggaacttcaatgtcttgtcctcatgtcgctggtgcaattgctcttctcaaagccattcatcccaaatggagtagcgctgctataagatcagctcttatgaccactgcttggatgactaacgacaagaagaaaccgatccaagacactactggtttaccagcaaacccatttgcacttgggtcaggacatttcagaccaacaaaagctgcagatcccggtttagtctatgatgcatcataccgagcttaccttctctatggctgctcggttaacatcaccaatattgacccgacattcaaatgtcctagtaaaattccgcccggttataatcacaattacccgtcaatcgcggtcccgaatctcaagaagacggtgaccgttaaaagaacagttacaaatgttggaactggtaactcaacaagcacatacttattcagcgttaaaccgccatcgggtatttcggttaaggctataccgaatatattgtcctttaaccggattggtcagaagcagcggtttaaaatcgttattaaaccactgaagaaccaggtgatgaatgcgactgaaaagggtcaataccaatttggatggtttagttggacagataaagtccatgttgtgaggagtccaattgctgtttccttagcttgattgttgtttgcttatttgggatggttttattagtcggtttggatgttatagaggtcaaagtgaaagaaatagaaaatatttttctgatc

SEQ ID NO: 48928 - protein, 791 aa, Arabidopsis thaliana
  peptide (1)..(791): Ceres Seq. ID no. 13579121
  misc_feature (293)..(372): Pfam Name: Subtilase family Pfam Description: Subtilase family
  misc_feature (146)..(771): Homolog of NCBI NO: 20198252 NR Description: subtilisin-like serine protease AIR3 [Arabidopsis
  misc_feature (1)..(116): Homolog of NCBI NO: 30697281 NR Description: subtilisin-like serine protease [Arabidopsis
  misc_feature (147)..(791): Homolog of NCBI NO: 30697281 NR Description: subtilisin-like serine protease [Arabidopsis
  misc_feature (16)..(136): Homolog of NCBI NO: 11358862 NR Description: subtilisin-like proteinase AIR3, auxin-induced
  misc_feature (146)..(790): Homolog of NCBI NO: 11358862 NR Description: subtilisin-like proteinase AIR3, auxin-induced
  misc_feature (3)..(136): Homolog of NCBI NO: 22325457 NR Description: subtilisin-like serine protease AIR3 [Arabidopsis
  misc_feature (146)..(790): Homolog of NCBI NO: 22325457 NR Description: subtilisin-like serine protease AIR3 [Arabidopsis
  misc_feature (442)..(521): Homolog of NCBI NO: 15242454 NR Description: subtilisin-related protease [Arabidopsis
  misc_feature (540)..(790): Homolog of NCBI NO: 15242454 NR Description: subtilisin-related protease [Arabidopsis
  misc_feature (72)..(418): Homolog of NCBI NO: 15242454 NR Description: subtilisin-related protease [Arabidopsis
MKKLTSLFPLLFLIPLLASCAEEKQVYIVYFGEHKGDKAFHEIEEHHHSYLQSVKESEEDARASLLYSYKHSINGFAAELTPDQASKLEKLAEVVSVFKSHPRKYEAHTTRSWEFVGLEEEETDSDVPRRKNDADDRFRVGRNFLKKAKHGDGIIVGVLDSGVWPESKSFNDKGMGPVPKSWKGICQTGVAFNSSHCNRKIIGARYYVKGYERYYGAFNATANKDFLSPRDPDGHGSHTASTAVGRRVLGASALGGFAKGSASGGAPLARLAIYKACWAKPNAEKVEGNICLEEDMLAAIDDAIADGVHVISISIGTTEPFPFTQDGIAMGALHAVKRNIVVAASAGNSGPKPGTLSNLAPWIITVGASTLDRAFVGGLVLGNGYTIKTDSITAFKMDKFAPLVYASNVVVPGIALNETSQCLPNSLKPELVSGKVVLCLRGAGSRIGKGMEVKRAGGAGMILGNIAANGNEVPSDSHFVPTAGVTPTVVDKILEYIKTDKNPKAFIKPGKTVYKYQAAPSMTGFSSRGPNVVDPNILKPDITAPGLYILAAWSGADSPSKMSVDQRVAGYNIYSGTSMSCPHVAGAIALLKAIHPKWSSAAIRSALMTTAWMTNDKKKPIQDTTGLPANPFALGSGHFRPTKAADPGLVYDASYRAYLLYGCSVNITNIDPTFKCPSKIPPGYNHNYPSIAVPNLKKTVTVKRTVTNVGTGNSTSTYLFSVKPPSGISVKAIPNILSFNRIGQKQRFKIVIKPLKNQVMNATEKGQYQFGWFSWTDKVHVVRSPIAVSLA

SEQ ID NO: 48929 - protein, 617 aa, Arabidopsis thaliana
  peptide (1)..(617): Ceres Seq. ID no. 13579122
  misc_feature (119)..(198): Pfam Name: Subtilase family Pfam Description: Subtilase family
  misc_feature (1)..(615): Homolog of NCBI NO: 20147211 NR Description: AT5g67360/K8K14_8 [Arabidopsis thaliana]
  misc_feature (1)..(615): Homolog of NCBI NO: 18425181 NR Description: subtilisin-like serine protease ARA12
  misc_feature (1)..(617): Homolog of NCBI NO: 9757901 NR Description: serine protease-like protein [Arabidopsis
  misc_feature (1)..(597): Homolog of NCBI NO: 20198252 NR Description: subtilisin-like serine protease AIR3 [Arabidopsis
  misc_feature (1)..(617): Homolog of NCBI NO: 30697281 NR Description: subtilisin-like serine protease [Arabidopsis
  misc_feature (1)..(616): Homolog of NCBI NO: 11358862 NR Description: subtilisin-like proteinase AIR3, auxin-induced
  misc_feature (1)..(616): Homolog of NCBI NO: 22325457 NR Description: subtilisin-like serine protease AIR3 [Arabidopsis
  misc_feature (268)..(347): Homolog of NCBI NO: 15242454 NR Description: subtilisin-related protease [Arabidopsis
  misc_feature (366)..(616): Homolog of NCBI NO: 15242454 NR Description: subtilisin-related protease [Arabidopsis
  misc_feature (1)..(244): Homolog of NCBI NO: 15242454 NR Description: subtilisin-related protease [Arabidopsis
MGPVPKSWKGICQTGVAFNSSHCNRKIIGARYYVKGYERYYGAFNATANKDFLSPRDPDGHGSHTASTAVGRRVLGASALGGFAKGSASGGAPLARLAIYKACWAKPNAEKVEGNICLEEDMLAAIDDAIADGVHVISISIGTTEPFPFTQDGIAMGALHAVKRNIVVAASAGNSGPKPGTLSNLAPWIITVGASTLDRAFVGGLVLGNGYTIKTDSITAFKMDKFAPLVYASNVVVPGIALNETSQCLPNSLKPELVSGKVVLCLRGAGSRIGKGMEVKRAGGAGMILGNIAANGNEVPSDSHFVPTAGVTPTVVDKILEYIKTDKNPKAFIKPGKTVYKYQAAPSMTGFSSRGPNVVDPNILKPDITAPGLYILAAWSGADSPSKMSVDQRVAGYNIYSGTSMSCPHVAGAIALLKAIHPKWSSAAIRSALMTTAWMTNDKKKPIQDTTGLPANPFALGSGHFRPTKAADPGLVYDASYRAYLLYGCSVNITNIDPTFKCPSKIPPGYNHNYPSIAVPNLKKTVTVKRTVTNVGTGNSTSTYLFSVKPPSGISVKAIPNILSFNRIGQKQRFKIVIKPLKNQVMNATEKGQYQFGWFSWTDKVHVVRSPIAVSLA

SEQ ID NO: 48930 - protein, 496 aa, Arabidopsis thaliana
  peptide (1)..(496): Ceres Seq. ID no. 13579123
  misc_feature (1)..(77): Pfam Name: Subtilase family Pfam Description: Subtilase family
  misc_feature (1)..(494): Homolog of NCBI NO: 20147211 NR Description: AT5g67360/K8K14_8 [Arabidopsis thaliana]
  misc_feature (1)..(494): Homolog of NCBI NO: 18425181 NR Description: subtilisin-like serine protease ARA12
  misc_feature (1)..(496): Homolog of NCBI NO: 9757901 NR Description: serine protease-like protein [Arabidopsis
  misc_feature (1)..(476): Homolog of NCBI NO: 20198252 NR Description: subtilisin-like serine protease AIR3 [Arabidopsis
  misc_feature (1)..(496): Homolog of NCBI NO: 30697281 NR Description: subtilisin-like serine protease [Arabidopsis
  misc_feature (1)..(495): Homolog of NCBI NO: 11358862 NR Description: subtilisin-like proteinase AIR3, auxin-induced
  misc_feature (1)..(495): Homolog of NCBI NO: 22325457 NR Description: subtilisin-like serine protease AIR3 [Arabidopsis
  misc_feature (147)..(226): Homolog of NCBI NO: 15242454 NR Description: subtilisin-related protease [Arabidopsis
  misc_feature (245)..(495): Homolog of NCBI NO: 15242454 NR Description: subtilisin-related protease [Arabidopsis
  misc_feature (1)..(123): Homolog of NCBI NO: 15242454 NR Description: subtilisin-related protease [Arabidopsis
MLAAIDDAIADGVHVISISIGTTEPFPFTQDGIAMGALHAVKRNIVVAASAGNSGPKPGTLSNLAPWIITVGASTLDRAFVGGLVLGNGYTIKTDSITAFKMDKFAPLVYASNVVVPGIALNETSQCLPNSLKPELVSGKVVLCLRGAGSRIGKGMEVKRAGGAGMILGNIAANGNEVPSDSHFVPTAGVTPTVVDKILEYIKTDKNPKAFIKPGKTVYKYQAAPSMTGFSSRGPNVVDPNILKPDITAPGLYILAAWSGADSPSKMSVDQRVAGYNIYSGTSMSCPHVAGAIALLKAIHPKWSSAAIRSALMTTAWMTNDKKKPIQDTTGLPANPFALGSGHFRPTKAADPGLVYDASYRAYLLYGCSVNITNIDPTFKCPSKIPPGYNHNYPSIAVPNLKKTVTVKRTVTNVGTGNSTSTYLFSVKPPSGISVKAIPNILSFNRIGQKQRFKIVIKPLKNQVMNATEKGQYQFGWFSWTDKVHVVRSPIAVSLA

SEQ ID NO: 48931 - DNA, 2113 bp, Arabidopsis thaliana
  misc_feature (1)..(2113): Ceres Seq. ID no. 14310113
  misc_feature: MA Experiment ID: 20000438 Result: Up-regulated in Transcription
  misc_feature: MA Experiment 20000438 PARAMETER Experiment Name: At_Shoots__P Parameter: Age (day) Value: 14
  misc_feature: MA Experiment 20000438 PARAMETER Experiment Name: At_Shoots__P Parameter: Tissue Value: Shoots vs. Whole Plant
gacgacggttctccgagagagagattttttaaaaatcaaattgcaacagaagagagataaaaggaagaaccctaatcgatttcgcgctctgattcgttctactttttccactgattaatctcaaaaaatggcgagtgagagttcgcaatcttcctcgccgtcgtcatctcaacctccgtcatctgtaccttctccgtcgccgggtaacaacgtcggcgatacgtttataggaagtttcatcagtctaatttctaagtacgagatccgttacgaaggcattctctaccatctcaacgttcaggactcgacgctaggtctaaaaaacgtaagatcatgtggaacggaggggaggaagaaagatgggccgcaaattccgccatgtgataaagtttacgattacattctttttcgtggaagtgacatcaaggatctccaagttaacccatctccatctgctcaatcaagacaagagattcaaagtgaacaagacgtcaatcagtcccctcactctaggccagctatgactatgagctctccgatttctggctatgatagcggttatggtttggggagaggatcacaatggatcaatacacctgctttgagtagtaaaccggttcctgtcacacaacattcatcagtccctttaagcttccagcctccttcagctaatgctggaagtttgacagaatcaccagtgagcttaattgattcaactcaaagtaatgctggttcctcgatgcccatgccttcttttgtgcaaggtaacaaatttgcttccagtggtgtccctcttggtatgatgcagaagccagtttcatcctcctcgaccatacccaatggtccgcagattatagattatttttcttcaccaatcatggggttagtggatgattcatcacaggttgttactcgttcacctgacgtctcttccaatcaatcatactcttccaacccttctcctcttggtcaaacacaactccatactccacctggccttgcttcagtatcctctaacctttctccaccttctgaagcgcagctttctgctccaaatattcagaaaatttaccccagtgcaccccaggctattggtaaagttgtctatgaccctcagtctaatcatcctcaccgatctaaacctcatgagttacctgctgtggcttctaattcagctcctgtgattcctggtccattgtcaaaatcgcctgagtcatttttcggtatggatccgtcactgcaatctaggcagcagatggtatataggggtcaagagatgtttgctgcaactaacccggcatcagcgaatgtgccatcacaaagttttgctcccagaaatcatgcaccattgctgcctcttccagtttcagctcatcagtctcggatccctagttctagcattgagtacactgaagaatttgattttgaagcaatgaatgagaagttcaagaagagtgaactatggggttatcttggaagaaataaccagaggaatcaaaatgattatggggaagaaactgcgattgagccaaacgcagaagggaagcctgcatataacaaggatgacttttttgacacaatctcgtgcaatcaacttgaccgtgtggcaagaagcggacaacagcacaaccagtttcccgaacacatgagacaagttcctgaggcatttggtaataattttcaaaggccacctccactacaaccaggtcagggtgcatatctcgctgcacaaaccaattacagaggcggataccataataacaacaacaacaactactactcaaactcgggttatggttactactctggtgggagaggccgaggcagaaacacacatttctgacctgctgagtttctatcttccaaggctttattggtcactcgcgtacacacatttctactcttagcccttctttaaagttttaaattcagctttttgggtaaaaacagttgtatggttaccacatcgcgagatgtgtaggcatatcatattggcaagttcatgttcctttttttaatctgatgaactttagcctcaggagagaatgtttgttcatgtagagaaaacaaaaagtactacgaacctttttggtaaacgcaaatcattaagtac

SEQ ID NO: 48932 - protein, 571 aa, Arabidopsis thaliana
  peptide (1)..(571): Ceres Seq. ID no. 14310114
  misc_feature (1)..(571): Homolog of NCBI NO: 15242378 NR Description: hypothetical protein [Arabidopsis thaliana]
MASESSQSSSPSSSQPPSSVPSPSPGNNVGDTFIGSFISLISKYEIRYEGILYHLNVQDSTLGLKNVRSCGTEGRKKDGPQIPPCDKVYDYILFRGSDIKDLQVNPSPSAQSRQEIQSEQDVNQSPHSRPAMTMSSPISGYDSGYGLGRGSQWINTPALSSKPVPVTQHSSVPLSFQPPSANAGSLTESPVSLIDSTQSNAGSSMPMPSFVQGNKFASSGVPLGMMQKPVSSSSTIPNGPQIIDYFSSPIMGLVDDSSQVVTRSPDVSSNQSYSSNPSPLGQTQLHTPPGLASVSSNLSPPSEAQLSAPNIQKIYPSAPQAIGKVVYDPQSNHPHRSKPHELPAVASNSAPVIPGPLSKSPESFFGMDPSLQSRQQMVYRGQEMFAATNPASANVPSQSFAPRNHAPLLPLPVSAHQSRIPSSSIEYTEEFDFEAMNEKFKKSELWGYLGRNNQRNQNDYGEETAIEPNAEGKPAYNKDDFFDTISCNQLDRVARSGQQHNQFPEHMRQVPEAFGNNFQRPPPLQPGQGAYLAAQTNYRGGYHNNNNNNYYSNSGYGYYSGGRGRGRNTHF

SEQ ID NO: 48933 - protein, 440 aa, Arabidopsis thaliana
  peptide (1)..(440): Ceres Seq. ID no. 14310115
  misc_feature (1)..(440): Homolog of NCBI NO: 15242378 NR Description: hypothetical protein [Arabidopsis thaliana]
MTMSSPISGYDSGYGLGRGSQWINTPALSSKPVPVTQHSSVPLSFQPPSANAGSLTESPVSLIDSTQSNAGSSMPMPSFVQGNKFASSGVPLGMMQKPVSSSSTIPNGPQIIDYFSSPIMGLVDDSSQVVTRSPDVSSNQSYSSNPSPLGQTQLHTPPGLASVSSNLSPPSEAQLSAPNIQKIYPSAPQAIGKVVYDPQSNHPHRSKPHELPAVASNSAPVIPGPLSKSPESFFGMDPSLQSRQQMVYRGQEMFAATNPASANVPSQSFAPRNHAPLLPLPVSAHQSRIPSSSIEYTEEFDFEAMNEKFKKSELWGYLGRNNQRNQNDYGEETAIEPNAEGKPAYNKDDFFDTISCNQLDRVARSGQQHNQFPEHMRQVPEAFGNNFQRPPPLQPGQGAYLAAQTNYRGGYHNNNNNNYYSNSGYGYYSGGRGRGRNTHF

SEQ ID NO: 48934 - protein, 438 aa, Arabidopsis thaliana
  peptide (1)..(438): Ceres Seq. ID no. 14310116
  misc_feature (1)..(438): Homolog of NCBI NO: 15242378 NR Description: hypothetical protein [Arabidopsis thaliana]
MSSPISGYDSGYGLGRGSQWINTPALSSKPVPVTQHSSVPLSFQPPSANAGSLTESPVSLIDSTQSNAGSSMPMPSFVQGNKFASSGVPLGMMQKPVSSSSTIPNGPQIIDYFSSPIMGLVDDSSQVVTRSPDVSSNQSYSSNPSPLGQTQLHTPPGLASVSSNLSPPSEAQLSAPNIQKIYPSAPQAIGKVVYDPQSNHPHRSKPHELPAVASNSAPVIPGPLSKSPESFFGMDPSLQSRQQMVYRGQEMFAATNPASANVPSQSFAPRNHAPLLPLPVSAHQSRIPSSSIEYTEEFDFEAMNEKFKKSELWGYLGRNNQRNQNDYGEETAIEPNAEGKPAYNKDDFFDTISCNQLDRVARSGQQHNQFPEHMRQVPEAFGNNFQRPPPLQPGQGAYLAAQTNYRGGYHNNNNNNYYSNSGYGYYSGGRGRGRNTHF

SEQ ID NO: 48935 - DNA, 2414 bp, Arabidopsis thaliana; identical to SEQ ID NO: 38818
  misc_feature (1)..(2414): Ceres Seq. ID no. 12325652
  misc_feature: MA Experiment ID: 108434 Result: Down-regulated in Transcription
  misc_feature: MA Experiment 108434 PARAMETER Experiment Name: At_Root_Tips_cDNA_P Parameter: Tissue Value: Root Tips
  misc_feature: MA Experiment ID: 108607 Result: Up-regulated in Transcription
  misc_feature: MA Experiment 108607 PARAMETER Experiment Name: At_100uM_ABA_cDNA_P Parameter: Timepoint (hr) Value: 4
  misc_feature: MA Experiment 108607 PARAMETER Experiment Name: At_100uM_ABA_cDNA_P Parameter: Tissue Value: Aerial
  misc_feature: MA Experiment 108607 PARAMETER Experiment Name: At_100uM_ABA_cDNA_P Parameter: Treatment Value: 100uM ABA vs. No Treatment
  misc_feature: MA Experiment ID: 20000070 Result: Up-regulated in Transcription
  misc_feature: MA Experiment 20000070 PARAMETER Experiment Name: At_100uM_ABA_Mutants_cDNA_P Parameter: Plant Line Value: CS24
  misc_feature: MA Experiment 20000070 PARAMETER Experiment Name: At_100uM_ABA_Mutants_cDNA_P Parameter: Timepoint (hr) Value: 6
  misc_feature: MA Experiment 20000070 PARAMETER Experiment Name: At_100uM_ABA_Mutants_cDNA_P Parameter: Tissue Value: Aerial
  misc_feature: MA Experiment 20000070 PARAMETER Experiment Name: At_100uM_ABA_Mutants_cDNA_P Parameter: Treatment Value: 100uM ABA vs. No Treatment
  misc_feature: MA Experiment ID: 20000087 Result: Up-regulated in Transcription
  misc_feature: MA Experiment 20000087 PARAMETER Experiment Name: At_100uM_ABA_Mutants_cDNA_P Parameter: Plant Line Value: WS
  misc_feature: MA Experiment 20000087 PARAMETER Experiment Name: At_100uM_ABA_Mutants_cDNA_P Parameter: Timepoint (hr) Value: 6
  misc_feature: MA Experiment 20000087 PARAMETER Experiment Name: At_100uM_ABA_Mutants_cDNA_P Parameter: Tissue Value: Aerial
  misc_feature: MA Experiment 20000087 PARAMETER Experiment Name: At_100uM_ABA_Mutants_cDNA_P Parameter: Treatment Value: 100uM ABA vs. No Treatment
  misc_feature: MA Experiment ID: 20000227 Result: Up-regulated in Transcription
  misc_feature: MA Experiment 20000227 PARAMETER Experiment Name: At_Root-Tips-vs-Tops_P Parameter: Tissue Value: Root Tips vs. Root Tops
  misc_feature: MA Experiment ID: 20000234 Result: Up-regulated in Transcription
  misc_feature: MA Experiment 20000234 PARAMETER Experiment Name: At_Siliques_P Parameter: Age (day) Value: 21
  misc_feature: MA Experiment 20000234 PARAMETER Experiment Name: At_Siliques_P Parameter: Organism Value: A. thaliana
  misc_feature: MA Experiment 20000234 PARAMETER Experiment Name: At_Siliques_P Parameter: Plant Line Value: WS
  misc_feature: MA Experiment 20000234 PARAMETER Experiment Name: At_Siliques_P Parameter: Tissue Value: Less Than 5mm Siliques vs. Whole Plant
  misc_feature: MA Experiment ID: 20000235 Result: Up-regulated in Transcription
  misc_feature: MA Experiment 20000235 PARAMETER Experiment Name: At_Siliques_P Parameter: Age (day) Value: 21
  misc_feature: MA Experiment 20000235 PARAMETER Experiment Name: At_Siliques_P Parameter: Organism Value: A. thaliana
  misc_feature: MA Experiment 20000235 PARAMETER Experiment Name: At_Siliques_P Parameter: Plant Line Value: WS
  misc_feature: MA Experiment 20000235 PARAMETER Experiment Name: At_Siliques_P Parameter: Tissue Value: 5-10mm Siliques vs. Whole Plant
  misc_feature: MA Experiment ID: 20000264 Result: Up-regulated in Transcription
  misc_feature: MA Experiment 20000264 PARAMETER Experiment Name: At_Open_Flower_P Parameter: Age (day) Value: 21
  misc_feature: MA Experiment 20000264 PARAMETER Experiment Name: At_Open_Flower_P Parameter: Plant Line Value: WS
  misc_feature: MA Experiment 20000264 PARAMETER Experiment Name: At_Open_Flower_P Parameter: Tissue Value: Open Flower vs. Whole Plant
  misc_feature: MA Experiment ID: 20000265 Result: Up-regulated in Transcription
  misc_feature: MA Experiment 20000265 PARAMETER Experiment Name: At_Open_Flower_P Parameter: Age (day) Value: 21
  misc_feature: MA Experiment 20000265 PARAMETER Experiment Name: At_Open_Flower_P Parameter: Plant Line Value: WS
  misc_feature: MA Experiment 20000265 PARAMETER Experiment Name: At_Open_Flower_P Parameter: Tissue Value: Closed Flower vs. Whole Plant
  misc_feature: MA Experiment ID: 20000286 Result: Up-regulated in Transcription
  misc_feature: MA Experiment 20000286 PARAMETER Experiment Name: At_Open_Flower_P Parameter: Age (day) Value: 21
  misc_feature: MA Experiment 20000286 PARAMETER Experiment Name: At_Open_Flower_P Parameter: Plant Line Value: WS
  misc_feature: MA Experiment 20000286 PARAMETER Experiment Name: At_Open_Flower_P Parameter: Tissue Value: Half Open vs. Whole Plant
  misc_feature: MA Experiment ID: 20000439 Result: Down-regulated in Transcription
  misc_feature: MA Experiment 20000439 PARAMETER Experiment Name: At_Roots__P Parameter: Age (day) Value: 14 vs. 21
  misc_feature: MA Experiment 20000439 PARAMETER Experiment Name: At_Roots__P Parameter: Organism Value: A. thaliana
  misc_feature: MA Experiment 20000439 PARAMETER Experiment Name: At_Roots__P Parameter: Tissue Value: Roots vs. Whole Plant
  misc_feature: MA Experiment ID: 20000452 Result: Up-regulated in Transcription
  misc_feature: MA Experiment 20000452 PARAMETER Experiment Name: At_CS6879_Shoots-Roots_P Parameter: Age (day) Value: 14
  misc_feature: MA Experiment 20000452 PARAMETER Experiment Name: At_CS6879_Shoots-Roots_P Parameter: Organism Value: A. thaliana
  misc_feature: MA Experiment 20000452 PARAMETER Experiment Name: At_CS6879_Shoots-Roots_P Parameter: Plant Line Value: CS6879 vs. WS
  misc_feature: MA Experiment 20000452 PARAMETER Experiment Name: At_CS6879_Shoots-Roots_P Parameter: Tissue Value: Shoots
  misc_feature: MA Experiment ID: 20000794 Result: Up-regulated in Transcription
  misc_feature: MA Experiment 20000794 PARAMETER Experiment Name: At_Petals_P Parameter: Age (day) Value: 23-25 days
  misc_feature: MA Experiment 20000794 PARAMETER Experiment Name: At_Petals_P Parameter: Plant Line Value: WS
  misc_feature: MA Experiment 20000794 PARAMETER Experiment Name: At_Petals_P Parameter: Tissue Value: Petals vs. Whole plant
  misc_feature: MA Experiment ID: 20001248 Result: Down-regulated in Transcription
  misc_feature: MA Experiment 20001248 PARAMETER Experiment Name: At_Far-red-induction_P Parameter: Age (day) Value: 7
  misc_feature: MA Experiment 20001248 PARAMETER Experiment Name: At_Far-red-induction_P Parameter: Light Value: Far-red vs. White
  misc_feature: MA Experiment 20001248 PARAMETER Experiment Name: At_Far-red-induction_P Parameter: Organism Value: A. thaliana
  misc_feature: MA Experiment 20001248 PARAMETER Experiment Name: At_Far-red-induction_P Parameter: Plant Line Value: Columbia
  misc_feature: MA Experiment 20001248 PARAMETER Experiment Name: At_Far-red-induction_P Parameter: Timepoint (hr) Value: 4
  misc_feature: MA Experiment 20001248 PARAMETER Experiment Name: At_Far-red-induction_P Parameter: Tissue Value: Whole Plant
  misc_feature: MA Experiment ID: 20001450 Result: Down-regulated in Transcription
  misc_feature: MA Experiment 20001450 PARAMETER Experiment Name: At_Far-red-induction_P Parameter: Age (day) Value: 7
  misc_feature: MA Experiment 20001450 PARAMETER Experiment Name: At_Far-red-induction_P Parameter: Light Value: Far-red vs. White
  misc_feature: MA Experiment 20001450 PARAMETER Experiment Name: At_Far-red-induction_P Parameter: Organism Value: A. thaliana
  misc_feature: MA Experiment 20001450 PARAMETER Experiment Name: At_Far-red-induction_P Parameter: Plant Line Value: Columbia
  misc_feature: MA Experiment 20001450 PARAMETER Experiment Name: At_Far-red-induction_P Parameter: Timepoint (hr) Value: 8
  misc_feature: MA Experiment 20001450 PARAMETER Experiment Name: At_Far-red-induction_P Parameter: Tissue Value: Whole Plant
  misc_feature: MA Experiment ID: 20001557 Result: Up-regulated in Transcription
  misc_feature: MA Experiment 20001557 PARAMETER Experiment Name: At_Drought_Soil_Dry_P Parameter: Age (day) Value: 27
  misc_feature: MA Experiment 20001557 PARAMETER Experiment Name: At_Drought_Soil_Dry_P Parameter: Organism Value: A. thaliana
  misc_feature: MA Experiment 20001557 PARAMETER Experiment Name: At_Drought_Soil_Dry_P Parameter: Plant Line Value: WS
  misc_feature: MA Experiment 20001557 PARAMETER Experiment Name: At_Drought_Soil_Dry_P Parameter: Post Timepoint (hr) Value: 3
  misc_feature: MA Experiment 20001557 PARAMETER Experiment Name: At_Drought_Soil_Dry_P Parameter: Post-Treatment Value: Re-Water vs. No Drought
  misc_feature: MA Experiment 20001557 PARAMETER Experiment Name: At_Drought_Soil_Dry_P Parameter: Timepoint (day) Value: 13
  misc_feature: MA Experiment 20001557 PARAMETER Experiment Name: At_Drought_Soil_Dry_P Parameter: Treatment Value: Drought vs. No Drought
  misc_feature: MA Experiment ID: 20001904 Result: Up-regulated in Transcription
  misc_feature: MA Experiment 20001904 PARAMETER Experiment Name: At_Drought_Reproduction_P Parameter: Age (day) Value: 37
  misc_feature: MA Experiment 20001904 PARAMETER Experiment Name: At_Drought_Reproduction_P Parameter: Organism Value: A. thaliana
  misc_feature: MA Experiment 20001904 PARAMETER Experiment Name: At_Drought_Reproduction_P Parameter: Plant Line Value: WS
  misc_feature: MA Experiment 20001904 PARAMETER Experiment Name: At_Drought_Reproduction_P Parameter: Timepoint (day) Value: 7
  misc_feature: MA Experiment 20001904 PARAMETER Experiment Name: At_Drought_Reproduction_P Parameter: Tissue Value: Rosettes
  misc_feature: MA Experiment 20001904 PARAMETER Experiment Name: At_Drought_Reproduction_P Parameter: Treatment Value: Drought vs. No Drought
  misc_feature: MA Experiment ID: 20001905 Result: Up-regulated in Transcription
  misc_feature: MA Experiment 20001905 PARAMETER Experiment Name: At_Drought_Reproduction_P Parameter: Age (day) Value: 40
  misc_feature: MA Experiment 20001905 PARAMETER Experiment Name: At_Drought_Reproduction_P Parameter: Organism Value: A. thaliana
  misc_feature: MA Experiment 20001905 PARAMETER Experiment Name: At_Drought_Reproduction_P Parameter: Plant Line Value: WS
  misc_feature: MA Experiment 20001905 PARAMETER Experiment Name: At_Drought_Reproduction_P Parameter: Timepoint (day) Value: 10
  misc_feature: MA Experiment 20001905 PARAMETER Experiment Name: At_Drought_Reproduction_P Parameter: Tissue Value: Rosettes
  misc_feature: MA Experiment 20001905 PARAMETER Experiment Name: At_Drought_Reproduction_P Parameter: Treatment Value: Drought vs. No Drought
  misc_feature: MA Experiment ID: 20001909 Result: Up-regulated in Transcription
  misc_feature: MA Experiment 20001909 PARAMETER Experiment Name: At_Drought_Reproduction_P Parameter: Age (day) Value: 35
  misc_feature: MA Experiment 20001909 PARAMETER Experiment Name: At_Drought_Reproduction_P Parameter: Organism Value: A. thaliana
  misc_feature: MA Experiment 20001909 PARAMETER Experiment Name: At_Drought_Reproduction_P Parameter: Plant Line Value: WS
  misc_feature: MA Experiment 20001909 PARAMETER Experiment Name: At_Drought_Reproduction_P Parameter: Timepoint (day) Value: 5
  misc_feature: MA Experiment 20001909 PARAMETER Experiment Name: At_Drought_Reproduction_P Parameter: Tissue Value: Flowers
  misc_feature: MA Experiment 20001909 PARAMETER Experiment Name: At_Drought_Reproduction_P Parameter: Treatment Value: Drought vs. No Drought

SEQ ID NO: 48936 - protein, 762 aa, Arabidopsis thaliana; identical to SEQ ID NO: 38819
  peptide (1)..(762): Ceres Seq. ID no. 12325653
  misc_feature (250)..(525): Pfam Name: GMC oxidoreductase Pfam Description: GMC oxidoreductase
  misc_feature (250)..(525): Pfam Name: GMC oxidoreductase Pfam Description: GMC oxidoreductase
  misc_feature (181)..(752): Homolog of NCBI NO: 15234998 NR Description: putative protein; protein id: At4g19380.1
  misc_feature (178)..(757): Homolog of NCBI NO: 37535330 NR Description: putative alcohol oxidase [Oryza sativa (japonica
  misc_feature (177)..(759): Homolog of NCBI NO: 16905151 NR Description: putative alcohol oxidase [Oryza sativa]
  misc_feature (176)..(759): Homolog of NCBI NO: 37535334 NR Description: putative oxidase [Oryza sativa (japonica
  misc_feature (80)..(756): Homolog of NCBI NO: 25367436 NR Description: hypothetical protein [imported] - Arabidopsis
  misc_feature (181)..(752): Homolog of NCBI NO: 15234998 NR Description: putative protein; protein id: At4g19380.1
  misc_feature (177)..(759): Homolog of NCBI NO: 16905151 NR Description: putative alcohol oxidase [Oryza sativa]
  misc_feature (80)..(756): Homolog of NCBI NO: 25367436 NR Description: hypothetical protein [imported] - Arabidopsis
  misc_feature (34)..(756): Homolog of NCBI NO: 15235348 NR Description: putative protein
  misc_feature (34)..(756): Homolog of NCBI NO: 21554016 NR Description: unknown [Arabidopsis thaliana]
  misc_feature (34)..(756): Homolog of NCBI NO: 14532706 NR Description: unknown protein [Arabidopsis thaliana]
  misc_feature (185)..(758): Homolog of NCBI NO: 37535318 NR Description: putative alcohol oxidase [Oryza sativa (japonica
  misc_feature (34)..(142): Homolog of NCBI NO: 37535318 NR Description: putative alcohol oxidase [Oryza sativa (japonica
  misc_feature (176)..(759): Homolog of NCBI NO: 37535334 NR Description: putative oxidase [Oryza sativa (japonica
  misc_feature (178)..(757): Homolog of NCBI NO: 37535330 NR Description: putative alcohol oxidase [Oryza sativa (japonica
  misc_feature (34)..(142): Homolog of NCBI NO: 37535318 NR Description: putative alcohol oxidase [Oryza sativa (japonica
  misc_feature (185)..(758): Homolog of NCBI NO: 37535318 NR Description: putative alcohol oxidase [Oryza sativa (japonica
  misc_feature (34)..(756): Homolog of NCBI NO: 14532706 NR Description: unknown protein [Arabidopsis thaliana]
  misc_feature (34)..(756): Homolog of NCBI NO: 21554016 NR Description: unknown [Arabidopsis thaliana]
  misc_feature (34)..(756): Homolog of NCBI NO: 15235348 NR Description: putative protein

SEQ ID NO: 48937 - protein, 746 aa, Arabidopsis thaliana; identical to SEQ ID NO: 38820
  peptide (1)..(746): Ceres Seq. ID no. 12325654
  misc_feature (234)..(509): Pfam Name: GMC oxidoreductase Pfam Description: GMC oxidoreductase
  misc_feature (234)..(509): Pfam Name: GMC oxidoreductase Pfam Description: GMC oxidoreductase
  misc_feature (165)..(736): Homolog of NCBI NO: 15234998 NR Description: putative protein; protein id: At4g19380.1
  misc_feature (162)..(741): Homolog of NCBI NO: 37535330 NR Description: putative alcohol oxidase [Oryza sativa (japonica
  misc_feature (161)..(743): Homolog of NCBI NO: 16905151 NR Description: putative alcohol oxidase [Oryza sativa]
  misc_feature (160)..(743): Homolog of NCBI NO: 37535334 NR Description: putative oxidase [Oryza sativa (japonica
  misc_feature (64)..(740): Homolog of NCBI NO: 25367436 NR Description: hypothetical protein [imported] - Arabidopsis
  misc_feature (165)..(736): Homolog of NCBI NO: 15234998 NR Description: putative protein; protein id: At4g19380.1
  misc_feature (161)..(743): Homolog of NCBI NO: 16905151 NR Description: putative alcohol oxidase [Oryza sativa]
  misc_feature (64)..(740): Homolog of NCBI NO: 25367436 NR Description: hypothetical protein [imported] - Arabidopsis
  misc_feature (18)..(740): Homolog of NCBI NO: 15235348 NR Description: putative protein
  misc_feature (18)..(740): Homolog of NCBI NO: 21554016 NR Description: unknown [Arabidopsis thaliana]
  misc_feature (18)..(740): Homolog of NCBI NO: 14532706 NR Description: unknown protein [Arabidopsis thaliana]
  misc_feature (169)..(742): Homolog of NCBI NO: 37535318 NR Description: putative alcohol oxidase [Oryza sativa (japonica
  misc_feature (18)..(126): Homolog of NCBI NO: 37535318 NR Description: putative alcohol oxidase [Oryza sativa (japonica
  misc_feature (160)..(743): Homolog of NCBI NO: 37535334 NR Description: putative oxidase [Oryza sativa (japonica
  misc_feature (162)..(741): Homolog of NCBI NO: 37535330 NR Description: putative alcohol oxidase [Oryza sativa (japonica
  misc_feature (18)..(126): Homolog of NCBI NO: 37535318 NR Description: putative alcohol oxidase [Oryza sativa (japonica
  misc_feature (169)..(742): Homolog of NCBI NO: 37535318 NR Description: putative alcohol oxidase [Oryza sativa (japonica
  misc_feature (18)..(740): Homolog of NCBI NO: 14532706 NR Description: unknown protein [Arabidopsis thaliana]
  misc_feature (18)..(740): Homolog of NCBI NO: 21554016 NR Description: unknown [Arabidopsis thaliana]
  misc_feature (18)..(740): Homolog of NCBI NO: 15235348 NR Description: putative protein

SEQ ID NO: 48938 - protein, 727 aa, Arabidopsis thaliana; identical to SEQ ID NO: 38821
  peptide (1)..(727): Ceres Seq. ID no. 12325655
  misc_feature (215)..(490): Pfam Name: GMC oxidoreductase Pfam Description: GMC oxidoreductase
  misc_feature (215)..(490): Pfam Name: GMC oxidoreductase Pfam Description: GMC oxidoreductase
  misc_feature (146)..(717): Homolog of NCBI NO: 15234998 NR Description: putative protein; protein id: At4g19380.1
  misc_feature (143)..(722): Homolog of NCBI NO: 37535330 NR Description: putative alcohol oxidase [Oryza sativa (japonica
  misc_feature (142)..(724): Homolog of NCBI NO: 16905151 NR Description: putative alcohol oxidase [Oryza sativa]
  misc_feature (141)..(724): Homolog of NCBI NO: 37535334 NR Description: putative oxidase [Oryza sativa (japonica
  misc_feature (45)..(721): Homolog of NCBI NO: 25367436 NR Description: hypothetical protein [imported] - Arabidopsis
  misc_feature (146)..(717): Homolog of NCBI NO: 15234998 NR Description: putative protein; protein id: At4g19380.1
  misc_feature (142)..(724): Homolog of NCBI NO: 16905151 NR Description: putative alcohol oxidase [Oryza sativa]
  misc_feature (45)..(721): Homolog of NCBI NO: 25367436 NR Description: hypothetical protein [imported] - Arabidopsis
  misc_feature (1)..(721): Homolog of NCBI NO: 15235348 NR Description: putative protein
  misc_feature (1)..(721): Homolog of NCBI NO: 21554016 NR Description: unknown [Arabidopsis thaliana]
  misc_feature (1)..(721): Homolog of NCBI NO: 14532706 NR Description: unknown protein [Arabidopsis thaliana]
  misc_feature (150)..(723): Homolog of NCBI NO: 37535318 NR Description: putative alcohol oxidase [Oryza sativa (japonica
  misc_feature (1)..(107): Homolog of NCBI NO: 37535318 NR Description: putative alcohol oxidase [Oryza sativa (japonica
  misc_feature (141)..(724): Homolog of NCBI NO: 37535334 NR Description: putative oxidase [Oryza sativa (japonica
  misc_feature (143)..(722): Homolog of NCBI NO: 37535330 NR Description: putative alcohol oxidase [Oryza sativa (japonica
  misc_feature (1)..(107): Homolog of NCBI NO: 37535318 NR Description: putative alcohol oxidase [Oryza sativa (japonica
  misc_feature (150)..(723): Homolog of NCBI NO: 37535318 NR Description: putative alcohol oxidase [Oryza sativa (japonica
  misc_feature (1)..(721): Homolog of NCBI NO: 14532706 NR Description: unknown protein [Arabidopsis thaliana]
  misc_feature (1)..(721): Homolog of NCBI NO: 21554016 NR Description: unknown [Arabidopsis thaliana]
  misc_feature (1)..(721): Homolog of NCBI NO: 15235348 NR Description: putative protein

SEQ ID NO: 48939 - DNA, 2295 bp, Arabidopsis thaliana
  misc_feature (1)..(2295): Ceres Seq. ID no. 14316569
  misc_feature: MA Experiment ID: 108489 Result: Down-regulated in Transcription
  misc_feature: MA Experiment ID: 108576 Result: Up-regulated in Transcription
  misc_feature: MA Experiment 108576 PARAMETER Experiment Name: At_42deg_Heat_cDNA_P Parameter: Temperature (deg C) Value: 42 vs. 22
  misc_feature: MA Experiment 108576 PARAMETER Experiment Name: At_42deg_Heat_cDNA_P Parameter: Timepoint (hr) Value: 1
  misc_feature: MA Experiment 108576 PARAMETER Experiment Name: At_42deg_Heat_cDNA_P Parameter: Tissue Value: Aerial
  misc_feature: MA Experiment ID: 108577 Result: Up-regulated in Transcription
  misc_feature: MA Experiment 108577 PARAMETER Experiment Name: At_42deg_Heat_cDNA_P Parameter: Temperature (deg C) Value: 42 vs. 22
  misc_feature: MA Experiment 108577 PARAMETER Experiment Name: At_42deg_Heat_cDNA_P Parameter: Timepoint (hr) Value: 6
  misc_feature: MA Experiment 108577 PARAMETER Experiment Name: At_42deg_Heat_cDNA_P Parameter: Tissue Value: Aerial
  misc_feature: MA Experiment ID: 108579 Result: Up-regulated in Transcription
  misc_feature: MA Experiment 108579 PARAMETER Experiment Name: At_4deg_Cold_cDNA_P Parameter: Temperature (deg C) Value: 4 vs. 22
  misc_feature: MA Experiment 108579 PARAMETER Experiment Name: At_4deg_Cold_cDNA_P Parameter: Timepoint (hr) Value: 6
  misc_feature: MA Experiment 108579 PARAMETER Experiment Name: At_4deg_Cold_cDNA_P Parameter: Tissue Value: Aerial
  misc_feature: MA Experiment ID: 20000069 Result: Down-regulated in Transcription
  misc_feature: MA Experiment 20000069 PARAMETER Experiment Name: At_100uM_ABA_Mutants_cDNA_P Parameter: Plant Line Value: CS23
  misc_feature: MA Experiment 20000069 PARAMETER Experiment Name: At_100uM_ABA_Mutants_cDNA_P Parameter: Timepoint (hr) Value: 6
  misc_feature: MA Experiment 20000069 PARAMETER Experiment Name: At_100uM_ABA_Mutants_cDNA_P Parameter: Tissue Value: Aerial
  misc_feature: MA Experiment 20000069 PARAMETER Experiment Name: At_100uM_ABA_Mutants_cDNA_P Parameter: Treatment Value: 100uM ABA vs. No Treatment
  misc_feature: MA Experiment ID: 20000070 Result: Down-regulated in Transcription
  misc_feature: MA Experiment 20000070 PARAMETER Experiment Name: At_100uM_ABA_Mutants_cDNA_P Parameter: Plant Line Value: CS24
  misc_feature: MA Experiment 20000070 PARAMETER Experiment Name: At_100uM_ABA_Mutants_cDNA_P Parameter: Timepoint (hr) Value: 6
  misc_feature: MA Experiment 20000070 PARAMETER Experiment Name: At_100uM_ABA_Mutants_cDNA_P Parameter: Tissue Value: Aerial
  misc_feature: MA Experiment 20000070 PARAMETER Experiment Name: At_100uM_ABA_Mutants_cDNA_P Parameter: Treatment Value: 100uM ABA vs. No Treatment
  misc_feature: MA Experiment ID: 20000071 Result: Down-regulated in Transcription
  misc_feature: MA Experiment 20000071 PARAMETER Experiment Name: At_100uM_ABA_Mutants_cDNA_P Parameter: Plant Line Value: CS8104
  misc_feature: MA Experiment 20000071 PARAMETER Experiment Name: At_100uM_ABA_Mutants_cDNA_P Parameter: Timepoint (hr) Value: 6
  misc_feature: MA Experiment 20000071 PARAMETER Experiment Name: At_100uM_ABA_Mutants_cDNA_P Parameter: Tissue Value: Aerial
  misc_feature: MA Experiment 20000071 PARAMETER Experiment Name: At_100uM_ABA_Mutants_cDNA_P Parameter: Treatment Value: 100uM ABA vs. No Treatment
  misc_feature: MA Experiment ID: 20000072 Result: Down-regulated in Transcription
  misc_feature: MA Experiment 20000072 PARAMETER Experiment Name: At_100uM_ABA_Mutants_cDNA_P Parameter: Plant Line Value: CS8105
  misc_feature: MA Experiment 20000072 PARAMETER Experiment Name: At_100uM_ABA_Mutants_cDNA_P Parameter: Timepoint (hr) Value: 6
  misc_feature: MA Experiment 20000072 PARAMETER Experiment Name: At_100uM_ABA_Mutants_cDNA_P Parameter: Tissue Value: Aerial
  misc_feature: MA Experiment 20000072 PARAMETER Experiment Name: At_100uM_ABA_Mutants_cDNA_P Parameter: Treatment Value: 100uM ABA vs. No Treatment
  misc_feature: MA Experiment ID: 20000087 Result: Down-regulated in Transcription
  misc_feature: MA Experiment 20000087 PARAMETER Experiment Name: At_100uM_ABA_Mutants_cDNA_P Parameter: Plant Line Value: WS
  misc_feature: MA Experiment 20000087 PARAMETER Experiment Name: At_100uM_ABA_Mutants_cDNA_P Parameter: Timepoint (hr) Value: 6
  misc_feature: MA Experiment 20000087 PARAMETER Experiment Name: At_100uM_ABA_Mutants_cDNA_P Parameter: Tissue Value: Aerial
  misc_feature: MA Experiment 20000087 PARAMETER Experiment Name: At_100uM_ABA_Mutants_cDNA_P Parameter: Treatment Value: 100uM ABA vs. No Treatment
  misc_feature: MA Experiment ID: 20000088 Result: Down-regulated in Transcription
  misc_feature: MA Experiment 20000088 PARAMETER Experiment Name: At_100uM_ABA_Mutants_cDNA_P Parameter: Plant Line Value: Landsberg
  misc_feature: MA Experiment 20000088 PARAMETER Experiment Name: At_100uM_ABA_Mutants_cDNA_P Parameter: Timepoint (hr) Value: 6
  misc_feature: MA Experiment 20000088 PARAMETER Experiment Name: At_100uM_ABA_Mutants_cDNA_P Parameter: Tissue Value: Aerial
  misc_feature: MA Experiment 20000088 PARAMETER Experiment Name: At_100uM_ABA_Mutants_cDNA_P Parameter: Treatment Value: 100uM ABA vs. No Treatment
  misc_feature: MA Experiment ID: 20000089 Result: Down-regulated in Transcription
  misc_feature: MA Experiment ID: 20000090 Result: Down-regulated in Transcription
  misc_feature: MA Experiment ID: 20000093 Result: Up-regulated in Transcription
  misc_feature: MA Experiment 20000093 PARAMETER Experiment Name: At_42deg_Heat_cDNA_P Parameter: Temperature (deg C) Value: 42 vs. 22
  misc_feature: MA Experiment 20000093 PARAMETER Experiment Name: At_42deg_Heat_cDNA_P Parameter: Timepoint (hr) Value: 0.5
  misc_feature: MA Experiment 20000093 PARAMETER Experiment Name: At_42deg_Heat_cDNA_P Parameter: Tissue Value: Aerial
  misc_feature: MA Experiment ID: 20000111 Result: Up-regulated in Transcription
  misc_feature: MA Experiment 20000111 PARAMETER Experiment Name: At_42deg_Heat_cDNA_P Parameter: Temperature (deg C) Value: 42 vs. 22
  misc_feature: MA Experiment 20000111 PARAMETER Experiment Name: At_42deg_Heat_cDNA_P Parameter: Timepoint (hr) Value: 6
  misc_feature: MA Experiment 20000111 PARAMETER Experiment Name: At_42deg_Heat_cDNA_P Parameter: Tissue Value: Aerial
  misc_feature: MA Experiment ID: 20000117 Result: Down-regulated in Transcription
  misc_feature: MA Experiment 20000117 PARAMETER Experiment Name: At_100uM_ABA_Mutants_cDNA_P Parameter: Plant Line Value: Columbia
  misc_feature: MA Experiment 20000117 PARAMETER Experiment Name: At_100uM_ABA_Mutants_cDNA_P Parameter: Timepoint (hr) Value: 6
  misc_feature: MA Experiment 20000117 PARAMETER Experiment Name: At_100uM_ABA_Mutants_cDNA_P Parameter: Tissue Value: Aerial
  misc_feature: MA Experiment 20000117 PARAMETER Experiment Name: At_100uM_ABA_Mutants_cDNA_P Parameter: Treatment Value: 100uM ABA vs. No Treatment
  misc_feature: MA Experiment ID: 20000144 Result: Up-regulated in Transcription
  misc_feature: MA Experiment 20000144 PARAMETER Experiment Name: At_42deg_Heat_cDNA_P Parameter: Temperature (deg C) Value: 42 vs. 22
  misc_feature: MA Experiment 20000144 PARAMETER Experiment Name: At_42deg_Heat_cDNA_P Parameter: Timepoint (hr) Value: 1
  misc_feature: MA Experiment 20000144 PARAMETER Experiment Name: At_42deg_Heat_cDNA_P Parameter: Tissue Value: Aerial
  misc_feature: MA Experiment ID: 20000224 Result: Up-regulated in Transcription
gactcagcgaatcttctcgtcgtcttcttcgtttctctctacctcactcatcgaagtgttagggtttcttcgatttggcagaatattatttcaactatctctgctgaactcgctttcctaacttctctctctgtcactctaactctttgtcggtaccaaattcttcttcactcgaagaactgtttaggtcaagtatgacttaattctgccaaatttctggtgtttattcaaagttcaaagtcaattgaacaaaactttttatcagataaactgaagcaatgtataccgagggagcctctgattttgtcattgaccagagcatgtattatcccacttattactcttcaggttatgattcatctgtgggtcttcagggtgggcaaaatgaaaatgctccctatatctgctatacaccaagttatggatatgcacagtctccctacaatccctacaatccttacataccaggagcttcaataggcgttgattcttcttttgttggattccaacaatattactcagaccctccgtatgaaagtgctgcatcttcgcctacttatgttccatatgttattcagcctgatatggtctcgaatagttcaacagactctttggtagcgaatggtggtcaatctgatggaagaggatccatgcagagaaatggttcagcaattgccggactcccaaaagatgctccaaagtctaccactactggccagtataaacagccaggaatccccaagaatgtttccacaacagcttctgcacattctctccagggaaaaactgcttacgcgaacacactcttgccttatgggaaatcagacattgctaatggggtctcatcaattgcttcatatagttataaaccttgttccaagatttatgatgccagaggtgataacaacacaactggaagtacatatacgagtgaacaaaatcgaggatcgagaacgagaagatcaagaaatcaactaattgtcaaagcatatacaaccaaagctggaaatgctgatgcggaaggaaatattgtgataaatcctgatcgatataataaagaagatttcagtattgaatacagcgatgccaggttttttgtgattaagtcgtatagtgaagatgatgttcacaagagcatcaaatatggtgtctggtcatctacattgaatgggaacaagaaattgcagagtgtatatgaagatgctcagagaatagccactgagaagtctcgtgaatgtcctattttcttattcttttctgtcaattccagtggtctgttctgtggcgtggctgagatgaccggtccagtttccttcgaccgagacatggatttttggcagcaagacaaatggagtggaagctttcctgtcaagtggcacattattaaagatgttcctaatagctatttcaggcacattattttacataataacgagaataagccagtgaccaacagccgagacacacaagagataatactgaaacaaggactcgaggtgctaaaactattcaaacatcatgcggaaaagacttcactattagatgattttatgtactacgaagaccgccagagactcatgcaggaagagagagctagacttccatttaggacctttcgcaggccatttcccgtgctcaatctagatttttctgacagaagcaagaaaagctccaaggatgtcggtaagaagccttcagtgacctctgcagaaacaaaggttgtgcaattaaaaaactcagatggggatgaaaagagcaatacacaggaagcaacagacgaaactactccttccactctgaagtttggctctctcgccattaaaccaactgctggtaccacctttaacccaacccaagccaagcctaaaccgaccccatctctcggctctgaccacaagtcagactcttctgaagaggttactgggtctctggctgatgacattgtcagtgtaggatcgttgcccataaaagtaaagggatctaaagaattatcctccaagatcgcagcggtgggtacaagtcctctctcaactcaagatcagttcagaagtaaaccagggttttgacattgtctttgtctaacttgtttatgcataatagaaagcatggtcgatatggttcgagaaagagaaagagattgagtatgtatagattggttggttttaccttttaaatggtctgattggtcgtttgagaatccttgtttatcgtctcagtttggacaaatgattgttgccagtggttgcgttttggtttgttgggtttgattaaacagttggttccgtcttttgatcg

SEQ ID NO: 48940 - protein, 595 aa, Arabidopsis thaliana
  peptide (1)..(595): Ceres Seq. ID no. 14316570
  misc_feature (324)..(414): Pfam Name: YT521-B-like family Pfam Description: YT521-B-like family
  misc_feature (24)..(442): Homolog of NCBI NO: 7487895 NR Description: hypothetical protein YUP8H12R.13 - Arabidopsis
  misc_feature (22)..(440): Homolog of NCBI NO: 25084169 NR Description: Unknown protein [Arabidopsis thaliana]
  misc_feature (107)..(440): Homolog of NCBI NO: 18087662 NR Description: putative RNA-binding protein [Oryza sativa]
  misc_feature (16)..(482): Homolog of NCBI NO: 34911170 NR Description: B1144G04.32 [Oryza sativa (japonica
  misc_feature (22)..(483): Homolog of NCBI NO: 30682683 NR Description: expressed protein [Arabidopsis thaliana]
  misc_feature (22)..(483): Homolog of NCBI NO: 30682679 NR Description: expressed protein [Arabidopsis thaliana]
  misc_feature (3)..(440): Homolog of NCBI NO: 22773231 NR Description: Putative RNA-binding protein
  misc_feature (398)..(583): Homolog of NCBI NO: 8778514 NR Description: F21D18.17 [Arabidopsis thaliana]
  misc_feature (1)..(399): Homolog of NCBI NO: 8778514 NR Description: F21D18.17 [Arabidopsis thaliana]
  misc_feature (1)..(583): Homolog of NCBI NO: 15221079 NR Description: expressed protein [Arabidopsis thaliana]
MYTEGASDFVIDQSMYYPTYYSSGYDSSVGLQGGQNENAPYICYTPSYGYAQSPYNPYNPYIPGASIGVDSSFVGFQQYYSDPPYESAASSPTYVPYVIQPDMVSNSSTDSLVANGGQSDGRGSMQRNGSAIAGLPKDAPKSTTTGQYKQPGIPKNVSTTASAHSLQGKTAYANTLLPYGKSDIANGVSSIASYSYKPCSKIYDARGDNNTTGSTYTSEQNRGSRTRRSRNQLIVKAYTTKAGNADAEGNIVINPDRYNKEDFSIEYSDARFFVIKSYSEDDVHKSIKYGVWSSTLNGNKKLQSVYEDAQRIATEKSRECPIFLFFSVNSSGLFCGVAEMTGPVSFDRDMDFWQQDKWSGSFPVKWHIIKDVPNSYFRHIILHNNENKPVTNSRDTQEIILKQGLEVLKLFKHHAEKTSLLDDFMYYEDRQRLMQEERARLPFRTFRRPFPVLNLDFSDRSKKSSKDVGKKPSVTSAETKVVQLKNSDGDEKSNTQEATDETTPSTLKFGSLAIKPTAGTTFNPTQAKPKPTPSLGSDHKSDSSEEVTGSLADDIVSVGSLPIKVKGSKELSSKIAAVGTSPLSTQDQFRSKPGF

SEQ ID NO: 48941 - protein, 581 aa, Arabidopsis thaliana
  peptide (1)..(581): Ceres Seq. ID no. 14316571
  misc_feature (310)..(400): Pfam Name: YT521-B-like family Pfam Description: YT521-B-like family
  misc_feature (10)..(428): Homolog of NCBI NO: 7487895 NR Description: hypothetical protein YUP8H12R.13 - Arabidopsis
  misc_feature (8)..(426): Homolog of NCBI NO: 25084169 NR Description: Unknown protein [Arabidopsis thaliana]
  misc_feature (93)..(426): Homolog of NCBI NO: 18087662 NR Description: putative RNA-binding protein [Oryza sativa]
  misc_feature (2)..(468): Homolog of NCBI NO: 34911170 NR Description: B1144G04.32 [Oryza sativa (japonica
  misc_feature (8)..(469): Homolog of NCBI NO: 30682683 NR Description: expressed protein [Arabidopsis thaliana]
  misc_feature (8)..(469): Homolog of NCBI NO: 30682679 NR Description: expressed protein [Arabidopsis thaliana]
  misc_feature (1)..(426): Homolog of NCBI NO: 22773231 NR Description: Putative RNA-binding protein
  misc_feature (384)..(569): Homolog of NCBI NO: 8778514 NR Description: F21D18.17 [Arabidopsis thaliana]
  misc_feature (1)..(385): Homolog of NCBI NO: 8778514 NR Description: F21D18.17 [Arabidopsis thaliana]
  misc_feature (1)..(569): Homolog of NCBI NO: 15221079 NR Description: expressed protein [Arabidopsis thaliana]
MYYPTYYSSGYDSSVGLQGGQNENAPYICYTPSYGYAQSPYNPYNPYIPGASIGVDSSFVGFQQYYSDPPYESAASSPTYVPYVIQPDMVSNSSTDSLVANGGQSDGRGSMQRNGSAIAGLPKDAPKSTTTGQYKQPGIPKNVSTTASAHSLQGKTAYANTLLPYGKSDIANGVSSIASYSYKPCSKIYDARGDNNTTGSTYTSEQNRGSRTRRSRNQLIVKAYTTKAGNADAEGNIVINPDRYNKEDFSIEYSDARFFVIKSYSEDDVHKSIKYGVWSSTLNGNKKLQSVYEDAQRIATEKSRECPIFLFFSVNSSGLFCGVAEMTGPVSFDRDMDFWQQDKWSGSFPVKWHIIKDVPNSYFRHIILHNNENKPVTNSRDTQEIILKQGLEVLKLFKHHAEKTSLLDDFMYYEDRQRLMQEERARLPFRTFRRPFPVLNLDFSDRSKKSSKDVGKKPSVTSAETKVVQLKNSDGDEKSNTQEATDETTPSTLKFGSLAIKPTAGTTFNPTQAKPKPTPSLGSDHKSDSSEEVTGSLADDIVSVGSLPIKVKGSKELSSKIAAVGTSPLSTQDQFRSKPGF

SEQ ID NO: 48942 - protein, 493 aa, Arabidopsis thaliana
  peptide (1)..(493): Ceres Seq. ID no. 14316572
  misc_feature (222)..(312): Pfam Name: YT521-B-like family Pfam Description: YT521-B-like family
  misc_feature (1)..(340): Homolog of NCBI NO: 7487895 NR Description: hypothetical protein YUP8H12R.13 - Arabidopsis
  misc_feature (1)..(338): Homolog of NCBI NO: 25084169 NR Description: Unknown protein [Arabidopsis thaliana]
  misc_feature (5)..(338): Homolog of NCBI NO: 18087662 NR Description: putative RNA-binding protein [Oryza sativa]
  misc_feature (1)..(380): Homolog of NCBI NO: 34911170 NR Description: B1144G04.32 [Oryza sativa (japonica
  misc_feature (1)..(381): Homolog of NCBI NO: 30682683 NR Description: expressed protein [Arabidopsis thaliana]
  misc_feature (1)..(381): Homolog of NCBI NO: 30682679 NR Description: expressed protein [Arabidopsis thaliana]
  misc_feature (1)..(338): Homolog of NCBI NO: 22773231 NR Description: Putative RNA-binding protein
  misc_feature (296)..(481): Homolog of NCBI NO: 8778514 NR Description: F21D18.17 [Arabidopsis thaliana]
  misc_feature (1)..(297): Homolog of NCBI NO: 8778514 NR Description: F21D18.17 [Arabidopsis thaliana]
  misc_feature (1)..(481): Homolog of NCBI NO: 15221079 NR Description: expressed protein [Arabidopsis thaliana]
MVSNSSTDSLVANGGQSDGRGSMQRNGSAIAGLPKDAPKSTTTGQYKQPGIPKNVSTTASAHSLQGKTAYANTLLPYGKSDIANGVSSIASYSYKPCSKIYDARGDNNTTGSTYTSEQNRGSRTRRSRNQLIVKAYTTKAGNADAEGNIVINPDRYNKEDFSIEYSDARFFVIKSYSEDDVHKSIKYGVWSSTLNGNKKLQSVYEDAQRIATEKSRECPIFLFFSVNSSGLFCGVAEMTGPVSFDRDMDFWQQDKWSGSFPVKWHIIKDVPNSYFRHIILHNNENKPVTNSRDTQEIILKQGLEVLKLFKHHAEKTSLLDDFMYYEDRQRLMQEERARLPFRTFRRPFPVLNLDFSDRSKKSSKDVGKKPSVTSAETKVVQLKNSDGDEKSNTQEATDETTPSTLKFGSLAIKPTAGTTFNPTQAKPKPTPSLGSDHKSDSSEEVTGSLADDIVSVGSLPIKVKGSKELSSKIAAVGTSPLSTQDQFRSKPGF

SEQ ID NO: 48943 - DNA, 1845 bp, Arabidopsis thaliana
  misc_feature (1)..(1845): Ceres Seq. ID no. 14310148
  misc_feature: MA Experiment ID: 20000171 Result: Down-regulated in Transcription
  misc_feature: MA Experiment 20000171 PARAMETER Experiment Name: At_42deg_Heat_P Parameter: Age (day) Value: 14
  misc_feature: MA Experiment 20000171 PARAMETER Experiment Name: At_42deg_Heat_P Parameter: Organism Value: A. thaliana
  misc_feature: MA Experiment 20000171 PARAMETER Experiment Name: At_42deg_Heat_P Parameter: Plant Line Value: WS
  misc_feature: MA Experiment 20000171 PARAMETER Experiment Name: At_42deg_Heat_P Parameter: Temperature (deg C) Value: 42 vs. 22
  misc_feature: MA Experiment 20000171 PARAMETER Experiment Name: At_42deg_Heat_P Parameter: Timepoint (hr) Value: 1
  misc_feature: MA Experiment 20000171 PARAMETER Experiment Name: At_42deg_Heat_P Parameter: Tissue Value: Aerial
  misc_feature: MA Experiment ID: 20000173 Result: Down-regulated in Transcription
  misc_feature: MA Experiment 20000173 PARAMETER Experiment Name: At_42deg_Heat_P Parameter: Age (day) Value: 14
  misc_feature: MA Experiment 20000173 PARAMETER Experiment Name: At_42deg_Heat_P Parameter: Organism Value: A. thaliana
  misc_feature: MA Experiment 20000173 PARAMETER Experiment Name: At_42deg_Heat_P Parameter: Plant Line Value: WS
  misc_feature: MA Experiment 20000173 PARAMETER Experiment Name: At_42deg_Heat_P Parameter: Temperature (deg C) Value: 42 vs. 22
  misc_feature: MA Experiment 20000173 PARAMETER Experiment Name: At_42deg_Heat_P Parameter: Timepoint (hr) Value: 6
  misc_feature: MA Experiment 20000173 PARAMETER Experiment Name: At_42deg_Heat_P Parameter: Tissue Value: Aerial
  misc_feature: MA Experiment ID: 20000184 Result: Down-regulated in Transcription
  misc_feature: MA Experiment 20000184 PARAMETER Experiment Name: At_Shoots__P Parameter: Age (day) Value: 7
  misc_feature: MA Experiment 20000184 PARAMETER Experiment Name: At_Shoots__P Parameter: Tissue Value: Shoots vs. Whole Plant
  misc_feature: MA Experiment ID: 20000794 Result: Up-regulated in Transcription
  misc_feature: MA Experiment 20000794 PARAMETER Experiment Name: At_Petals_P Parameter: Age (day) Value: 23-25 days
  misc_feature: MA Experiment 20000794 PARAMETER Experiment Name: At_Petals_P Parameter: Plant Line Value: WS
  misc_feature: MA Experiment 20000794 PARAMETER Experiment Name: At_Petals_P Parameter: Tissue Value: Petals vs. Whole plant
  misc_feature: MA Experiment ID: 20001248 Result: Down-regulated in Transcription
  misc_feature: MA Experiment 20001248 PARAMETER Experiment Name: At_Far-red-induction_P Parameter: Age (day) Value: 7
  misc_feature: MA Experiment 20001248 PARAMETER Experiment Name: At_Far-red-induction_P Parameter: Light Value: Far-red vs. White
  misc_feature: MA Experiment 20001248 PARAMETER Experiment Name: At_Far-red-induction_P Parameter: Organism Value: A. thaliana
  misc_feature: MA Experiment 20001248 PARAMETER Experiment Name: At_Far-red-induction_P Parameter: Plant Line Value: Columbia
  misc_feature: MA Experiment 20001248 PARAMETER Experiment Name: At_Far-red-induction_P Parameter: Timepoint (hr) Value: 4
  misc_feature: MA Experiment 20001248 PARAMETER Experiment Name: At_Far-red-induction_P Parameter: Tissue Value: Whole Plant
  misc_feature: MA Experiment ID: 20001911 Result: Up-regulated in Transcription
  misc_feature: MA Experiment 20001911 PARAMETER Experiment Name: At_Drought_Reproduction_P Parameter: Age (day) Value: 40
  misc_feature: MA Experiment 20001911 PARAMETER Experiment Name: At_Drought_Reproduction_P Parameter: Organism Value: A. thaliana
  misc_feature: MA Experiment 20001911 PARAMETER Experiment Name: At_Drought_Reproduction_P Parameter: Plant Line Value: WS
  misc_feature: MA Experiment 20001911 PARAMETER Experiment Name: At_Drought_Reproduction_P Parameter: Timepoint (day) Value: 10
  misc_feature: MA Experiment 20001911 PARAMETER Experiment Name: At_Drought_Reproduction_P Parameter: Tissue Value: Flowers
  misc_feature: MA Experiment 20001911 PARAMETER Experiment Name: At_Drought_Reproduction_P Parameter: Treatment Value: Drought vs. No Drought
gatgttactcttgtctgaatcttcctcaaatctactcatgtagacctccctatctcgatctaaatttccgccaaactttttttaatcccaaagattctttaaacagaatcatcatcaatcatgaaagaaatcaagaagacgatgacgaagcagatgacggcgagacgtgacgacacgccgttacacacggcggttagagaaggcaaaacggaccttcttttggagatgatcggagaacacgacggcgtggagctgaaagagttgttggcggaacaaaaccagtccggtgaaactgctttatacgttgcggctgagtacggtcacaccgacatggttaagattctgatgaaactctccgactctgtcttagccggaaccaaagccaagaacggcttcgatgcctttcacatcgccgccaaaaacggaaatttacaggttcttgatgtgttaatacaggcaaatccagaactttcatttacatttgattcatccaaaacgacggcacttcataccgcggcttcacagggtcatggagagattgtttgtttcttgttggataaaggtgtggacttagctgctattgcgagaagcaatggtaaaaccgctttgcactctgcagctaggaacgggcacacggtgattgtgaaggagttgattgaaaagaaggctggtatggttacaagagtcgacaagaaaggtcaaaccgctcttcatatggcggttaaaggacaaaacactgagattgtggatgtgttgatggaagcagatggttcgttgatcaattccgcggataataaaggaaacactccattgcatatagcagtccgtaaaaacagagcagagattgttcagacagttttaaagtattgtgaagtcagtagagtggcggttaataaatcaggagaaacagctcttgatatcgctgagaaaaccggactacatgagatcgtaccgcttctgcaaaagatcggtatgcagaacgcaagatccatcaagccagctgaaaaagtggaaccatcaggctcttctaggaaactgaaagaaacagttagtgaaataggccatgaggtgcatactcagcttgaacaaaccgggagaacgagaagagagatccaaggaatcgctaaacgggtcaacaaaatgcacacggaaggactcaacaacgcgataaactccactaccctagtagccattctcatagcaaccgttgcttttgcagctatcttcaacgttccaggccagtacacggacgaccctaaagacgtacctccaggatattcactcggagaagcaagagcagctccaagacccgagttcttgatattcgtcgtgtttgattctttcgcgcttttcatctctttagcggtggttgtggttcagacatcagtggtggttatagagaggagagcaaagaagcaaatgatggctataatcaacaagctcatgtggatggcttgcattatgatctcagtagcgttcgtatcactgtcttttgttgtcgtgggagagaaagagaagcctttggcggttggagtaaccgccattggagctttgatcatggtttcaacactagggactatgtgttattgggtgattgctaaccggattgaaggatctaagtcatctccagcttccatgatgtcagatcctgagttagctgattccaaacataaccggaaactttatgcggtttgattagagtgaaacagaggatttagaaaatcattaaagaaaagagagattttgtatccagataataaaagagataactcttgtgtttatagtagattctgtatatgtaacaaaaggaaaatagtataaatcaatttataagacttttacatg

SEQ ID NO: 48944 - protein, 524 aa, Arabidopsis thaliana
  peptide (1)..(524): Ceres Seq. ID no. 14310149
  misc_feature (226)..(259): Pfam Name: Ankyrin repeat Pfam Description: Ankyrin repeat
  misc_feature (35)..(502): Homolog of NCBI NO: 18379277 NR Description: ankyrin repeat protein family [Arabidopsis
  misc_feature (5)..(495): Homolog of NCBI NO: 21553618 NR Description: ankyrin-like protein [Arabidopsis thaliana]
  misc_feature (5)..(495): Homolog of NCBI NO: 15230470 NR Description: ankyrin repeat protein family [Arabidopsis
  misc_feature (15)..(524): Homolog of NCBI NO: 15220595 NR Description: ankyrin repeat protein family [Arabidopsis
  misc_feature (15)..(524): Homolog of NCBI NO: 15225141 NR Description: ankyrin repeat protein family [Arabidopsis
  misc_feature (5)..(524): Homolog of NCBI NO: 24796797 NR Description: putative ankyrin repeat containing protein
  misc_feature (4)..(506): Homolog of NCBI NO: 15238604 NR Description: ankyrin repeat protein family [Arabidopsis
  misc_feature (5)..(524): Homolog of NCBI NO: 15222993 NR Description: ankyrin repeat protein family [Arabidopsis
  misc_feature (8)..(524): Homolog of NCBI NO: 11357168 NR Description: ankyrin-like protein - Arabidopsis thaliana
  misc_feature (1)..(524): Homolog of NCBI NO: 30679697 NR Description: ankyrin repeat protein family [Arabidopsis
MKEIKKTMTKQMTARRDDTPLHTAVREGKTDLLLEMIGEHDGVELKELLAEQNQSGETALYVAAEYGHTDMVKILMKLSDSVLAGTKAKNGFDAFHIAAKNGNLQVLDVLIQANPELSFTFDSSKTTALHTAASQGHGEIVCFLLDKGVDLAAIARSNGKTALHSAARNGHTVIVKELIEKKAGMVTRVDKKGQTALHMAVKGQNTEIVDVLMEADGSLINSADNKGNTPLHIAVRKNRAEIVQTVLKYCEVSRVAVNKSGETALDIAEKTGLHEIVPLLQKIGMQNARSIKPAEKVEPSGSSRKLKETVSEIGHEVHTQLEQTGRTRREIQGIAKRVNKMHTEGLNNAINSTTLVAILIATVAFAAIFNVPGQYTDDPKDVPPGYSLGEARAAPRPEFLIFVVFDSFALFISLAVVVVQTSVVVIERRAKKQMMAIINKLMWMACIMISVAFVSLSFVVVGEKEKPLAVGVTAIGALIMVSTLGTMCYWVIANRIEGSKSSPASMMSDPELADSKHNRKLYAV

SEQ ID NO: 48945 - protein, 517 aa, Arabidopsis thaliana
  peptide (1)..(517): Ceres Seq. ID no. 14310150
  misc_feature (219)..(252): Pfam Name: Ankyrin repeat Pfam Description: Ankyrin repeat
  misc_feature (28)..(495): Homolog of NCBI NO: 18379277 NR Description: ankyrin repeat protein family [Arabidopsis
  misc_feature (1)..(488): Homolog of NCBI NO: 21553618 NR Description: ankyrin-like protein [Arabidopsis thaliana]
  misc_feature (1)..(488): Homolog of NCBI NO: 15230470 NR Description: ankyrin repeat protein family [Arabidopsis
  misc_feature (8)..(517): Homolog of NCBI NO: 15220595 NR Description: ankyrin repeat protein family [Arabidopsis
  misc_feature (8)..(517): Homolog of NCBI NO: 15225141 NR Description: ankyrin repeat protein family [Arabidopsis
  misc_feature (1)..(517): Homolog of NCBI NO: 24796797 NR Description: putative ankyrin repeat containing protein
  misc_feature (1)..(499): Homolog of NCBI NO: 15238604 NR Description: ankyrin repeat protein family [Arabidopsis
  misc_feature (1)..(517): Homolog of NCBI NO: 15222993 NR Description: ankyrin repeat protein family [Arabidopsis
  misc_feature (1)..(517): Homolog of NCBI NO: 11357168 NR Description: ankyrin-like protein - Arabidopsis thaliana
  misc_feature (1)..(517): Homolog of NCBI NO: 30679697 NR Description: ankyrin repeat protein family [Arabidopsis
MTKQMTARRDDTPLHTAVREGKTDLLLEMIGEHDGVELKELLAEQNQSGETALYVAAEYGHTDMVKILMKLSDSVLAGTKAKNGFDAFHIAAKNGNLQVLDVLIQANPELSFTFDSSKTTALHTAASQGHGEIVCFLLDKGVDLAAIARSNGKTALHSAARNGHTVIVKELIEKKAGMVTRVDKKGQTALHMAVKGQNTEIVDVLMEADGSLINSADNKGNTPLHIAVRKNRAEIVQTVLKYCEVSRVAVNKSGETALDIAEKTGLHEIVPLLQKIGMQNARSIKPAEKVEPSGSSRKLKETVSEIGHEVHTQLEQTGRTRREIQGIAKRVNKMHTEGLNNAINSTTLVAILIATVAFAAIFNVPGQYTDDPKDVPPGYSLGEARAAPRPEFLIFVVFDSFALFISLAVVVVQTSVVVIERRAKKQMMAIINKLMWMACIMISVAFVSLSFVVVGEKEKPLAVGVTAIGALIMVSTLGTMCYWVIANRIEGSKSSPASMMSDPELADSKHNRKLYAV

SEQ ID NO: 48946 - protein, 513 aa, Arabidopsis thaliana
  peptide (1)..(513): Ceres Seq. ID no. 14310151
  misc_feature (215)..(248): Pfam Name: Ankyrin repeat Pfam Description: Ankyrin repeat
  misc_feature (24)..(491): Homolog of NCBI NO: 18379277 NR Description: ankyrin repeat protein family [Arabidopsis
  misc_feature (1)..(484): Homolog of NCBI NO: 21553618 NR Description: ankyrin-like protein [Arabidopsis thaliana]
  misc_feature (1)..(484): Homolog of NCBI NO: 15230470 NR Description: ankyrin repeat protein family [Arabidopsis
  misc_feature (4)..(513): Homolog of NCBI NO: 15220595 NR Description: ankyrin repeat protein family [Arabidopsis
  misc_feature (4)..(513): Homolog of NCBI NO: 15225141 NR Description: ankyrin repeat protein family [Arabidopsis
  misc_feature (1)..(513): Homolog of NCBI NO: 24796797 NR Description: putative ankyrin repeat containing protein
  misc_feature (1)..(495): Homolog of NCBI NO: 15238604 NR Description: ankyrin repeat protein family [Arabidopsis
  misc_feature (1)..(513): Homolog of NCBI NO: 15222993 NR Description: ankyrin repeat protein family [Arabidopsis
  misc_feature (1)..(513): Homolog of NCBI NO: 11357168 NR Description: ankyrin-like protein - Arabidopsis thaliana
  misc_feature (1)..(513): Homolog of NCBI NO: 30679697 NR Description: ankyrin repeat protein family [Arabidopsis
MTARRDDTPLHTAVREGKTDLLLEMIGEHDGVELKELLAEQNQSGETALYVAAEYGHTDMVKILMKLSDSVLAGTKAKNGFDAFHIAAKNGNLQVLDVLIQANPELSFTFDSSKTTALHTAASQGHGEIVCFLLDKGVDLAAIARSNGKTALHSAARNGHTVIVKELIEKKAGMVTRVDKKGQTALHMAVKGQNTEIVDVLMEADGSLINSADNKGNTPLHIAVRKNRAEIVQTVLKYCEVSRVAVNKSGETALDIAEKTGLHEIVPLLQKIGMQNARSIKPAEKVEPSGSSRKLKETVSEIGHEVHTQLEQTGRTRREIQGIAKRVNKMHTEGLNNAINSTTLVAILIATVAFAAIFNVPGQYTDDPKDVPPGYSLGEARAAPRPEFLIFVVFDSFALFISLAVVVVQTSVVVIERRAKKQMMAIINKLMWMACIMISVAFVSLSFVVVGEKEKPLAVGVTAIGALIMVSTLGTMCYWVIANRIEGSKSSPASMMSDPELADSKHNRKLYAV

SEQ ID NO: 48947 - DNA, 2080 bp, Arabidopsis thaliana
  misc_feature (1)..(2080): Ceres Seq. ID no. 12574877
  misc_feature: MA Experiment ID: 20000171 Result: Down-regulated in Transcription
  misc_feature: MA Experiment 20000171 PARAMETER Experiment Name: At_42deg_Heat_P Parameter: Age (day) Value: 14
  misc_feature: MA Experiment 20000171 PARAMETER Experiment Name: At_42deg_Heat_P Parameter: Organism Value: A. thaliana
  misc_feature: MA Experiment 20000171 PARAMETER Experiment Name: At_42deg_Heat_P Parameter: Plant Line Value: WS
  misc_feature: MA Experiment 20000171 PARAMETER Experiment Name: At_42deg_Heat_P Parameter: Temperature (deg C) Value: 42 vs. 22
  misc_feature: MA Experiment 20000171 PARAMETER Experiment Name: At_42deg_Heat_P Parameter: Timepoint (hr) Value: 1
  misc_feature: MA Experiment 20000171 PARAMETER Experiment Name: At_42deg_Heat_P Parameter: Tissue Value: Aerial
  misc_feature: MA Experiment ID: 20001451 Result: Down-regulated in Transcription
  misc_feature: MA Experiment 20001451 PARAMETER Experiment Name: At_Far-red-induction_P Parameter: Age (day) Value: 7
  misc_feature: MA Experiment 20001451 PARAMETER Experiment Name: At_Far-red-induction_P Parameter: Light Value: Far-red vs. White
  misc_feature: MA Experiment 20001451 PARAMETER Experiment Name: At_Far-red-induction_P Parameter: Organism Value: A. thaliana
  misc_feature: MA Experiment 20001451 PARAMETER Experiment Name: At_Far-red-induction_P Parameter: Plant Line Value: Columbia
  misc_feature: MA Experiment 20001451 PARAMETER Experiment Name: At_Far-red-induction_P Parameter: Timepoint (hr) Value: 24
  misc_feature: MA Experiment 20001451 PARAMETER Experiment Name: At_Far-red-induction_P Parameter: Tissue Value: Whole Plant
  misc_feature: MA Experiment ID: 20001558 Result: Up-regulated in Transcription
  misc_feature: MA Experiment 20001558 PARAMETER Experiment Name: At_Drought_Soil_Dry_P Parameter: Age (day) Value: 27
  misc_feature: MA Experiment 20001558 PARAMETER Experiment Name: At_Drought_Soil_Dry_P Parameter: Organism Value: A. thaliana
  misc_feature: MA Experiment 20001558 PARAMETER Experiment Name: At_Drought_Soil_Dry_P Parameter: Plant Line Value: WS
  misc_feature: MA Experiment 20001558 PARAMETER Experiment Name: At_Drought_Soil_Dry_P Parameter: Post Timepoint (hr) Value: 6
  misc_feature: MA Experiment 20001558 PARAMETER Experiment Name: At_Drought_Soil_Dry_P Parameter: Post-Treatment Value: Re-Water vs. No Drought
  misc_feature: MA Experiment 20001558 PARAMETER Experiment Name: At_Drought_Soil_Dry_P Parameter: Timepoint (day) Value: 13
  misc_feature: MA Experiment 20001558 PARAMETER Experiment Name: At_Drought_Soil_Dry_P Parameter: Treatment Value: Drought vs. No Drought
  misc_feature: MA Experiment ID: 20001911 Result: Down-regulated in Transcription
  misc_feature: MA Experiment 20001911 PARAMETER Experiment Name: At_Drought_Reproduction_P Parameter: Age (day) Value: 40
  misc_feature: MA Experiment 20001911 PARAMETER Experiment Name: At_Drought_Reproduction_P Parameter: Organism Value: A. thaliana
  misc_feature: MA Experiment 20001911 PARAMETER Experiment Name: At_Drought_Reproduction_P Parameter: Plant Line Value: WS
  misc_feature: MA Experiment 20001911 PARAMETER Experiment Name: At_Drought_Reproduction_P Parameter: Timepoint (day) Value: 10
  misc_feature: MA Experiment 20001911 PARAMETER Experiment Name: At_Drought_Reproduction_P Parameter: Tissue Value: Flowers
  misc_feature: MA Experiment 20001911 PARAMETER Experiment Name: At_Drought_Reproduction_P Parameter: Treatment Value: Drought vs. No Drought
atgagggggagatcagaaggagggaagaaaaagccggtgattgtgttactctgcgttgcatcagtagtgcttgtttttgtatatctcttctttggttcctctaaccataaagctattgagtatgggaggaaacttggtttgggtggtgatgatgatgatagtactaagaaagatgacacttctagctctttttatgtagaagatgtagtagggaatggtttcactcccagaagctttcctgtgtgtgatgatcgacactcggagcttattccttgcttagataggaatcttatataccaaatgagattgaagcttgatttgtctttgatggagcattatgaacgtcactgtcctcctcctgaaaggaggtttaattgcttgattcctcctcctccagggtataagattccaatcaagtggccgaaaagcagagacgaagtttggaaagtgaacattcctcatactcacttagcgcatgagaagtctgaccaaaactggatggttgttaaaggagagaaaatcaatttccctggtggaggcacacattttcattatggtgctgataagtatattgcatcaatggcaaatatgcttaattttccgaacaatgttttgaacaatgggggaaggctgaggacatttcttgatgttggctgtggtgttgctagctttggaggttatcttcttgcatcagaaattatgacgatgtctttggcacctaatgatgttcatcagaaccaaatccaatttgctcttgagagagggattcctgcatacctcggcgttctagggaccaagaggctcccatacccaagcagatcctttgaacttgctcactgttcacgttgtcgtatcgattggcttcaaagagatggtattcttcttctcgagctagacagggtgctaagacctggtggctattttgcatattcatctccagaagcatatgcacaagatgaagaggacctcagaatatggagagaaatgagtgctcttgtgggccgtatgtgttggacgatagctgcaaaaaggaatcaaactgtaatttggcaaaaacctttgacaaatgattgttatttgggaagagaacctggaacccagcctcctctttgcaattctgacagtgaccctgatgctgtgtatggtgtaaacatggaagcatgcattactcaatacagtgaccatgaccacaaaaccaagggaagtggattggctccatggccagctcgattaacctctcctcctcctcggctagctgactttggctattccactgacatttttgagaaggatacagaaacttggaggcagagagtagatacttattgggatctcttgagtcctaaaattcaatcagacactgtaaggaacataatggacatgaaagcaagcatgggttcctttgctgctgctctgaaagaaaaagatgtttgggttatgaatgttgttcctgaagacggaccaaacacgcttaaactaatatacgacagaggcctgatgggtgctgttcatagctggtgtgaagcgttctcgacttacccgaggacttacgatttactccatgcctgggacatcatatctgatatcaagaagagaggttgcagcgcagaagatttgctgttggagatggatcgtatacttcgtccaagcggtttcatactcataagggacaaacaatccgtagtcgaccttgtgaagaagtatctcaaggctttgcattgggaagcagttgaaaccaagacagcctcggaatcagaccaagactcggacaatgtgatactcattgtccagaagaaactgtggttgacaagtgaaagcctcagagatttggagtgattacgatgatgatgatgatgaggccaaaaactgcctccaacatgaaaaaacaaaacaacattcacaagagatttctttcttgggagaatctaatcgaaaacatacaacgaagaaaattcgttttatagcggcaatttaacgttcttttctcttaaatctttctttctttacatattcatataatgtttgtatggttcgttagagaggactaaagtttcttatcaatttaaactctttttgttgc

SEQ ID NO: 48948 - protein, 611 aa, Arabidopsis thaliana
  peptide (1)..(611): Ceres Seq. ID no. 12574878
  misc_feature (88)..(598): Pfam Name: Putative methyltransferase Pfam Description: Putative methyltransferase
  misc_feature (236)..(611): Homolog of NCBI NO: 24030225 NR Description: unknown protein [Arabidopsis thaliana]
  misc_feature (76)..(601): Homolog of NCBI NO: 22326809 NR Description: putative protein
  misc_feature (1)..(601): Homolog of NCBI NO: 37535372 NR Description: hypothetical protein [Oryza sativa (japonica
  misc_feature (396)..(611): Homolog of NCBI NO: 25406781 NR Description: hypothetical protein [imported] - Arabidopsis
  misc_feature (81)..(393): Homolog of NCBI NO: 25406781 NR Description: hypothetical protein [imported] - Arabidopsis
  misc_feature (1)..(611): Homolog of NCBI NO: 14423548 NR Description: Unknown protein [Arabidopsis thaliana]
  misc_feature (1)..(611): Homolog of NCBI NO: 21536697 NR Description: ankyrin-like protein [Arabidopsis thaliana]
  misc_feature (1)..(611): Homolog of NCBI NO: 18390392 NR Description: ankyrin-like protein
  misc_feature (21)..(611): Homolog of NCBI NO: 7488052 NR Description: probable ankyrin - Arabidopsis thaliana
  misc_feature (1)..(611): Homolog of NCBI NO: 18414198 NR Description: ankyrin like protein
MRGRSEGGKKKPVIVLLCVASVVLVFVYLFFGSSNHKAIEYGRKLGLGGDDDDSTKKDDTSSSFYVEDVVGNGFTPRSFPVCDDRHSELIPCLDRNLIYQMRLKLDLSLMEHYERHCPPPERRFNCLIPPPPGYKIPIKWPKSRDEVWKVNIPHTHLAHEKSDQNWMVVKGEKINFPGGGTHFHYGADKYIASMANMLNFPNNVLNNGGRLRTFLDVGCGVASFGGYLLASEIMTMSLAPNDVHQNQIQFALERGIPAYLGVLGTKRLPYPSRSFELAHCSRCRIDWLQRDGILLLELDRVLRPGGYFAYSSPEAYAQDEEDLRIWREMSALVGRMCWTIAAKRNQTVIWQKPLTNDCYLGREPGTQPPLCNSDSDPDAVYGVNMEACITQYSDHDHKTKGSGLAPWPARLTSPPPRLADFGYSTDIFEKDTETWRQRVDTYWDLLSPKIQSDTVRNIMDMKASMGSFAAALKEKDVWVMNVVPEDGPNTLKLIYDRGLMGAVHSWCEAFSTYPRTYDLLHAWDIISDIKKRGCSAEDLLLEMDRILRPSGFILIRDKQSVVDLVKKYLKALHWEAVETKTASESDQDSDNVILIVQKKLWLTSESLRDLE

SEQ ID NO: 48949 - protein, 511 aa, Arabidopsis thaliana
  peptide (1)..(511): Ceres Seq. ID no. 12574879
  misc_feature (1)..(498): Pfam Name: Putative methyltransferase Pfam Description: Putative methyltransferase
  misc_feature (136)..(511): Homolog of NCBI NO: 24030225 NR Description: unknown protein [Arabidopsis thaliana]
  misc_feature (1)..(501): Homolog of NCBI NO: 22326809 NR Description: putative protein
  misc_feature (1)..(501): Homolog of NCBI NO: 37535372 NR Description: hypothetical protein [Oryza sativa (japonica
  misc_feature (296)..(511): Homolog of NCBI NO: 25406781 NR Description: hypothetical protein [imported] - Arabidopsis
  misc_feature (1)..(293): Homolog of NCBI NO: 25406781 NR Description: hypothetical protein [imported] - Arabidopsis
  misc_feature (1)..(511): Homolog of NCBI NO: 14423548 NR Description: Unknown protein [Arabidopsis thaliana]
  misc_feature (1)..(511): Homolog of NCBI NO: 21536697 NR Description: ankyrin-like protein [Arabidopsis thaliana]
  misc_feature (1)..(511): Homolog of NCBI NO: 18390392 NR Description: ankyrin-like protein
  misc_feature (1)..(511): Homolog of NCBI NO: 7488052 NR Description: probable ankyrin - Arabidopsis thaliana
  misc_feature (1)..(511): Homolog of NCBI NO: 18414198 NR Description: ankyrin like protein
MRLKLDLSLMEHYERHCPPPERRFNCLIPPPPGYKIPIKWPKSRDEVWKVNIPHTHLAHEKSDQNWMVVKGEKINFPGGGTHFHYGADKYIASMANMLNFPNNVLNNGGRLRTFLDVGCGVASFGGYLLASEIMTMSLAPNDVHQNQIQFALERGIPAYLGVLGTKRLPYPSRSFELAHCSRCRIDWLQRDGILLLELDRVLRPGGYFAYSSPEAYAQDEEDLRIWREMSALVGRMCWTIAAKRNQTVIWQKPLTNDCYLGREPGTQPPLCNSDSDPDAVYGVNMEACITQYSDHDHKTKGSGLAPWPARLTSPPPRLADFGYSTDIFEKDTETWRQRVDTYWDLLSPKIQSDTVRNIMDMKASMGSFAAALKEKDVWVMNVVPEDGPNTLKLIYDRGLMGAVHSWCEAFSTYPRTYDLLHAWDIISDIKKRGCSAEDLLLEMDRILRPSGFILIRDKQSVVDLVKKYLKALHWEAVETKTASESDQDSDNVILIVQKKLWLTSESLRDLE

SEQ ID NO: 48950 - protein, 502 aa, Arabidopsis thaliana
  peptide (1)..(502): Ceres Seq. ID no. 12574880
  misc_feature (1)..(489): Pfam Name: Putative methyltransferase Pfam Description: Putative methyltransferase
  misc_feature (127)..(502): Homolog of NCBI NO: 24030225 NR Description: unknown protein [Arabidopsis thaliana]
  misc_feature (1)..(492): Homolog of NCBI NO: 22326809 NR Description: putative protein
  misc_feature (1)..(492): Homolog of NCBI NO: 37535372 NR Description: hypothetical protein [Oryza sativa (japonica
  misc_feature (287)..(502): Homolog of NCBI NO: 25406781 NR Description: hypothetical protein [imported] - Arabidopsis
  misc_feature (1)..(284): Homolog of NCBI NO: 25406781 NR Description: hypothetical protein [imported] - Arabidopsis
  misc_feature (1)..(502): Homolog of NCBI NO: 14423548 NR Description: Unknown protein [Arabidopsis thaliana]
  misc_feature (1)..(502): Homolog of NCBI NO: 21536697 NR Description: ankyrin-like protein [Arabidopsis thaliana]
  misc_feature (1)..(502): Homolog of NCBI NO: 18390392 NR Description: ankyrin-like protein
  misc_feature (1)..(502): Homolog of NCBI NO: 7488052 NR Description: probable ankyrin - Arabidopsis thaliana
  misc_feature (1)..(502): Homolog of NCBI NO: 18414198 NR Description: ankyrin like protein
MEHYERHCPPPERRFNCLIPPPPGYKIPIKWPKSRDEVWKVNIPHTHLAHEKSDQNWMVVKGEKINFPGGGTHFHYGADKYIASMANMLNFPNNVLNNGGRLRTFLDVGCGVASFGGYLLASEIMTMSLAPNDVHQNQIQFALERGIPAYLGVLGTKRLPYPSRSFELAHCSRCRIDWLQRDGILLLELDRVLRPGGYFAYSSPEAYAQDEEDLRIWREMSALVGRMCWTIAAKRNQTVIWQKPLTNDCYLGREPGTQPPLCNSDSDPDAVYGVNMEACITQYSDHDHKTKGSGLAPWPARLTSPPPRLADFGYSTDIFEKDTETWRQRVDTYWDLLSPKIQSDTVRNIMDMKASMGSFAAALKEKDVWVMNVVPEDGPNTLKLIYDRGLMGAVHSWCEAFSTYPRTYDLLHAWDIISDIKKRGCSAEDLLLEMDRILRPSGFILIRDKQSVVDLVKKYLKALHWEAVETKTASESDQDSDNVILIVQKKLWLTSESLRDLE

SEQ ID NO: 48951 - DNA, 2106 bp, Arabidopsis thaliana
  misc_feature (1)..(2106): Ceres Seq. ID no. 14310160
  misc_feature: MA Experiment ID: 20000355 Result: Up-regulated in Transcription
  misc_feature: MA Experiment 20000355 PARAMETER Experiment Name: At_Siliques_Sub_P Parameter: Age (day) Value: 21
  misc_feature: MA Experiment 20000355 PARAMETER Experiment Name: At_Siliques_Sub_P Parameter: Organism Value: A. thaliana
  misc_feature: MA Experiment 20000355 PARAMETER Experiment Name: At_Siliques_Sub_P Parameter: Plant Line Value: WS
  misc_feature: MA Experiment 20000355 PARAMETER Experiment Name: At_Siliques_Sub_P Parameter: Tissue Value: Less Than 5mm Siliques vs. Whole Plant
attgttaacctctcgtaactaaaatcttccatggtagtagtaacaaagaagaccatgaagattcaaattcatctcctttactcgttcttgttcctctgtttctctactctcactctatcttctgagcccagaaaccctgaagttgaggcgttgataagtataaggaacaatttgcatgatcctcatggagctttgaacaattgggacgagttttcagttgatccttgtagctgggctatgatcacttgctctcccgacaacctcgtcattggactaggagcgccgagccagtctctctcgggaggtttatctgagtctatcggaaatctcacaaatctccgacaagtgtcattgcaaaataacaacatctccggcaaaattccaccggagctcggttttctacccaaattacaaaccttggatctttccaacaaccgattctccggtgacatccctgtttccatcgaccagctaagcagccttcaatatctgagactcaacaacaactctttgtctgggcccttccctgcttctttgtcccaaattcctcacctctccttcttggacttgtcttacaacaatctcagtggccctgttcctaaattcccagcaaggactttcaacgttgctggtaatcctttgatttgtagaagcaacccacctgagatttgttctggatcaatcaatgcaagtccactttctgtttctttgagctcttcatcaggacgcaggtctaatagattggcaatagctcttagtgtaagccttggctctgttgttatactagtccttgctctcgggtccttttgttggtaccgaaagaaacaaagaaggctactgatccttaacttaaacgataaacaagaggaagggcttcaaggacttgggaatctaagaagcttcacattcagagaactccatgtttatacagatggtttcagttccacgaacattctcggcgctggtggattcggtaatgtgtacagaggcaagcttggagatgggacaatggtggcagtgaaacggttgaaggatattaatggaacctcaggggattcacagtttcgtatggagctagagatgattagcttagctgttcataagaatctgcttcggttaattggttattgcgcaacttctggtgaaaggcttcttgtttacccttacatgcctaatggaagcgtcgcctctaagcttaaatctaaaccggcattggactggaacatgaggaagaggatagcaattggtgcagcgagaggtttgttgtatctacatgagcaatgtgatcccaagatcattcatagagatgtaaaggcagctaatattctcttagacgagtgctttgaagctgttgttgttgactttggactcgcaaagctccttaaccatgcggattctcatgtcacaactgcggtccgtggtacggttggccacattgcacctgaatatctctccactggtcagtcttctgagaaaaccgatgtgtttgggttcggtatactattgctcgagctcataaccggactgagagctcttgagtttggtaaaaccgttagccagaaaggagctatgcttgaatgggtgaggaaattacatgaagagatgaaagtagaggaactattggatcgagaactcggaactaactacgataagattgaagttggagagatgttgcaagtggctttgctatgcacacaatatctgccagctcatcgtcctaaaatgtctgaagttgttttgatgcttgaaggcgatggattagccgagagatgggctgcttcgcataaccattcacatttctaccatgccaatatctctttcaagacaatctctactctgtctactacttctgtctcaaggcttgacgcacattgcaatgatccaacttatcaaatgtttggatcttcggctttcgatgatgacgatgatcatcagcctttagattcctttgccatggaactatccggtccaagataacacaatgaaagaaagatatcatttttacgatggatcaaacaatccaatgaaaaaagctctacacttttataatatagacatgtatatggtggtgaaaattgatgaaaaatatctctacagtttgagatc

SEQ ID NO: 48952 - protein, 648 aa, Arabidopsis thaliana
  peptide (1)..(648): Ceres Seq. ID no. 14310161
  misc_feature (303)..(498): Pfam Name: Protein kinase domain Pfam Description: Protein kinase domain
  misc_feature (180)..(581): Homolog of NCBI NO: 7488244 NR Description: protein kinase homolog F17M5.190 - Arabidopsis
  misc_feature (35)..(581): Homolog of NCBI NO: 13897310 NR Description: SERK2 protein [Zea mays]
  misc_feature (21)..(586): Homolog of NCBI NO: 15219817 NR Description: receptor-related kinase [Arabidopsis thaliana]
  misc_feature (17)..(584): Homolog of NCBI NO: 9279736 NR Description: receptor-like kinase [Arabidopsis thaliana]
  misc_feature (17)..(584): Homolog of NCBI NO: 22331326 NR Description: somatic embryogenesis receptor-related kinase
  misc_feature (17)..(584): Homolog of NCBI NO: 21593619 NR Description: receptor protein kinase-like protein [Arabidopsis
  misc_feature (17)..(584): Homolog of NCBI NO: 15237242 NR Description: receptor protein kinase-related protein
  misc_feature (25)..(648): Homolog of NCBI NO: 11862956 NR Description: putative protein kinase [Oryza sativa (japonica
  misc_feature (158)..(648): Homolog of NCBI NO: 25407653 NR Description: receptor-like kinase homolog [imported] -
  misc_feature (83)..(648): Homolog of NCBI NO: 15224077 NR Description: LRR receptor protein kinase -related [Arabidopsis
MVVVTKKTMKIQIHLLYSFLFLCFSTLTLSSEPRNPEVEALISIRNNLHDPHGALNNWDEFSVDPCSWAMITCSPDNLVIGLGAPSQSLSGGLSESIGNLTNLRQVSLQNNNISGKIPPELGFLPKLQTLDLSNNRFSGDIPVSIDQLSSLQYLRLNNNSLSGPFPASLSQIPHLSFLDLSYNNLSGPVPKFPARTFNVAGNPLICRSNPPEICSGSINASPLSVSLSSSSGRRSNRLAIALSVSLGSVVILVLALGSFCWYRKKQRRLLILNLNDKQEEGLQGLGNLRSFTFRELHVYTDGFSSTNILGAGGFGNVYRGKLGDGTMVAVKRLKDINGTSGDSQFRMELEMISLAVHKNLLRLIGYCATSGERLLVYPYMPNGSVASKLKSKPALDWNMRKRIAIGAARGLLYLHEQCDPKIIHRDVKAANILLDECFEAVVVDFGLAKLLNHADSHVTTAVRGTVGHIAPEYLSTGQSSEKTDVFGFGILLLELITGLRALEFGKTVSQKGAMLEWVRKLHEEMKVEELLDRELGTNYDKIEVGEMLQVALLCTQYLPAHRPKMSEVVLMLEGDGLAERWAASHNHSHFYHANISFKTISTLSTTSVSRLDAHCNDPTYQMFGSSAFDDDDDHQPLDSFAMELSGPR

SEQ ID NO: 48953 - protein, 640 aa, Arabidopsis thaliana
  peptide (1)..(640): Ceres Seq. ID no. 14310162
  misc_feature (295)..(490): Pfam Name: Protein kinase domain Pfam Description: Protein kinase domain
  misc_feature (172)..(573): Homolog of NCBI NO: 7488244 NR Description: protein kinase homolog F17M5.190 - Arabidopsis
  misc_feature (27)..(573): Homolog of NCBI NO: 13897310 NR Description: SERK2 protein [Zea mays]
  misc_feature (13)..(578): Homolog of NCBI NO: 15219817 NR Description: receptor-related kinase [Arabidopsis thaliana]
  misc_feature (9)..(576): Homolog of NCBI NO: 9279736 NR Description: receptor-like kinase [Arabidopsis thaliana]
  misc_feature (9)..(576): Homolog of NCBI NO: 22331326 NR Description: somatic embryogenesis receptor-related kinase
  misc_feature (9)..(576): Homolog of NCBI NO: 21593619 NR Description: receptor protein kinase-like protein [Arabidopsis
  misc_feature (9)..(576): Homolog of NCBI NO: 15237242 NR Description: receptor protein kinase-related protein
  misc_feature (17)..(640): Homolog of NCBI NO: 11862956 NR Description: putative protein kinase [Oryza sativa (japonica
  misc_feature (150)..(640): Homolog of NCBI NO: 25407653 NR Description: receptor-like kinase homolog [imported] -
  misc_feature (75)..(640): Homolog of NCBI NO: 15224077 NR Description: LRR receptor protein kinase -related [Arabidopsis
MKIQIHLLYSFLFLCFSTLTLSSEPRNPEVEALISIRNNLHDPHGALNNWDEFSVDPCSWAMITCSPDNLVIGLGAPSQSLSGGLSESIGNLTNLRQVSLQNNNISGKIPPELGFLPKLQTLDLSNNRFSGDIPVSIDQLSSLQYLRLNNNSLSGPFPASLSQIPHLSFLDLSYNNLSGPVPKFPARTFNVAGNPLICRSNPPEICSGSINASPLSVSLSSSSGRRSNRLAIALSVSLGSVVILVLALGSFCWYRKKQRRLLILNLNDKQEEGLQGLGNLRSFTFRELHVYTDGFSSTNILGAGGFGNVYRGKLGDGTMVAVKRLKDINGTSGDSQFRMELEMISLAVHKNLLRLIGYCATSGERLLVYPYMPNGSVASKLKSKPALDWNMRKRIAIGAARGLLYLHEQCDPKIIHRDVKAANILLDECFEAVVVDFGLAKLLNHADSHVTTAVRGTVGHIAPEYLSTGQSSEKTDVFGFGILLLELITGLRALEFGKTVSQKGAMLEWVRKLHEEMKVEELLDRELGTNYDKIEVGEMLQVALLCTQYLPAHRPKMSEVVLMLEGDGLAERWAASHNHSHFYHANISFKTISTLSTTSVSRLDAHCNDPTYQMFGSSAFDDDDDHQPLDSFAMELSGPR

SEQ ID NO: 48954 - protein, 579 aa, Arabidopsis thaliana
  peptide (1)..(579): Ceres Seq. ID no. 14310163
  misc_feature (234)..(429): Pfam Name: Protein kinase domain Pfam Description: Protein kinase domain
  misc_feature (111)..(512): Homolog of NCBI NO: 7488244 NR Description: protein kinase homolog F17M5.190 - Arabidopsis
  misc_feature (1)..(512): Homolog of NCBI NO: 13897310 NR Description: SERK2 protein [Zea mays]
  misc_feature (1)..(517): Homolog of NCBI NO: 15219817 NR Description: receptor-related kinase [Arabidopsis thaliana]
  misc_feature (1)..(515): Homolog of NCBI NO: 9279736 NR Description: receptor-like kinase [Arabidopsis thaliana]
  misc_feature (1)..(515): Homolog of NCBI NO: 22331326 NR Description: somatic embryogenesis receptor-related kinase
  misc_feature (1)..(515): Homolog of NCBI NO: 21593619 NR Description: receptor protein kinase-like protein [Arabidopsis
  misc_feature (1)..(515): Homolog of NCBI NO: 15237242 NR Description: receptor protein kinase-related protein
  misc_feature (1)..(579): Homolog of NCBI NO: 11862956 NR Description: putative protein kinase [Oryza sativa (japonica
  misc_feature (89)..(579): Homolog of NCBI NO: 25407653 NR Description: receptor-like kinase homolog [imported] -
  misc_feature (14)..(579): Homolog of NCBI NO: 15224077 NR Description: LRR receptor protein kinase -related [Arabidopsis
MITCSPDNLVIGLGAPSQSLSGGLSESIGNLTNLRQVSLQNNNISGKIPPELGFLPKLQTLDLSNNRFSGDIPVSIDQLSSLQYLRLNNNSLSGPFPASLSQIPHLSFLDLSYNNLSGPVPKFPARTFNVAGNPLICRSNPPEICSGSINASPLSVSLSSSSGRRSNRLAIALSVSLGSVVILVLALGSFCWYRKKQRRLLILNLNDKQEEGLQGLGNLRSFTFRELHVYTDGFSSTNILGAGGFGNVYRGKLGDGTMVAVKRLKDINGTSGDSQFRMELEMISLAVHKNLLRLIGYCATSGERLLVYPYMPNGSVASKLKSKPALDWNMRKRIAIGAARGLLYLHEQCDPKIIHRDVKAANILLDECFEAVVVDFGLAKLLNHADSHVTTAVRGTVGHIAPEYLSTGQSSEKTDVFGFGILLLELITGLRALEFGKTVSQKGAMLEWVRKLHEEMKVEELLDRELGTNYDKIEVGEMLQVALLCTQYLPAHRPKMSEVVLMLEGDGLAERWAASHNHSHFYHANISFKTISTLSTTSVSRLDAHCNDPTYQMFGSSAFDDDDDHQPLDSFAMELSGPR

SEQ ID NO: 48955 - DNA, 3241 bp, Arabidopsis thaliana
  misc_feature (1)..(3241): Ceres Seq. ID no. 13578506
  misc_feature: MA Experiment ID: 20000171 Result: Down-regulated in Transcription
  misc_feature: MA Experiment 20000171 PARAMETER Experiment Name: At_42deg_Heat_P Parameter: Age (day) Value: 14
  misc_feature: MA Experiment 20000171 PARAMETER Experiment Name: At_42deg_Heat_P Parameter: Organism Value: A. thaliana
  misc_feature: MA Experiment 20000171 PARAMETER Experiment Name: At_42deg_Heat_P Parameter: Plant Line Value: WS
  misc_feature: MA Experiment 20000171 PARAMETER Experiment Name: At_42deg_Heat_P Parameter: Temperature (deg C) Value: 42 vs. 22
  misc_feature: MA Experiment 20000171 PARAMETER Experiment Name: At_42deg_Heat_P Parameter: Timepoint (hr) Value: 1
  misc_feature: MA Experiment 20000171 PARAMETER Experiment Name: At_42deg_Heat_P Parameter: Tissue Value: Aerial
  misc_feature: MA Experiment ID: 20000184 Result: Up-regulated in Transcription
  misc_feature: MA Experiment 20000184 PARAMETER Experiment Name: At_Shoots__P Parameter: Age (day) Value: 7
  misc_feature: MA Experiment 20000184 PARAMETER Experiment Name: At_Shoots__P Parameter: Tissue Value: Shoots vs. Whole Plant
  misc_feature: MA Experiment ID: 20000234 Result: Up-regulated in Transcription
  misc_feature: MA Experiment 20000234 PARAMETER Experiment Name: At_Siliques_P Parameter: Age (day) Value: 21
  misc_feature: MA Experiment 20000234 PARAMETER Experiment Name: At_Siliques_P Parameter: Organism Value: A. thaliana
  misc_feature: MA Experiment 20000234 PARAMETER Experiment Name: At_Siliques_P Parameter: Plant Line Value: WS
  misc_feature: MA Experiment 20000234 PARAMETER Experiment Name: At_Siliques_P Parameter: Tissue Value: Less Than 5mm Siliques vs. Whole Plant
  misc_feature: MA Experiment ID: 20000265 Result: Up-regulated in Transcription
  misc_feature: MA Experiment 20000265 PARAMETER Experiment Name: At_Open_Flower_P Parameter: Age (day) Value: 21
  misc_feature: MA Experiment 20000265 PARAMETER Experiment Name: At_Open_Flower_P Parameter: Plant Line Value: WS
  misc_feature: MA Experiment 20000265 PARAMETER Experiment Name: At_Open_Flower_P Parameter: Tissue Value: Closed Flower vs. Whole Plant
gacctttaatcttcttcgtctctctatcttcctcgatctccgccgattccttcgtctttccctttcctctctgtaaacctttcttcttcttcttcttcaatgcctccctaaaaccctagactcagaattctcaaaggcgacacctttaacctcctccactctgtttttcttctccaacaaaaatgtcaaattcccatttgggtactctctgtttcatcatctctttactgggtttggccaatttctcactttctcaaaccggtctcgatgattcgactatgcaatctctcaaatcaagtctgaatcttacatcagacgtcgattggtctaaccctaacccttgtaaatggcaatctgttcaatgcgatggaagtaatcgtgttactaagattcagcttaaacaaaaagggattcgtggaactcttcctactaatcttcagagtctctctgaattggttattctcgagctttttctcaatcgtatctctggtcctattcctgatctctctggcttatctcgtttacagactctgaatctacacgacaatctttttacctctgtaccgaagaatctcttctctggtatgagttctcttcaagaaatgtatctcgagaacaatccgtttgatccttgggtaattccagacaccgttaaagaagctacgtctctgcagaatctaactctctccaattgcagcattattggaaagatcccagatttcttcggttctcagtcacttccgagcttgacgaatctgaaactatctcagaatggtttagaaggagagttaccgatgagttttgctggtacttcgattcagtctctgttcttgaatggtcagaagcttaatggatcgatctcggtattggggaacatgacttcgctcgttgaggtttctcttcaaggaaatcagttctcaggtccaattcctgatctctctggtttggtatctctacgtgtgtttaatgttagagagaatcagctcactggtgttgttccacagtctttggttagtttgagttcgcttactactgtgaatttaactaataattatcttcaaggaccgactccgttgtttggcaaatccgttggtgttgatatagtcaacaacatgaatagcttttgtactaatgtagctggtgaggcttgtgatcctcgtgtggatactttggtatctgtagctgaatcatttggatatccagtgaagcttgcggaaagttggaaaggaaacaatccttgtgttaactgggttgggattacttgttctggaggtaacattacggttgttaatatgaggaaacaggatctctcgggtacgatttctccgagtttagctaagcttacttcattggagactatcaatcttgctgataataaactctccgggcatatacctgatgagcttaccacattgtctaagcttaggttacttgatgtgtctaacaacgatttttatggaataccgccaaagtttcgggatactgtgactttggtgactgaagggaacgctaacatggggaagaatggacctaacaaaacgagtgatgctcctggagcttcaccaggaagtaaaccttcaggaggaagtgatggcagtgaaacttctaagaaatcaagcaatgtcaagattattgttcctgtggttggtggggttgttggtgcattgtgtttggttgggcttggtgtgtgtctttatgcgaagaaaaggaagcgacctgctagagttcaaagtccaagcagcaacatggttattcatccgcatcattcgggtgacaacgatgacattaaactcactgttgcagcttctagtcttaacagtggtggaggaagtgatagctacagtcacagcggaagtgcagcgagtgatattcacgttgttgaagctgggaacttggttatatcgatacaggtcttgaggaatgtgacgaataacttcagcgaagagaatattctcgggagaggtggtttcgggacagtttacaaaggcgaactccacgatggaacaaaaatagctgtgaagagaatggagtcttcggttgtgagtgataagggacttactgagtttaaatctgagatcactgttctgactaaaatgcgtcatcgtcatctcgttgcgcttctcggttactgccttgacgggaacgagaggcttcttgtctacgagtacatgccacaggggacactaagtcagcatttgttccactggaaagaggaagggcgaaaaccgttagactggactagacggctggcgattgcattggatgtagctcgaggtgtcgagtatctgcacacacttgcgcatcagagctttatccatagggatctaaagccatcaaacatccttcttggtgatgatatgcgcgctaaagtctctgactttgggttagtacgtttagcccctgatggcaaatactccattgagactcgagtagctgggactttcggataccttgccccagaatacgcagtgacgggaagagtgacgaccaaggtagacattttcagccttggggtcatacttatggagctaatcactggtcgtaaagccctagacgagacgcaacccgaagacagcgtccatctagtcacatggttccgtcgggtagcagccagcaaagacgaaaatgccttcaaaaacgcaatagacccaaacatcagcctcgacgacgataccgtagccagtattgaaaaagtctgggagcttgctggtcattgctgtgcccgtgagccttaccaaagacctgacatggctcacatcgttaacgtcctttcttcactcaccgtccaatggaaaccaactgagaccgaccctgatgacgtctatgggatagactacgatatgccgcttccgcaggtgcttaagaaatggcaagctttcgagggactaagccagaccgcggatgactcgggatcttcgtcttcggcttatggaagcaaagacaatacgcagacaagtatcccaactcgcccatctggatttgctgactcgttcacttctgtggatggacgttgaaaaaatcaagattgcgtaaaacgttttagtagaagaagaagatgaagcattgtgtgataaatctctctctcgctctccctttttttgcttttctctgaagcatatttacttatgacttcgtttttatctactgcaagcttttggttagtgtatttatctatctactttgtgtagtttttatgcaaagataacaatctttgagttcttaaaattttaatatttcgtct

SEQ ID NO: 48956 - protein, 943 aa, Arabidopsis thaliana
  peptide (1)..(943): Ceres Seq. ID no. 13578507
  misc_feature (29)..(943): Homolog of NCBI NO: 7434420 NR Description: receptor-like protein kinase (EC 2.7.1.-) - rice
  misc_feature (29)..(943): Homolog of NCBI NO: 28301932 NR Description: gibberellin-induced receptor-like kinase TMK
  misc_feature (9)..(943): Homolog of NCBI NO: 29824403 NR Description: putative receptor protein kinase (TMK1)
  misc_feature (9)..(943): Homolog of NCBI NO: 15218941 NR Description: receptor protein kinase (TMK1) -related
  misc_feature (7)..(943): Homolog of NCBI NO: 7672732 NR Description: LRR receptor-like protein kinase [Nicotiana
MSNSHLGTLCFIISLLGLANFSLSQTGLDDSTMQSLKSSLNLTSDVDWSNPNPCKWQSVQCDGSNRVTKIQLKQKGIRGTLPTNLQSLSELVILELFLNRISGPIPDLSGLSRLQTLNLHDNLFTSVPKNLFSGMSSLQEMYLENNPFDPWVIPDTVKEATSLQNLTLSNCSIIGKIPDFFGSQSLPSLTNLKLSQNGLEGELPMSFAGTSIQSLFLNGQKLNGSISVLGNMTSLVEVSLQGNQFSGPIPDLSGLVSLRVFNVRENQLTGVVPQSLVSLSSLTTVNLTNNYLQGPTPLFGKSVGVDIVNNMNSFCTNVAGEACDPRVDTLVSVAESFGYPVKLAESWKGNNPCVNWVGITCSGGNITVVNMRKQDLSGTISPSLAKLTSLETINLADNKLSGHIPDELTTLSKLRLLDVSNNDFYGIPPKFRDTVTLVTEGNANMGKNGPNKTSDAPGASPGSKPSGGSDGSETSKKSSNVKIIVPVVGGVVGALCLVGLGVCLYAKKRKRPARVQSPSSNMVIHPHHSGDNDDIKLTVAASSLNSGGGSDSYSHSGSAASDIHVVEAGNLVISIQVLRNVTNNFSEENILGRGGFGTVYKGELHDGTKIAVKRMESSVVSDKGLTEFKSEITVLTKMRHRHLVALLGYCLDGNERLLVYEYMPQGTLSQHLFHWKEEGRKPLDWTRRLAIALDVARGVEYLHTLAHQSFIHRDLKPSNILLGDDMRAKVSDFGLVRLAPDGKYSIETRVAGTFGYLAPEYAVTGRVTTKVDIFSLGVILMELITGRKALDETQPEDSVHLVTWFRRVAASKDENAFKNAIDPNISLDDDTVASIEKVWELAGHCCAREPYQRPDMAHIVNVLSSLTVQWKPTETDPDDVYGIDYDMPLPQVLKKWQAFEGLSQTADDSGSSSSAYGSKDNTQTSIPTRPSGFADSFTSVDGR

SEQ ID NO: 48957 - protein, 911 aa, Arabidopsis thaliana
  peptide (1)..(911): Ceres Seq. ID no. 13578508
  misc_feature (1)..(911): Homolog of NCBI NO: 7434420 NR Description: receptor-like protein kinase (EC 2.7.1.-) - rice
  misc_feature (1)..(911): Homolog of NCBI NO: 28301932 NR Description: gibberellin-induced receptor-like kinase TMK
  misc_feature (1)..(911): Homolog of NCBI NO: 29824403 NR Description: putative receptor protein kinase (TMK1)
  misc_feature (1)..(911): Homolog of NCBI NO: 15218941 NR Description: receptor protein kinase (TMK1) -related
  misc_feature (1)..(911): Homolog of NCBI NO: 7672732 NR Description: LRR receptor-like protein kinase [Nicotiana
MQSLKSSLNLTSDVDWSNPNPCKWQSVQCDGSNRVTKIQLKQKGIRGTLPTNLQSLSELVILELFLNRISGPIPDLSGLSRLQTLNLHDNLFTSVPKNLFSGMSSLQEMYLENNPFDPWVIPDTVKEATSLQNLTLSNCSIIGKIPDFFGSQSLPSLTNLKLSQNGLEGELPMSFAGTSIQSLFLNGQKLNGSISVLGNMTSLVEVSLQGNQFSGPIPDLSGLVSLRVFNVRENQLTGVVPQSLVSLSSLTTVNLTNNYLQGPTPLFGKSVGVDIVNNMNSFCTNVAGEACDPRVDTLVSVAESFGYPVKLAESWKGNNPCVNWVGITCSGGNITVVNMRKQDLSGTISPSLAKLTSLETINLADNKLSGHIPDELTTLSKLRLLDVSNNDFYGIPPKFRDTVTLVTEGNANMGKNGPNKTSDAPGASPGSKPSGGSDGSETSKKSSNVKIIVPVVGGVVGALCLVGLGVCLYAKKRKRPARVQSPSSNMVIHPHHSGDNDDIKLTVAASSLNSGGGSDSYSHSGSAASDIHVVEAGNLVISIQVLRNVTNNFSEENILGRGGFGTVYKGELHDGTKIAVKRMESSVVSDKGLTEFKSEITVLTKMRHRHLVALLGYCLDGNERLLVYEYMPQGTLSQHLFHWKEEGRKPLDWTRRLAIALDVARGVEYLHTLAHQSFIHRDLKPSNILLGDDMRAKVSDFGLVRLAPDGKYSIETRVAGTFGYLAPEYAVTGRVTTKVDIFSLGVILMELITGRKALDETQPEDSVHLVTWFRRVAASKDENAFKNAIDPNISLDDDTVASIEKVWELAGHCCAREPYQRPDMAHIVNVLSSLTVQWKPTETDPDDVYGIDYDMPLPQVLKKWQAFEGLSQTADDSGSSSSAYGSKDNTQTSIPTRPSGFADSFTSVDGR

SEQ ID NO: 48958 - protein, 809 aa, Arabidopsis thaliana
  peptide (1)..(809): Ceres Seq. ID no. 13578509
  misc_feature (1)..(809): Homolog of NCBI NO: 7434420 NR Description: receptor-like protein kinase (EC 2.7.1.-) - rice
  misc_feature (1)..(809): Homolog of NCBI NO: 28301932 NR Description: gibberellin-induced receptor-like kinase TMK
  misc_feature (1)..(809): Homolog of NCBI NO: 29824403 NR Description: putative receptor protein kinase (TMK1)
  misc_feature (1)..(809): Homolog of NCBI NO: 15218941 NR Description: receptor protein kinase (TMK1) -related
  misc_feature (1)..(809): Homolog of NCBI NO: 7672732 NR Description: LRR receptor-like protein kinase [Nicotiana
MSSLQEMYLENNPFDPWVIPDTVKEATSLQNLTLSNCSIIGKIPDFFGSQSLPSLTNLKLSQNGLEGELPMSFAGTSIQSLFLNGQKLNGSISVLGNMTSLVEVSLQGNQFSGPIPDLSGLVSLRVFNVRENQLTGVVPQSLVSLSSLTTVNLTNNYLQGPTPLFGKSVGVDIVNNMNSFCTNVAGEACDPRVDTLVSVAESFGYPVKLAESWKGNNPCVNWVGITCSGGNITVVNMRKQDLSGTISPSLAKLTSLETINLADNKLSGHIPDELTTLSKLRLLDVSNNDFYGIPPKFRDTVTLVTEGNANMGKNGPNKTSDAPGASPGSKPSGGSDGSETSKKSSNVKIIVPVVGGVVGALCLVGLGVCLYAKKRKRPARVQSPSSNMVIHPHHSGDNDDIKLTVAASSLNSGGGSDSYSHSGSAASDIHVVEAGNLVISIQVLRNVTNNFSEENILGRGGFGTVYKGELHDGTKIAVKRMESSVVSDKGLTEFKSEITVLTKMRHRHLVALLGYCLDGNERLLVYEYMPQGTLSQHLFHWKEEGRKPLDWTRRLAIALDVARGVEYLHTLAHQSFIHRDLKPSNILLGDDMRAKVSDFGLVRLAPDGKYSIETRVAGTFGYLAPEYAVTGRVTTKVDIFSLGVILMELITGRKALDETQPEDSVHLVTWFRRVAASKDENAFKNAIDPNISLDDDTVASIEKVWELAGHCCAREPYQRPDMAHIVNVLSSLTVQWKPTETDPDDVYGIDYDMPLPQVLKKWQAFEGLSQTADDSGSSSSAYGSKDNTQTSIPTRPSGFADSFTSVDGR

SEQ ID NO: 48959 - DNA, 2073 bp, Arabidopsis thaliana
  misc_feature (1)..(2073): Ceres Seq. ID no. 13591980
  misc_feature: MA Experiment ID: 20000173 Result: Down-regulated in Transcription
  misc_feature: MA Experiment 20000173 PARAMETER Experiment Name: At_42deg_Heat_P Parameter: Age (day) Value: 14
  misc_feature: MA Experiment 20000173 PARAMETER Experiment Name: At_42deg_Heat_P Parameter: Organism Value: A. thaliana
  misc_feature: MA Experiment 20000173 PARAMETER Experiment Name: At_42deg_Heat_P Parameter: Plant Line Value: WS
  misc_feature: MA Experiment 20000173 PARAMETER Experiment Name: At_42deg_Heat_P Parameter: Temperature (deg C) Value: 42 vs. 22
  misc_feature: MA Experiment 20000173 PARAMETER Experiment Name: At_42deg_Heat_P Parameter: Timepoint (hr) Value: 6
  misc_feature: MA Experiment 20000173 PARAMETER Experiment Name: At_42deg_Heat_P Parameter: Tissue Value: Aerial
  misc_feature: MA Experiment ID: 20000495 Result: Up-regulated in Transcription
  misc_feature: MA Experiment 20000495 PARAMETER Experiment Name: At_Guard_Cells_P Parameter: Harvest Date Value: 8/2/2002
  misc_feature: MA Experiment 20000495 PARAMETER Experiment Name: At_Guard_Cells_P Parameter: Organism Value: A. thaliana
  misc_feature: MA Experiment 20000495 PARAMETER Experiment Name: At_Guard_Cells_P Parameter: Tissue Value: Guard Cells vs. Leaves
gaaaggaaaacgctaaaaggttgcgcgagtggagagtctgcccgccaagcaacccctagtattcagctttttgtgcactgatccaactcgactcggcctttttctctgagttgactcgaccgagaaaaggcgatagagctggggtttaattcggcgataacaatggacgaagattccgtccatggcgattctcacctcaagacatgtgtcgtcctcggcggacgagggttcattggtcgatcgcttgtctccagattgcttcgtctcggaaactggacagtccgagtcgcagattccggtcacactctccatcttgatgaatccgattcgctcctcgaggatgctctctcctccggccgcgcttcttatcactgcgtcgatgttcgtgataaacctcagatcgttaaagttaccgagggttcctatgttgtattttacatgggagctactgatttacgttcccatgattactttgactgctacaaggttatagttcaaggtacaagaaatgtgatttctgcctgtcgtgaatctggagtcagaaaacttatctacaacagtacagctgatgttgtttttgatggttcccaacctatacgtgatggtgatgaatccttgagacgtcctttgaagttccaatctatgttgacagacttcaaagctcaagcagaagcgttgatcaaattggctaacaaccgagatggtctcttaacttgtgcacttcgctctagcattgtatttggacctggtgacacagagtttgtaccttttttggtgaatctagccaagtccggatatgcaaagtttatactcgggagtggtgaaaatatctctgatttcacttactcggagaacgtttctcatgcacatatttgcgccgttaaagcattagattcacagatggagtttgtggctggaaaggaattttttatcacaaacctcaagccggtcagattttgggactttgtaagccatatagttgaaggtctgggatacccaagaccatccattaaacttcctgttcggctggttttgtatgttttctcacttcttaagtggacacatgaaaaggagggccttgggagtaattatgacacagcacatcagtatgctctgttagcttcatcaacgagaacttttaactgcaatgcagctaagaagcatcttggttacacacctgttgtgacacttgaagatggtattgcatcaacgcttcaatggttctctcgggatcttgagaagtctgatgacacaatcattcaatctactgcagatcagcttcttggttgtgggaaagttgcagacatcttgctgtggagaaatgagaagaaaaccttcgtttcttttcttgtcctaaacttgttttattactggttcttcttttctggaaacacatttacttcatctgcagcccaacttctgtttatatttgctgttgctctctatggagtctcttttgtgccgtcaaagattttcgggtttcaagtcaacaaaatacccccatggagatttgagatctccgaatccgctgtgagagatcttagtagtgatatcgtagttgtctggaatcaaggagttcgcagttttaaatccttaagcagtggaggagactggatcaagttcttcaagattgcaggatcactgtatctcctcaaactgattgtatcccgttcattggcagcatttcttttcacagttatgtcgttctcattcaccggtttcttcatctacgagcaatacgagcttgagctctaccacctagcccggatattcgtcgaatgcttaacatttattaaaaggatggtgatacctgtttctgatgcttcatctaaaccaatgttcatgtgaagcttccaaagtcctccactaaacgaacaccaacaatcccagagactaattgcagttattagatgtcttatgtacaaacattatgctatcaggatgtaatcttcactgagaggggatggatatatgattatttacgaatttgccataactactatcaaaatgcaccgttttgatccggtttccaaaaaaaaaagaaaaaaaaggaaagtatccttatatatcctt

SEQ ID NO: 48960 - protein, 561 aa, Arabidopsis thaliana
  peptide (1)..(561): Ceres Seq. ID no. 13591981
  misc_feature (10)..(354): Pfam Name: 3-beta hydroxysteroid dehydrogenase/isomerase family Pfam Description: 3-beta hydroxysteroid dehydrogenase/isomerase
  misc_feature (10)..(354): Pfam Name: 3-beta hydroxysteroid dehydrogenase/isomerase family Pfam Description: 3-beta hydroxysteroid dehydrogenase/isomerase
  misc_feature (10)..(354): Homolog of NCBI NO: 31127258 NR Description: Nsdhl protein [Mus musculus]
  misc_feature (1)..(354): Homolog of NCBI NO: 34881732 NR Description: similar to putative NAD(P)H steroid dehydrogenase
  misc_feature (255)..(530): Homolog of NCBI NO: 21539467 NR Description: 3-beta-hydroxysteroid dehydrogenase [Arabidopsis
  misc_feature (15)..(355): Homolog of NCBI NO: 18401656 NR Description: 3-beta hydroxysteroid dehydrogenase/isomerase
  misc_feature (15)..(355): Homolog of NCBI NO: 21553411 NR Description: 3-beta-hydroxysteroid dehydrogenase, putative
  misc_feature (10)..(354): Homolog of NCBI NO: 31127258 NR Description: Nsdhl protein [Mus musculus]
  misc_feature (255)..(530): Homolog of NCBI NO: 21539467 NR Description: 3-beta-hydroxysteroid dehydrogenase [Arabidopsis
  misc_feature (15)..(355): Homolog of NCBI NO: 21553411 NR Description: 3-beta-hydroxysteroid dehydrogenase, putative
  misc_feature (1)..(561): Homolog of NCBI NO: 18406234 NR Description: 3-beta hydroxysteroid dehydrogenase/isomerase
  misc_feature (83)..(354): Homolog of NCBI NO: 25408868 NR Description: probable sterol dehydrogenase [imported] -
  misc_feature (1)..(82): Homolog of NCBI NO: 25408868 NR Description: probable sterol dehydrogenase [imported] -
  misc_feature (15)..(378): Homolog of NCBI NO: 15225272 NR Description: 3-beta hydroxysteroid dehydrogenase/isomerase
  misc_feature (15)..(445): Homolog of NCBI NO: 30694041 NR Description: 3-beta hydroxysteroid dehydrogenase/isomerase
  misc_feature (15)..(355): Homolog of NCBI NO: 18401656 NR Description: 3-beta hydroxysteroid dehydrogenase/isomerase
  misc_feature (1)..(354): Homolog of NCBI NO: 34881732 NR Description: similar to putative NAD(P)H steroid dehydrogenase
  misc_feature (15)..(445): Homolog of NCBI NO: 30694041 NR Description: 3-beta hydroxysteroid dehydrogenase/isomerase
  misc_feature (15)..(378): Homolog of NCBI NO: 15225272 NR Description: 3-beta hydroxysteroid dehydrogenase/isomerase
  misc_feature (1)..(82): Homolog of NCBI NO: 25408868 NR Description: probable sterol dehydrogenase [imported] -
  misc_feature (83)..(354): Homolog of NCBI NO: 25408868 NR Description: probable sterol dehydrogenase [imported] -
  misc_feature (1)..(561): Homolog of NCBI NO: 18406234 NR Description: 3-beta hydroxysteroid dehydrogenase/isomerase
MDEDSVHGDSHLKTCVVLGGRGFIGRSLVSRLLRLGNWTVRVADSGHTLHLDESDSLLEDALSSGRASYHCVDVRDKPQIVKVTEGSYVVFYMGATDLRSHDYFDCYKVIVQGTRNVISACRESGVRKLIYNSTADVVFDGSQPIRDGDESLRRPLKFQSMLTDFKAQAEALIKLANNRDGLLTCALRSSIVFGPGDTEFVPFLVNLAKSGYAKFILGSGENISDFTYSENVSHAHICAVKALDSQMEFVAGKEFFITNLKPVRFWDFVSHIVEGLGYPRPSIKLPVRLVLYVFSLLKWTHEKEGLGSNYDTAHQYALLASSTRTFNCNAAKKHLGYTPVVTLEDGIASTLQWFSRDLEKSDDTIIQSTADQLLGCGKVADILLWRNEKKTFVSFLVLNLFYYWFFFSGNTFTSSAAQLLFIFAVALYGVSFVPSKIFGFQVNKIPPWRFEISESAVRDLSSDIVVVWNQGVRSFKSLSSGGDWIKFFKIAGSLYLLKLIVSRSLAAFLFTVMSFSFTGFFIYEQYELELYHLARIFVECLTFIKRMVIPVSDASSKPMFM

SEQ ID NO: 48961 - protein, 469 aa, Arabidopsis thaliana
  peptide (1)..(469): Ceres Seq. ID no. 13591982
  misc_feature (1)..(262): Pfam Name: 3-beta hydroxysteroid dehydrogenase/isomerase family Pfam Description: 3-beta hydroxysteroid dehydrogenase/isomerase
  misc_feature (1)..(262): Pfam Name: 3-beta hydroxysteroid dehydrogenase/isomerase family Pfam Description: 3-beta hydroxysteroid dehydrogenase/isomerase
  misc_feature (1)..(262): Homolog of NCBI NO: 18043286 NR Description: NAD(P) dependent steroid dehydrogenase-like [Mus
  misc_feature (1)..(262): Homolog of NCBI NO: 31127258 NR Description: Nsdhl protein [Mus musculus]
  misc_feature (1)..(262): Homolog of NCBI NO: 34881732 NR Description: similar to putative NAD(P)H steroid dehydrogenase
  misc_feature (163)..(438): Homolog of NCBI NO: 21539467 NR Description: 3-beta-hydroxysteroid dehydrogenase [Arabidopsis
  misc_feature (1)..(263): Homolog of NCBI NO: 18401656 NR Description: 3-beta hydroxysteroid dehydrogenase/isomerase
  misc_feature (1)..(262): Homolog of NCBI NO: 18043286 NR Description: NAD(P) dependent steroid dehydrogenase-like [Mus
  misc_feature (1)..(262): Homolog of NCBI NO: 34881732 NR Description: similar to putative NAD(P)H steroid dehydrogenase
  misc_feature (1)..(263): Homolog of NCBI NO: 18401656 NR Description: 3-beta hydroxysteroid dehydrogenase/isomerase
  misc_feature (1)..(469): Homolog of NCBI NO: 18406234 NR Description: 3-beta hydroxysteroid dehydrogenase/isomerase
  misc_feature (1)..(262): Homolog of NCBI NO: 25408868 NR Description: probable sterol dehydrogenase [imported] -
  misc_feature (1)..(286): Homolog of NCBI NO: 15225272 NR Description: 3-beta hydroxysteroid dehydrogenase/isomerase
  misc_feature (1)..(353): Homolog of NCBI NO: 30694041 NR Description: 3-beta hydroxysteroid dehydrogenase/isomerase
  misc_feature (1)..(263): Homolog of NCBI NO: 21553411 NR Description: 3-beta-hydroxysteroid dehydrogenase, putative
  misc_feature (163)..(438): Homolog of NCBI NO: 21539467 NR Description: 3-beta-hydroxysteroid dehydrogenase [Arabidopsis
  misc_feature (1)..(262): Homolog of NCBI NO: 31127258 NR Description: Nsdhl protein [Mus musculus]
  misc_feature (1)..(263): Homolog of NCBI NO: 21553411 NR Description: 3-beta-hydroxysteroid dehydrogenase, putative
  misc_feature (1)..(353): Homolog of NCBI NO: 30694041 NR Description: 3-beta hydroxysteroid dehydrogenase/isomerase
  misc_feature (1)..(286): Homolog of NCBI NO: 15225272 NR Description: 3-beta hydroxysteroid dehydrogenase/isomerase
  misc_feature (1)..(262): Homolog of NCBI NO: 25408868 NR Description: probable sterol dehydrogenase [imported] -
  misc_feature (1)..(469): Homolog of NCBI NO: 18406234 NR Description: 3-beta hydroxysteroid dehydrogenase/isomerase
MGATDLRSHDYFDCYKVIVQGTRNVISACRESGVRKLIYNSTADVVFDGSQPIRDGDESLRRPLKFQSMLTDFKAQAEALIKLANNRDGLLTCALRSSIVFGPGDTEFVPFLVNLAKSGYAKFILGSGENISDFTYSENVSHAHICAVKALDSQMEFVAGKEFFITNLKPVRFWDFVSHIVEGLGYPRPSIKLPVRLVLYVFSLLKWTHEKEGLGSNYDTAHQYALLASSTRTFNCNAAKKHLGYTPVVTLEDGIASTLQWFSRDLEKSDDTIIQSTADQLLGCGKVADILLWRNEKKTFVSFLVLNLFYYWFFFSGNTFTSSAAQLLFIFAVALYGVSFVPSKIFGFQVNKIPPWRFEISESAVRDLSSDIVVVWNQGVRSFKSLSSGGDWIKFFKIAGSLYLLKLIVSRSLAAFLFTVMSFSFTGFFIYEQYELELYHLARIFVECLTFIKRMVIPVSDASSKPMFM

SEQ ID NO: 48962 - protein, 401 aa, Arabidopsis thaliana
  peptide (1)..(401): Ceres Seq. ID no. 13591983
  misc_feature (1)..(194): Pfam Name: 3-beta hydroxysteroid dehydrogenase/isomerase family Pfam Description: 3-beta hydroxysteroid dehydrogenase/isomerase
  misc_feature (1)..(194): Pfam Name: 3-beta hydroxysteroid dehydrogenase/isomerase family Pfam Description: 3-beta hydroxysteroid dehydrogenase/isomerase
  misc_feature (1)..(194): Homolog of NCBI NO: 18043286 NR Description: NAD(P) dependent steroid dehydrogenase-like [Mus
  misc_feature (1)..(194): Homolog of NCBI NO: 31127258 NR Description: Nsdhl protein [Mus musculus]
  misc_feature (1)..(194): Homolog of NCBI NO: 34881732 NR Description: similar to putative NAD(P)H steroid dehydrogenase
  misc_feature (95)..(370): Homolog of NCBI NO: 21539467 NR Description: 3-beta-hydroxysteroid dehydrogenase [Arabidopsis
  misc_feature (1)..(195): Homolog of NCBI NO: 18401656 NR Description: 3-beta hydroxysteroid dehydrogenase/isomerase
  misc_feature (1)..(194): Homolog of NCBI NO: 18043286 NR Description: NAD(P) dependent steroid dehydrogenase-like [Mus
  misc_feature (1)..(194): Homolog of NCBI NO: 34881732 NR Description: similar to putative NAD(P)H steroid dehydrogenase
  misc_feature (1)..(195): Homolog of NCBI NO: 18401656 NR Description: 3-beta hydroxysteroid dehydrogenase/isomerase
  misc_feature (1)..(401): Homolog of NCBI NO: 18406234 NR Description: 3-beta hydroxysteroid dehydrogenase/isomerase
  misc_feature (1)..(194): Homolog of NCBI NO: 25408868 NR Description: probable sterol dehydrogenase [imported] -
  misc_feature (1)..(218): Homolog of NCBI NO: 15225272 NR Description: 3-beta hydroxysteroid dehydrogenase/isomerase
  misc_feature (1)..(285): Homolog of NCBI NO: 30694041 NR Description: 3-beta hydroxysteroid dehydrogenase/isomerase
  misc_feature (1)..(195): Homolog of NCBI NO: 21553411 NR Description: 3-beta-hydroxysteroid dehydrogenase, putative
  misc_feature (95)..(370): Homolog of NCBI NO: 21539467 NR Description: 3-beta-hydroxysteroid dehydrogenase [Arabidopsis
  misc_feature (1)..(194): Homolog of NCBI NO: 31127258 NR Description: Nsdhl protein [Mus musculus]
  misc_feature (1)..(195): Homolog of NCBI NO: 21553411 NR Description: 3-beta-hydroxysteroid dehydrogenase, putative
  misc_feature (1)..(285): Homolog of NCBI NO: 30694041 NR Description: 3-beta hydroxysteroid dehydrogenase/isomerase
  misc_feature (1)..(218): Homolog of NCBI NO: 15225272 NR Description: 3-beta hydroxysteroid dehydrogenase/isomerase
  misc_feature (1)..(194): Homolog of NCBI NO: 25408868 NR Description: probable sterol dehydrogenase [imported] -
  misc_feature (1)..(401): Homolog of NCBI NO: 18406234 NR Description: 3-beta hydroxysteroid dehydrogenase/isomerase
MLTDFKAQAEALIKLANNRDGLLTCALRSSIVFGPGDTEFVPFLVNLAKSGYAKFILGSGENISDFTYSENVSHAHICAVKALDSQMEFVAGKEFFITNLKPVRFWDFVSHIVEGLGYPRPSIKLPVRLVLYVFSLLKWTHEKEGLGSNYDTAHQYALLASSTRTFNCNAAKKHLGYTPVVTLEDGIASTLQWFSRDLEKSDDTIIQSTADQLLGCGKVADILLWRNEKKTFVSFLVLNLFYYWFFFSGNTFTSSAAQLLFIFAVALYGVSFVPSKIFGFQVNKIPPWRFEISESAVRDLSSDIVVVWNQGVRSFKSLSSGGDWIKFFKIAGSLYLLKLIVSRSLAAFLFTVMSFSFTGFFIYEQYELELYHLARIFVECLTFIKRMVIPVSDASSKPMFM

SEQ ID NO: 48963 - DNA, 1541 bp, Arabidopsis thaliana
  misc_feature (1)..(1541): Ceres Seq. ID no. 14310176
  misc_feature: MA Experiment ID: 108462 Result: Up-regulated in Transcription
  misc_feature: MA Experiment 108462 PARAMETER Experiment Name: At_Germinating_Seeds_cDNA_P Parameter: Age (day) Value: 2 vs. 0
  misc_feature: MA Experiment 108462 PARAMETER Experiment Name: At_Germinating_Seeds_cDNA_P Parameter: Tissue Value: Germinating Seeds
  misc_feature: MA Experiment ID: 108463 Result: Up-regulated in Transcription
  misc_feature: MA Experiment 108463 PARAMETER Experiment Name: At_Germinating_Seeds_cDNA_P Parameter: Age (day) Value: 3 vs. 0
  misc_feature: MA Experiment 108463 PARAMETER Experiment Name: At_Germinating_Seeds_cDNA_P Parameter: Tissue Value: Germinating Seeds
  misc_feature: MA Experiment ID: 108464 Result: Up-regulated in Transcription
  misc_feature: MA Experiment 108464 PARAMETER Experiment Name: At_Germinating_Seeds_cDNA_P Parameter: Age (day) Value: 4 vs. 0
  misc_feature: MA Experiment 108464 PARAMETER Experiment Name: At_Germinating_Seeds_cDNA_P Parameter: Tissue Value: Germinating Seeds
  misc_feature: MA Experiment ID: 108469 Result: Down-regulated in Transcription
  misc_feature: MA Experiment ID: 108577 Result: Up-regulated in Transcription
  misc_feature: MA Experiment 108577 PARAMETER Experiment Name: At_42deg_Heat_cDNA_P Parameter: Temperature (deg C) Value: 42 vs. 22
  misc_feature: MA Experiment 108577 PARAMETER Experiment Name: At_42deg_Heat_cDNA_P Parameter: Timepoint (hr) Value: 6
  misc_feature: MA Experiment 108577 PARAMETER Experiment Name: At_42deg_Heat_cDNA_P Parameter: Tissue Value: Aerial
  misc_feature: MA Experiment ID: 20000087 Result: Down-regulated in Transcription
  misc_feature: MA Experiment 20000087 PARAMETER Experiment Name: At_100uM_ABA_Mutants_cDNA_P Parameter: Plant Line Value: WS
  misc_feature: MA Experiment 20000087 PARAMETER Experiment Name: At_100uM_ABA_Mutants_cDNA_P Parameter: Timepoint (hr) Value: 6
  misc_feature: MA Experiment 20000087 PARAMETER Experiment Name: At_100uM_ABA_Mutants_cDNA_P Parameter: Tissue Value: Aerial
  misc_feature: MA Experiment 20000087 PARAMETER Experiment Name: At_100uM_ABA_Mutants_cDNA_P Parameter: Treatment Value: 100uM ABA vs. No Treatment
  misc_feature: MA Experiment ID: 20000179 Result: Up-regulated in Transcription
  misc_feature: MA Experiment 20000179 PARAMETER Experiment Name: At_Germinating_Seeds_P Parameter: Age (hr) Value: 6 vs. 0
  misc_feature: MA Experiment 20000179 PARAMETER Experiment Name: At_Germinating_Seeds_P Parameter: Tissue Value: Germinating Seeds
  misc_feature: MA Experiment ID: 20000180 Result: Up-regulated in Transcription
  misc_feature: MA Experiment 20000180 PARAMETER Experiment Name: At_Germinating_Seeds_P Parameter: Age (hr) Value: 24 vs. 0
  misc_feature: MA Experiment 20000180 PARAMETER Experiment Name: At_Germinating_Seeds_P Parameter: Tissue Value: Germinating Seeds
  misc_feature: MA Experiment ID: 20000794 Result: Down-regulated in Transcription
  misc_feature: MA Experiment 20000794 PARAMETER Experiment Name: At_Petals_P Parameter: Age (day) Value: 23-25 days
  misc_feature: MA Experiment 20000794 PARAMETER Experiment Name: At_Petals_P Parameter: Plant Line Value: WS
  misc_feature: MA Experiment 20000794 PARAMETER Experiment Name: At_Petals_P Parameter: Tissue Value: Petals vs. Whole plant
  misc_feature: MA Experiment ID: 20001451 Result: Down-regulated in Transcription
  misc_feature: MA Experiment 20001451 PARAMETER Experiment Name: At_Far-red-induction_P Parameter: Age (day) Value: 7
  misc_feature: MA Experiment 20001451 PARAMETER Experiment Name: At_Far-red-induction_P Parameter: Light Value: Far-red vs. White
  misc_feature: MA Experiment 20001451 PARAMETER Experiment Name: At_Far-red-induction_P Parameter: Organism Value: A. thaliana
  misc_feature: MA Experiment 20001451 PARAMETER Experiment Name: At_Far-red-induction_P Parameter: Plant Line Value: Columbia
  misc_feature: MA Experiment 20001451 PARAMETER Experiment Name: At_Far-red-induction_P Parameter: Timepoint (hr) Value: 24
  misc_feature: MA Experiment 20001451 PARAMETER Experiment Name: At_Far-red-induction_P Parameter: Tissue Value: Whole Plant
tgtttcttcaatatctctttctctccaacaaaatcaaaatcaagaaaacaaaaaagaaaaactctcaagaaacaatggatgcttcattgtctccattcgatcaccaaaaaactcaaaacacagagccaaagaaaagcttcattacctcactaatcactctccgttcaaacaacatcaaagaagacacatacttcgtctcagaactcaaacccacggagcaaaaatcacttcaagaactcaaagaaaagctctcagcttcatcctccaaagcttcttcaatgtggggagtctcactcctcggtggagacgacaaagctgacgtaatcctcctcaagttcctcagagcaagagatttcaaagtagcagactctttgagaatgcttgagaagtgtttggagtggagagaagagttcaaagcagagaaattgacagaagaagatctgggttttaaagatttggaaggtaaagttgcttacatgagaggctacgacaaagaaggacacccagtttgttacaatgcttatggtgtgtttaaagagaaagagatgtatgagagagtgtttggtgatgaagagaagcttaacaagtttctgagatggagagttcaggttttggagagaggtgttaaaatgcttcattttaaacctggtggtgttaattccattattcaagttacagatcttaaagatatgcctaagagagagcttagagttgcttctaatcagatcctctctctttttcaagataattaccctgaattggttgctactaagatattcataaacgtgccttggtacttcagtgtgatctactcaatgttcagcccattcctgactcagagaacaaagagcaagtttgtgatgtccaaagaaggcaatgcagcagaaacactctacaagttcattaggccagaagatattccggtgcaatacggtggtcttagccgtcctactgattcgcaaaacggaccgccaaaaccggcgtctgaattctccatcaagggtggtgagaaagttaacattcagattgaaggcattgagggtggagcaaccataacatgggatatagtagttggaggatgggatttagagtacagtgcagagtttgttccaaacgctgaagagagttacgcgatcgttgtcgagaaaccgaagaagatgaaagctacagatgaagctgtttgcaactctttcactacagtagaagctgggaagctcattctctctgttgacaatactctctctcgcaagaagaaagttgctgcttaccgttacactgtccggaaatctactacaaccgtctaatctataaccggtttttcagaagattggttgctttcttactactactttttgtgggtgtgttgaggggttttctttcttgggtttgagtactaggtttgttttgcttactcaacggttcatgttgaaccggaaatatcgataaatttgcgaggaaatcatatgtataaaaactatgatttgtatgacatttgatgtttggccttaatattttaactagagattgaagttttagtctgc

SEQ ID NO: 48964 - protein, 433 aa, Arabidopsis thaliana; identical to SEQ ID NO: 46931
  peptide (1)..(433): Ceres Seq. ID no. 14310177
  misc_feature (161)..(318): Pfam Name: CRAL/TRIO domain Pfam Description: CRAL/TRIO domain
  misc_feature (12)..(432): Homolog of NCBI NO: 14334978 NR Description: unknown protein [Arabidopsis thaliana]
  misc_feature (12)..(432): Homolog of NCBI NO: 18397616 NR Description: expressed protein [Arabidopsis thaliana]
  misc_feature (12)..(433): Homolog of NCBI NO: 34907288 NR Description: contains ESTs
  misc_feature (82)..(423): Homolog of NCBI NO: 8894548 NR Description: hypothetical protein [Cicer arietinum]
  misc_feature (350)..(427): Homolog of NCBI NO: 25407487 NR Description: hypothetical protein AT4g09160 [imported] -
  misc_feature (57)..(342): Homolog of NCBI NO: 25407487 NR Description: hypothetical protein AT4g09160 [imported] -
  misc_feature (50)..(427): Homolog of NCBI NO: 15081614 NR Description: At1g72160/T9N14_8 [Arabidopsis thaliana]
  misc_feature (57)..(427): Homolog of NCBI NO: 30680992 NR Description: expressed protein [Arabidopsis thaliana]
  misc_feature (15)..(427): Homolog of NCBI NO: 15218383 NR Description: cytosolic factor -related [Arabidopsis thaliana]
  misc_feature (25)..(433): Homolog of NCBI NO: 15230555 NR Description: expressed protein [Arabidopsis thaliana]

SEQ ID NO: 48965 - protein, 409 aa, Arabidopsis thaliana; identical to SEQ ID NO: 46932
  peptide (1)..(409): Ceres Seq. ID no. 14310178
  misc_feature (137)..(294): Pfam Name: CRAL/TRIO domain Pfam Description: CRAL/TRIO domain
  misc_feature (1)..(408): Homolog of NCBI NO: 14334978 NR Description: unknown protein [Arabidopsis thaliana]
  misc_feature (1)..(408): Homolog of NCBI NO: 18397616 NR Description: expressed protein [Arabidopsis thaliana]
  misc_feature (1)..(409): Homolog of NCBI NO: 34907288 NR Description: contains ESTs
  misc_feature (58)..(399): Homolog of NCBI NO: 8894548 NR Description: hypothetical protein [Cicer arietinum]
  misc_feature (326)..(403): Homolog of NCBI NO: 25407487 NR Description: hypothetical protein AT4g09160 [imported] -
  misc_feature (33)..(318): Homolog of NCBI NO: 25407487 NR Description: hypothetical protein AT4g09160 [imported] -
  misc_feature (26)..(403): Homolog of NCBI NO: 15081614 NR Description: At1g72160/T9N14_8 [Arabidopsis thaliana]
  misc_feature (33)..(403): Homolog of NCBI NO: 30680992 NR Description: expressed protein [Arabidopsis thaliana]
  misc_feature (1)..(403): Homolog of NCBI NO: 15218383 NR Description: cytosolic factor -related [Arabidopsis thaliana]
  misc_feature (1)..(409): Homolog of NCBI NO: 15230555 NR Description: expressed protein [Arabidopsis thaliana]

SEQ ID NO: 48966 - protein, 341 aa, Arabidopsis thaliana; identical to SEQ ID NO: 46933
  peptide (1)..(341): Ceres Seq. ID no. 14310179
  misc_feature (69)..(226): Pfam Name: CRAL/TRIO domain Pfam Description: CRAL/TRIO domain
  misc_feature (1)..(340): Homolog of NCBI NO: 14334978 NR Description: unknown protein [Arabidopsis thaliana]
  misc_feature (1)..(340): Homolog of NCBI NO: 18397616 NR Description: expressed protein [Arabidopsis thaliana]
  misc_feature (1)..(341): Homolog of NCBI NO: 34907288 NR Description: contains ESTs
  misc_feature (1)..(331): Homolog of NCBI NO: 8894548 NR Description: hypothetical protein [Cicer arietinum]
  misc_feature (258)..(335): Homolog of NCBI NO: 25407487 NR Description: hypothetical protein AT4g09160 [imported] -
  misc_feature (1)..(250): Homolog of NCBI NO: 25407487 NR Description: hypothetical protein AT4g09160 [imported] -
  misc_feature (1)..(335): Homolog of NCBI NO: 15081614 NR Description: At1g72160/T9N14_8 [Arabidopsis thaliana]
  misc_feature (1)..(335): Homolog of NCBI NO: 30680992 NR Description: expressed protein [Arabidopsis thaliana]
  misc_feature (1)..(335): Homolog of NCBI NO: 15218383 NR Description: cytosolic factor -related [Arabidopsis thaliana]
  misc_feature (1)..(341): Homolog of NCBI NO: 15230555 NR Description: expressed protein [Arabidopsis thaliana]

SEQ ID NO: 48967 - DNA, 1605 bp, Arabidopsis thaliana
  misc_feature (1)..(1605): Ceres Seq. ID no. 12574290
  misc_feature: MA Experiment ID: 20000179 Result: Up-regulated in Transcription
  misc_feature: MA Experiment 20000179 PARAMETER Experiment Name: At_Germinating_Seeds_P Parameter: Age (hr) Value: 6 vs. 0
  misc_feature: MA Experiment 20000179 PARAMETER Experiment Name: At_Germinating_Seeds_P Parameter: Tissue Value: Germinating Seeds
  misc_feature: MA Experiment ID: 20000184 Result: Down-regulated in Transcription
  misc_feature: MA Experiment 20000184 PARAMETER Experiment Name: At_Shoots__P Parameter: Age (day) Value: 7
  misc_feature: MA Experiment 20000184 PARAMETER Experiment Name: At_Shoots__P Parameter: Tissue Value: Shoots vs. Whole Plant
  misc_feature: MA Experiment ID: 20000213 Result: Down-regulated in Transcription
  misc_feature: MA Experiment 20000213 PARAMETER Experiment Name: At_4deg_Cold_P Parameter: Timepoint (hr) Value: 2
  misc_feature: MA Experiment ID: 20000214 Result: Down-regulated in Transcription
  misc_feature: MA Experiment 20000214 PARAMETER Experiment Name: At_4deg_Cold_P Parameter: Timepoint (hr) Value: 6
  misc_feature: MA Experiment ID: 20000234 Result: Down-regulated in Transcription
  misc_feature: MA Experiment 20000234 PARAMETER Experiment Name: At_Siliques_P Parameter: Age (day) Value: 21
  misc_feature: MA Experiment 20000234 PARAMETER Experiment Name: At_Siliques_P Parameter: Organism Value: A. thaliana
  misc_feature: MA Experiment 20000234 PARAMETER Experiment Name: At_Siliques_P Parameter: Plant Line Value: WS
  misc_feature: MA Experiment 20000234 PARAMETER Experiment Name: At_Siliques_P Parameter: Tissue Value: Less Than 5mm Siliques vs. Whole Plant
  misc_feature: MA Experiment ID: 20000235 Result: Down-regulated in Transcription
  misc_feature: MA Experiment 20000235 PARAMETER Experiment Name: At_Siliques_P Parameter: Age (day) Value: 21
  misc_feature: MA Experiment 20000235 PARAMETER Experiment Name: At_Siliques_P Parameter: Organism Value: A. thaliana
  misc_feature: MA Experiment 20000235 PARAMETER Experiment Name: At_Siliques_P Parameter: Plant Line Value: WS
  misc_feature: MA Experiment 20000235 PARAMETER Experiment Name: At_Siliques_P Parameter: Tissue Value: 5-10mm Siliques vs. Whole Plant
  misc_feature: MA Experiment ID: 20000264 Result: Down-regulated in Transcription
  misc_feature: MA Experiment 20000264 PARAMETER Experiment Name: At_Open_Flower_P Parameter: Age (day) Value: 21
  misc_feature: MA Experiment 20000264 PARAMETER Experiment Name: At_Open_Flower_P Parameter: Plant Line Value: WS
  misc_feature: MA Experiment 20000264 PARAMETER Experiment Name: At_Open_Flower_P Parameter: Tissue Value: Open Flower vs. Whole Plant
  misc_feature: MA Experiment ID: 20000265 Result: Down-regulated in Transcription
  misc_feature: MA Experiment 20000265 PARAMETER Experiment Name: At_Open_Flower_P Parameter: Age (day) Value: 21
  misc_feature: MA Experiment 20000265 PARAMETER Experiment Name: At_Open_Flower_P Parameter: Plant Line Value: WS
  misc_feature: MA Experiment 20000265 PARAMETER Experiment Name: At_Open_Flower_P Parameter: Tissue Value: Closed Flower vs. Whole Plant
  misc_feature: MA Experiment ID: 20000286 Result: Down-regulated in Transcription
  misc_feature: MA Experiment 20000286 PARAMETER Experiment Name: At_Open_Flower_P Parameter: Age (day) Value: 21
  misc_feature: MA Experiment 20000286 PARAMETER Experiment Name: At_Open_Flower_P Parameter: Plant Line Value: WS
  misc_feature: MA Experiment 20000286 PARAMETER Experiment Name: At_Open_Flower_P Parameter: Tissue Value: Half Open vs. Whole Plant
  misc_feature: MA Experiment ID: 20000439 Result: Down-regulated in Transcription
  misc_feature: MA Experiment 20000439 PARAMETER Experiment Name: At_Roots__P Parameter: Age (day) Value: 14 vs. 21
  misc_feature: MA Experiment 20000439 PARAMETER Experiment Name: At_Roots__P Parameter: Organism Value: A. thaliana
  misc_feature: MA Experiment 20000439 PARAMETER Experiment Name: At_Roots__P Parameter: Tissue Value: Roots vs. Whole Plant
  misc_feature: MA Experiment ID: 20000452 Result: Down-regulated in Transcription
  misc_feature: MA Experiment 20000452 PARAMETER Experiment Name: At_CS6879_Shoots-Roots_P Parameter: Age (day) Value: 14
  misc_feature: MA Experiment 20000452 PARAMETER Experiment Name: At_CS6879_Shoots-Roots_P Parameter: Organism Value: A. thaliana
  misc_feature: MA Experiment 20000452 PARAMETER Experiment Name: At_CS6879_Shoots-Roots_P Parameter: Plant Line Value: CS6879 vs. WS
  misc_feature: MA Experiment 20000452 PARAMETER Experiment Name: At_CS6879_Shoots-Roots_P Parameter: Tissue Value: Shoots
  misc_feature: MA Experiment ID: 20001247 Result: Up-regulated in Transcription
  misc_feature: MA Experiment 20001247 PARAMETER Experiment Name: At_Far-red-induction_P Parameter: Age (day) Value: 7
  misc_feature: MA Experiment 20001247 PARAMETER Experiment Name: At_Far-red-induction_P Parameter: Light Value: Far-red vs. White
  misc_feature: MA Experiment 20001247 PARAMETER Experiment Name: At_Far-red-induction_P Parameter: Organism Value: A. thaliana
  misc_feature: MA Experiment 20001247 PARAMETER Experiment Name: At_Far-red-induction_P Parameter: Plant Line Value: Columbia
  misc_feature: MA Experiment 20001247 PARAMETER Experiment Name: At_Far-red-induction_P Parameter: Timepoint (hr) Value: 1
  misc_feature: MA Experiment 20001247 PARAMETER Experiment Name: At_Far-red-induction_P Parameter: Tissue Value: Whole Plant
  misc_feature: MA Experiment ID: 20001450 Result: Up-regulated in Transcription
  misc_feature: MA Experiment 20001450 PARAMETER Experiment Name: At_Far-red-induction_P Parameter: Age (day) Value: 7
  misc_feature: MA Experiment 20001450 PARAMETER Experiment Name: At_Far-red-induction_P Parameter: Light Value: Far-red vs. White
  misc_feature: MA Experiment 20001450 PARAMETER Experiment Name: At_Far-red-induction_P Parameter: Organism Value: A. thaliana
  misc_feature: MA Experiment 20001450 PARAMETER Experiment Name: At_Far-red-induction_P Parameter: Plant Line Value: Columbia
  misc_feature: MA Experiment 20001450 PARAMETER Experiment Name: At_Far-red-induction_P Parameter: Timepoint (hr) Value: 8
  misc_feature: MA Experiment 20001450 PARAMETER Experiment Name: At_Far-red-induction_P Parameter: Tissue Value: Whole Plant
  misc_feature: MA Experiment ID: 20001451 Result: Up-regulated in Transcription
  misc_feature: MA Experiment 20001451 PARAMETER Experiment Name: At_Far-red-induction_P Parameter: Age (day) Value: 7
  misc_feature: MA Experiment 20001451 PARAMETER Experiment Name: At_Far-red-induction_P Parameter: Light Value: Far-red vs. White
  misc_feature: MA Experiment 20001451 PARAMETER Experiment Name: At_Far-red-induction_P Parameter: Organism Value: A. thaliana
  misc_feature: MA Experiment 20001451 PARAMETER Experiment Name: At_Far-red-induction_P Parameter: Plant Line Value: Columbia
  misc_feature: MA Experiment 20001451 PARAMETER Experiment Name: At_Far-red-induction_P Parameter: Timepoint (hr) Value: 24
  misc_feature: MA Experiment 20001451 PARAMETER Experiment Name: At_Far-red-induction_P Parameter: Tissue Value: Whole Plant
  misc_feature: MA Experiment ID: 20001557 Result: Down-regulated in Transcription
  misc_feature: MA Experiment 20001557 PARAMETER Experiment Name: At_Drought_Soil_Dry_P Parameter: Age (day) Value: 27
  misc_feature: MA Experiment 20001557 PARAMETER Experiment Name: At_Drought_Soil_Dry_P Parameter: Organism Value: A. thaliana
  misc_feature: MA Experiment 20001557 PARAMETER Experiment Name: At_Drought_Soil_Dry_P Parameter: Plant Line Value: WS
  misc_feature: MA Experiment 20001557 PARAMETER Experiment Name: At_Drought_Soil_Dry_P Parameter: Post Timepoint (hr) Value: 3
  misc_feature: MA Experiment 20001557 PARAMETER Experiment Name: At_Drought_Soil_Dry_P Parameter: Post-Treatment Value: Re-Water vs. No Drought
  misc_feature: MA Experiment 20001557 PARAMETER Experiment Name: At_Drought_Soil_Dry_P Parameter: Timepoint (day) Value: 13
  misc_feature: MA Experiment 20001557 PARAMETER Experiment Name: At_Drought_Soil_Dry_P Parameter: Treatment Value: Drought vs. No Drought
  misc_feature: MA Experiment ID: 20001560 Result: Down-regulated in Transcription
  misc_feature: MA Experiment 20001560 PARAMETER Experiment Name: At_Drought_Soil_Dry_P Parameter: Age (day) Value: 28
  misc_feature: MA Experiment 20001560 PARAMETER Experiment Name: At_Drought_Soil_Dry_P Parameter: Organism Value: A. thaliana
  misc_feature: MA Experiment 20001560 PARAMETER Experiment Name: At_Drought_Soil_Dry_P Parameter: Plant Line Value: WS
  misc_feature: MA Experiment 20001560 PARAMETER Experiment Name: At_Drought_Soil_Dry_P Parameter: Post Timepoint (hr) Value: None
  misc_feature: MA Experiment 20001560 PARAMETER Experiment Name: At_Drought_Soil_Dry_P Parameter: Post-Treatment Value: None
  misc_feature: MA Experiment 20001560 PARAMETER Experiment Name: At_Drought_Soil_Dry_P Parameter: Timepoint (day) Value: 14
  misc_feature: MA Experiment 20001560 PARAMETER Experiment Name: At_Drought_Soil_Dry_P Parameter: Treatment Value: Drought vs. No Drought
attagcttctgtttcgcaagatcacgacttctatataataatatataagctcgccgtataattttcttgccgggaataatctccgatcatcgtcggaaatttccgaattgttgtaaaagaagtccaatttaggctttggatcctcagtttaatttatctgggacttttggttgctgaaatctctttcgggttttgtcctaatcctcattagtttgggtttcgtgagtctcgttttataagaacatgggacaaaagagattgttgttcttgctggcagtttttacttttcttgtttcatcttcatatggtagagttctcaagttgaagagcgatgatgatcgacctgtttacaaccatacgcttgccgtcacgcttgtggagtatgcctctgcggtctatgagtctgatttgacaaaactcttcacttggacgtgcgaaagatgcaatggtttgacaaaggatttcgaagtaatagaggtcatatttgacgttgaacactgcttacaggcgtatgttggggtggctaaggatttgaatgctatcattattgcatttcggggaactcaagaacacagcatacaaaattgggtctcagacttgttctggaaacagctcgatctgaattaccctgacatgccagatgcaatggtgcaccatggcttttacagtgcttatcacaatacaactttacggcctgcggttttggatgcaataacacgagtgaaaaaagtctacggggcgaacatcaacatcatagtgaccggtcattcaatgggaggagccatggcttccttttgtggtctagacctagttgtaaatgaaggtgaagaaaacgtacaggttatgacatttgggcaacctcgtgttgggaatgccgcttttgcatcttattacagtttgcttgtgcccaataccttccggatcacgcatgaccgtgatatggttcctcatctgcctccttactattaccatttccctcaaaaaacataccaccacttcccaacagaggtgtgggtgaaagatttcagtttttcgaattttgttctttttggtttggagaaagtttgtgacaacactggtgaagatcctacttgcagcagatcggtaaggggaaatagcatttctgaccatttaaggtactttggggtagagttgaagtgtgagagttggagacagtgcagcatagtgatgaatcaagatatggagcgttacagcaggaaagattcaaggggtaacttattcctctcgcggacagttcctcctaaggacgtagtcaaaacaagttctctatcgaaaaccggaatctctagtctgtaggtatatgttgatctcaagtcttgaacaagagaaagctcgctggaagaggaggtttgggggattcaatgtgtggaggaagaacaagggttctttgattctttgtgatggcaagagaaggtgaaaaaatgattctgtaaataaatcctacgttggtagcatgtaaaatctttttcaatttaaatgtgaatgaataatcacattgtacagtagcagattccgaattctttaaatttgtatccatcaatttcttctgtcaattattaatcaaagtacaaacatcattttact

SEQ ID NO: 48968 - protein, 357 aa, Arabidopsis thaliana
  peptide (1)..(357): Ceres Seq. ID no. 12574291
  misc_feature (61)..(302): Homolog of NCBI NO: 230348 NR Description: Triacylglycerol Acylhydrolase (E.C.3.1.1.3)
  misc_feature (23)..(306): Homolog of NCBI NO: 21166167 NR Description: triacylglycerol lipase-like protein
  misc_feature (76)..(336): Homolog of NCBI NO: 34907212 NR Description: P0492G09.26 [Oryza sativa (japonica
  misc_feature (1)..(348): Homolog of NCBI NO: 34899296 NR Description: putative triacylglycerol lipase
  misc_feature (1)..(348): Homolog of NCBI NO: 34395192 NR Description: putative triacylglycerol lipase
  misc_feature (9)..(336): Homolog of NCBI NO: 21425571 NR Description: triacylglycerol lipase [Triticum aestivum]
  misc_feature (3)..(336): Homolog of NCBI NO: 21425569 NR Description: triacylglycerol Lipase [Triticum aestivum]
  misc_feature (1)..(286): Homolog of NCBI NO: 30686925 NR Description: lipase (class 3) family [Arabidopsis thaliana]
  misc_feature (1)..(357): Homolog of NCBI NO: 15238889 NR Description: triacylglycerol lipase-like protein; protein id:
  misc_feature (1)..(357): Homolog of NCBI NO: 18418946 NR Description: triacylglycerol lipase-like protein
MGQKRLLFLLAVFTFLVSSSYGRVLKLKSDDDRPVYNHTLAVTLVEYASAVYESDLTKLFTWTCERCNGLTKDFEVIEVIFDVEHCLQAYVGVAKDLNAIIIAFRGTQEHSIQNWVSDLFWKQLDLNYPDMPDAMVHHGFYSAYHNTTLRPAVLDAITRVKKVYGANINIIVTGHSMGGAMASFCGLDLVVNEGEENVQVMTFGQPRVGNAAFASYYSLLVPNTFRITHDRDMVPHLPPYYYHFPQKTYHHFPTEVWVKDFSFSNFVLFGLEKVCDNTGEDPTCSRSVRGNSISDHLRYFGVELKCESWRQCSIVMNQDMERYSRKDSRGNLFLSRTVPPKDVVKTSSLSKTGISSL

SEQ ID NO: 48969 - protein, 227 aa, Arabidopsis thaliana
  peptide (1)..(227): Ceres Seq. ID no. 12574292
  misc_feature (1)..(172): Homolog of NCBI NO: 230348 NR Description: Triacylglycerol Acylhydrolase (E.C.3.1.1.3)
  misc_feature (1)..(176): Homolog of NCBI NO: 21166167 NR Description: triacylglycerol lipase-like protein
  misc_feature (1)..(206): Homolog of NCBI NO: 34907212 NR Description: P0492G09.26 [Oryza sativa (japonica
  misc_feature (1)..(218): Homolog of NCBI NO: 34899296 NR Description: putative triacylglycerol lipase
  misc_feature (1)..(218): Homolog of NCBI NO: 34395192 NR Description: putative triacylglycerol lipase
  misc_feature (1)..(206): Homolog of NCBI NO: 21425571 NR Description: triacylglycerol lipase [Triticum aestivum]
  misc_feature (1)..(206): Homolog of NCBI NO: 21425569 NR Description: triacylglycerol Lipase [Triticum aestivum]
  misc_feature (1)..(156): Homolog of NCBI NO: 30686925 NR Description: lipase (class 3) family [Arabidopsis thaliana]
  misc_feature (1)..(227): Homolog of NCBI NO: 15238889 NR Description: triacylglycerol lipase-like protein; protein id:
  misc_feature (1)..(227): Homolog of NCBI NO: 18418946 NR Description: triacylglycerol lipase-like protein
MPDAMVHHGFYSAYHNTTLRPAVLDAITRVKKVYGANINIIVTGHSMGGAMASFCGLDLVVNEGEENVQVMTFGQPRVGNAAFASYYSLLVPNTFRITHDRDMVPHLPPYYYHFPQKTYHHFPTEVWVKDFSFSNFVLFGLEKVCDNTGEDPTCSRSVRGNSISDHLRYFGVELKCESWRQCSIVMNQDMERYSRKDSRGNLFLSRTVPPKDVVKTSSLSKTGISSL

SEQ ID NO: 48970 - protein, 223 aa, Arabidopsis thaliana
  peptide (1)..(223): Ceres Seq. ID no. 12574293
  misc_feature (1)..(168): Homolog of NCBI NO: 230348 NR Description: Triacylglycerol Acylhydrolase (E.C.3.1.1.3)
  misc_feature (1)..(172): Homolog of NCBI NO: 21166167 NR Description: triacylglycerol lipase-like protein
  misc_feature (1)..(202): Homolog of NCBI NO: 34907212 NR Description: P0492G09.26 [Oryza sativa (japonica
  misc_feature (1)..(214): Homolog of NCBI NO: 34899296 NR Description: putative triacylglycerol lipase
  misc_feature (1)..(214): Homolog of NCBI NO: 34395192 NR Description: putative triacylglycerol lipase
  misc_feature (1)..(202): Homolog of NCBI NO: 21425571 NR Description: triacylglycerol lipase [Triticum aestivum]
  misc_feature (1)..(202): Homolog of NCBI NO: 21425569 NR Description: triacylglycerol Lipase [Triticum aestivum]
  misc_feature (1)..(152): Homolog of NCBI NO: 30686925 NR Description: lipase (class 3) family [Arabidopsis thaliana]
  misc_feature (1)..(223): Homolog of NCBI NO: 15238889 NR Description: triacylglycerol lipase-like protein; protein id:
  misc_feature (1)..(223): Homolog of NCBI NO: 18418946 NR Description: triacylglycerol lipase-like protein
MVHHGFYSAYHNTTLRPAVLDAITRVKKVYGANINIIVTGHSMGGAMASFCGLDLVVNEGEENVQVMTFGQPRVGNAAFASYYSLLVPNTFRITHDRDMVPHLPPYYYHFPQKTYHHFPTEVWVKDFSFSNFVLFGLEKVCDNTGEDPTCSRSVRGNSISDHLRYFGVELKCESWRQCSIVMNQDMERYSRKDSRGNLFLSRTVPPKDVVKTSSLSKTGISSL

SEQ ID NO: 48971 - DNA, 2016 bp, Arabidopsis thaliana; identical to SEQ ID NO: 39185
  misc_feature (1)..(2016): Ceres Seq. ID no. 13489529
  misc_feature: MA Experiment ID: 108433 Result: Down-regulated in Transcription
  misc_feature: MA Experiment 108433 PARAMETER Experiment Name: At_rhl_Mutant2_cDNA_P Parameter: Age (day) Value: 7
  misc_feature: MA Experiment 108433 PARAMETER Experiment Name: At_rhl_Mutant2_cDNA_P Parameter: Organism Value: A. thaliana
  misc_feature: MA Experiment 108433 PARAMETER Experiment Name: At_rhl_Mutant2_cDNA_P Parameter: Plant Line Value: rhl Mutant vs. wt landsburg
  misc_feature: MA Experiment 108433 PARAMETER Experiment Name: At_rhl_Mutant2_cDNA_P Parameter: Tissue Value: Roots
  misc_feature: MA Experiment ID: 108461 Result: Up-regulated in Transcription
  misc_feature: MA Experiment 108461 PARAMETER Experiment Name: At_Germinating_Seeds_cDNA_P Parameter: Age (day) Value: 1 vs. 0
  misc_feature: MA Experiment 108461 PARAMETER Experiment Name: At_Germinating_Seeds_cDNA_P Parameter: Tissue Value: Germinating Seeds
  misc_feature: MA Experiment ID: 108462 Result: Up-regulated in Transcription
  misc_feature: MA Experiment 108462 PARAMETER Experiment Name: At_Germinating_Seeds_cDNA_P Parameter: Age (day) Value: 2 vs. 0
  misc_feature: MA Experiment 108462 PARAMETER Experiment Name: At_Germinating_Seeds_cDNA_P Parameter: Tissue Value: Germinating Seeds
  misc_feature: MA Experiment ID: 108463 Result: Up-regulated in Transcription
  misc_feature: MA Experiment 108463 PARAMETER Experiment Name: At_Germinating_Seeds_cDNA_P Parameter: Age (day) Value: 3 vs. 0
  misc_feature: MA Experiment 108463 PARAMETER Experiment Name: At_Germinating_Seeds_cDNA_P Parameter: Tissue Value: Germinating Seeds
  misc_feature: MA Experiment ID: 108464 Result: Up-regulated in Transcription
  misc_feature: MA Experiment 108464 PARAMETER Experiment Name: At_Germinating_Seeds_cDNA_P Parameter: Age (day) Value: 4 vs. 0
  misc_feature: MA Experiment 108464 PARAMETER Experiment Name: At_Germinating_Seeds_cDNA_P Parameter: Tissue Value: Germinating Seeds
  misc_feature: MA Experiment ID: 108577 Result: Down-regulated in Transcription
  misc_feature: MA Experiment 108577 PARAMETER Experiment Name: At_42deg_Heat_cDNA_P Parameter: Temperature (deg C) Value: 42 vs. 22
  misc_feature: MA Experiment 108577 PARAMETER Experiment Name: At_42deg_Heat_cDNA_P Parameter: Timepoint (hr) Value: 6
  misc_feature: MA Experiment 108577 PARAMETER Experiment Name: At_42deg_Heat_cDNA_P Parameter: Tissue Value: Aerial
  misc_feature: MA Experiment ID: 108585 Result: Up-regulated in Transcription
  misc_feature: MA Experiment 108585 PARAMETER Experiment Name: At_5mM_NaNP_cDNA_P Parameter: Timepoint (hr) Value: 6
  misc_feature: MA Experiment 108585 PARAMETER Experiment Name: At_5mM_NaNP_cDNA_P Parameter: Tissue Value: Aerial
  misc_feature: MA Experiment 108585 PARAMETER Experiment Name: At_5mM_NaNP_cDNA_P Parameter: Treatment Value: null
  misc_feature: MA Experiment ID: 108595 Result: Down-regulated in Transcription
  misc_feature: MA Experiment 108595 PARAMETER Experiment Name: At_Ler-pi_Ovule_cDNA_P Parameter: Plant Line Value: null
  misc_feature: MA Experiment ID: 108668 Result: Down-regulated in Transcription
  misc_feature: MA Experiment 108668 PARAMETER Experiment Name: At_2mM_SA_cDNA_P Parameter: Plant Line Value: WS
  misc_feature: MA Experiment 108668 PARAMETER Experiment Name: At_2mM_SA_cDNA_P Parameter: Timepoint (hr) Value: 6
  misc_feature: MA Experiment 108668 PARAMETER Experiment Name: At_2mM_SA_cDNA_P Parameter: Treatment Value: 2mM SA vs. No Treatment
  misc_feature: MA Experiment ID: 20000180 Result: Up-regulated in Transcription
  misc_feature: MA Experiment 20000180 PARAMETER Experiment Name: At_Germinating_Seeds_P Parameter: Age (hr) Value: 24 vs. 0
  misc_feature: MA Experiment 20000180 PARAMETER Experiment Name: At_Germinating_Seeds_P Parameter: Tissue Value: Germinating Seeds
  misc_feature: MA Experiment ID: 20000224 Result: Down-regulated in Transcription
  misc_feature: MA Experiment ID: 20000451 Result: Up-regulated in Transcription
  misc_feature: MA Experiment 20000451 PARAMETER Experiment Name: At_CS6879_Shoots-Roots_P Parameter: Age (day) Value: 14
  misc_feature: MA Experiment 20000451 PARAMETER Experiment Name: At_CS6879_Shoots-Roots_P Parameter: Organism Value: A. thaliana
  misc_feature: MA Experiment 20000451 PARAMETER Experiment Name: At_CS6879_Shoots-Roots_P Parameter: Plant Line Value: CS6879 vs. WS
  misc_feature: MA Experiment 20000451 PARAMETER Experiment Name: At_CS6879_Shoots-Roots_P Parameter: Tissue Value: Roots
  misc_feature: MA Experiment ID: 20000573 Result: Down-regulated in Transcription
  misc_feature: MA Experiment 20000573 PARAMETER Experiment Name: At_100uM_ABA_Mutants__P Parameter: Organism Value: A. thaliana
  misc_feature: MA Experiment 20000573 PARAMETER Experiment Name: At_100uM_ABA_Mutants__P Parameter: Plant Line Value: CS22 vs. Ler wt
  misc_feature: MA Experiment 20000573 PARAMETER Experiment Name: At_100uM_ABA_Mutants__P Parameter: Timepoint (hr) Value: N/A
  misc_feature: MA Experiment 20000573 PARAMETER Experiment Name: At_100uM_ABA_Mutants__P Parameter: Tissue Value: Whole Plant
  misc_feature: MA Experiment 20000573 PARAMETER Experiment Name: At_100uM_ABA_Mutants__P Parameter: Treatment Value: None
  misc_feature: MA Experiment ID: 20000574 Result: Down-regulated in Transcription
  misc_feature: MA Experiment 20000574 PARAMETER Experiment Name: At_100uM_ABA_Mutants__P Parameter: Organism Value: A. thaliana
  misc_feature: MA Experiment 20000574 PARAMETER Experiment Name: At_100uM_ABA_Mutants__P Parameter: Plant Line Value: CS23 vs. Ler wt
  misc_feature: MA Experiment 20000574 PARAMETER Experiment Name: At_100uM_ABA_Mutants__P Parameter: Timepoint (hr) Value: N/A
  misc_feature: MA Experiment 20000574 PARAMETER Experiment Name: At_100uM_ABA_Mutants__P Parameter: Tissue Value: Whole Plant
  misc_feature: MA Experiment 20000574 PARAMETER Experiment Name: At_100uM_ABA_Mutants__P Parameter: Treatment Value: None
  misc_feature: MA Experiment ID: 20000794 Result: Down-regulated in Transcription
  misc_feature: MA Experiment 20000794 PARAMETER Experiment Name: At_Petals_P Parameter: Age (day) Value: 23-25 days
  misc_feature: MA Experiment 20000794 PARAMETER Experiment Name: At_Petals_P Parameter: Plant Line Value: WS
  misc_feature: MA Experiment 20000794 PARAMETER Experiment Name: At_Petals_P Parameter: Tissue Value: Petals vs. Whole plant
  misc_feature: MA Experiment ID: 20001451 Result: Down-regulated in Transcription
  misc_feature: MA Experiment 20001451 PARAMETER Experiment Name: At_Far-red-induction_P Parameter: Age (day) Value: 7
  misc_feature: MA Experiment 20001451 PARAMETER Experiment Name: At_Far-red-induction_P Parameter: Light Value: Far-red vs. White
  misc_feature: MA Experiment 20001451 PARAMETER Experiment Name: At_Far-red-induction_P Parameter: Organism Value: A. thaliana
  misc_feature: MA Experiment 20001451 PARAMETER Experiment Name: At_Far-red-induction_P Parameter: Plant Line Value: Columbia
  misc_feature: MA Experiment 20001451 PARAMETER Experiment Name: At_Far-red-induction_P Parameter: Timepoint (hr) Value: 24
  misc_feature: MA Experiment 20001451 PARAMETER Experiment Name: At_Far-red-induction_P Parameter: Tissue Value: Whole Plant
  misc_feature: MA Experiment ID: 20001906 Result: Down-regulated in Transcription
  misc_feature: MA Experiment 20001906 PARAMETER Experiment Name: At_Drought_Reproduction_P Parameter: Age (day) Value: 35
  misc_feature: MA Experiment 20001906 PARAMETER Experiment Name: At_Drought_Reproduction_P Parameter: Organism Value: A. thaliana
  misc_feature: MA Experiment 20001906 PARAMETER Experiment Name: At_Drought_Reproduction_P Parameter: Plant Line Value: WS
  misc_feature: MA Experiment 20001906 PARAMETER Experiment Name: At_Drought_Reproduction_P Parameter: Timepoint (day) Value: 5
  misc_feature: MA Experiment 20001906 PARAMETER Experiment Name: At_Drought_Reproduction_P Parameter: Tissue Value: Siliques
  misc_feature: MA Experiment 20001906 PARAMETER Experiment Name: At_Drought_Reproduction_P Parameter: Treatment Value: Drought vs. No Drought

SEQ ID NO: 48972 - protein, 245 aa, Arabidopsis thaliana; identical to SEQ ID NO: 39186
  peptide (1)..(245): Ceres Seq. ID no. 13489530
  misc_feature (9)..(64): Pfam Name: RNA recognition motif. (a.k.a. RRM, RBD, or RNP domain) Pfam Description: RNA recognition motif. (a.k.a. RRM, RBD, or RNP
  misc_feature (9)..(64): Pfam Name: RNA recognition motif. (a.k.a. RRM, RBD, or RNP domain) Pfam Description: RNA recognition motif. (a.k.a. RRM, RBD, or RNP
  misc_feature (1)..(237): Homolog of NCBI NO: 23505939 NR Description: At1g20880/F9H16_14 [Arabidopsis thaliana]
  misc_feature (1)..(237): Homolog of NCBI NO: 18394923 NR Description: RNA recognition motif (RRM)-containing protein
  misc_feature (1)..(237): Homolog of NCBI NO: 15010636 NR Description: At1g20880/F9H16_14 [Arabidopsis thaliana]
  misc_feature (3)..(186): Homolog of NCBI NO: 25518372 NR Description: hypothetical protein F19G10.13 - Arabidopsis
  misc_feature (1)..(97): Homolog of NCBI NO: 15217552 NR Description: RNA recognition motif (RRM)-containing protein
  misc_feature (1)..(237): Homolog of NCBI NO: 23505939 NR Description: At1g20880/F9H16_14 [Arabidopsis thaliana]
  misc_feature (1)..(237): Homolog of NCBI NO: 15010636 NR Description: At1g20880/F9H16_14 [Arabidopsis thaliana]
  misc_feature (1)..(97): Homolog of NCBI NO: 15217552 NR Description: RNA recognition motif (RRM)-containing protein
  misc_feature (1)..(245): Homolog of NCBI NO: 14532532 NR Description: At1g33470/F10C21_14 [Arabidopsis thaliana]
  misc_feature (104)..(245): Homolog of NCBI NO: 30692876 NR Description: RRM-containing protein -related [Arabidopsis
  misc_feature (1)..(233): Homolog of NCBI NO: 34907334 NR Description: P0698A10.29 [Oryza sativa (japonica
  misc_feature (3)..(226): Homolog of NCBI NO: 18395177 NR Description: RNA recognition motif (RRM)-containing protein
  misc_feature (3)..(214): Homolog of NCBI NO: 34905758 NR Description: similar to RNA-binding protein
  misc_feature (3)..(186): Homolog of NCBI NO: 25518372 NR Description: hypothetical protein F19G10.13 - Arabidopsis
  misc_feature (1)..(237): Homolog of NCBI NO: 18394923 NR Description: RNA recognition motif (RRM)-containing protein
  misc_feature (3)..(214): Homolog of NCBI NO: 34905758 NR Description: similar to RNA-binding protein
  misc_feature (3)..(226): Homolog of NCBI NO: 18395177 NR Description: RNA recognition motif (RRM)-containing protein
  misc_feature (1)..(233): Homolog of NCBI NO: 34907334 NR Description: P0698A10.29 [Oryza sativa (japonica
  misc_feature (104)..(245): Homolog of NCBI NO: 30692876 NR Description: RRM-containing protein -related [Arabidopsis
  misc_feature (1)..(245): Homolog of NCBI NO: 14532532 NR Description: At1g33470/F10C21_14 [Arabidopsis thaliana]

SEQ ID NO: 48973 - protein, 142 aa, Arabidopsis thaliana; identical to SEQ ID NO: 39187
  peptide (1)..(142): Ceres Seq. ID no. 13489531
  misc_feature (1)..(142): Homolog of NCBI NO: 22330665 NR Description: RNA recognition motif (RRM)-containing protein
  misc_feature (1)..(134): Homolog of NCBI NO: 23505939 NR Description: At1g20880/F9H16_14 [Arabidopsis thaliana]
  misc_feature (1)..(134): Homolog of NCBI NO: 18394923 NR Description: RNA recognition motif (RRM)-containing protein
  misc_feature (1)..(134): Homolog of NCBI NO: 15010636 NR Description: At1g20880/F9H16_14 [Arabidopsis thaliana]
  misc_feature (1)..(83): Homolog of NCBI NO: 25518372 NR Description: hypothetical protein F19G10.13 - Arabidopsis
  misc_feature (1)..(111): Homolog of NCBI NO: 34905758 NR Description: similar to RNA-binding protein
  misc_feature (1)..(123): Homolog of NCBI NO: 18395177 NR Description: RNA recognition motif (RRM)-containing protein
  misc_feature (1)..(130): Homolog of NCBI NO: 34907334 NR Description: P0698A10.29 [Oryza sativa (japonica
  misc_feature (1)..(142): Homolog of NCBI NO: 30692876 NR Description: RRM-containing protein -related [Arabidopsis
  misc_feature (1)..(142): Homolog of NCBI NO: 14532532 NR Description: At1g33470/F10C21_14 [Arabidopsis thaliana]
  misc_feature (1)..(142): Homolog of NCBI NO: 22330665 NR Description: RNA recognition motif (RRM)-containing protein
  misc_feature (1)..(134): Homolog of NCBI NO: 23505939 NR Description: At1g20880/F9H16_14 [Arabidopsis thaliana]
  misc_feature (1)..(134): Homolog of NCBI NO: 18394923 NR Description: RNA recognition motif (RRM)-containing protein
  misc_feature (1)..(134): Homolog of NCBI NO: 15010636 NR Description: At1g20880/F9H16_14 [Arabidopsis thaliana]
  misc_feature (1)..(83): Homolog of NCBI NO: 25518372 NR Description: hypothetical protein F19G10.13 - Arabidopsis
  misc_feature (1)..(111): Homolog of NCBI NO: 34905758 NR Description: similar to RNA-binding protein
  misc_feature (1)..(123): Homolog of NCBI NO: 18395177 NR Description: RNA recognition motif (RRM)-containing protein
  misc_feature (1)..(130): Homolog of NCBI NO: 34907334 NR Description: P0698A10.29 [Oryza sativa (japonica
  misc_feature (1)..(142): Homolog of NCBI NO: 30692876 NR Description: RRM-containing protein -related [Arabidopsis
  misc_feature (1)..(142): Homolog of NCBI NO: 14532532 NR Description: At1g33470/F10C21_14 [Arabidopsis thaliana]

SEQ ID NO: 48974 - DNA, 1437 bp, Arabidopsis thaliana
  misc_feature (1)..(1437): Ceres Seq. ID no. 13579035
  misc_feature: MA Experiment ID: 20000227 Result: Up-regulated in Transcription
  misc_feature: MA Experiment 20000227 PARAMETER Experiment Name: At_Root-Tips-vs-Tops_P Parameter: Tissue Value: Root Tips vs. Root Tops
  misc_feature: MA Experiment ID: 20000234 Result: Up-regulated in Transcription
  misc_feature: MA Experiment 20000234 PARAMETER Experiment Name: At_Siliques_P Parameter: Age (day) Value: 21
  misc_feature: MA Experiment 20000234 PARAMETER Experiment Name: At_Siliques_P Parameter: Organism Value: A. thaliana
  misc_feature: MA Experiment 20000234 PARAMETER Experiment Name: At_Siliques_P Parameter: Plant Line Value: WS
  misc_feature: MA Experiment 20000234 PARAMETER Experiment Name: At_Siliques_P Parameter: Tissue Value: Less Than 5mm Siliques vs. Whole Plant
  misc_feature: MA Experiment ID: 20000235 Result: Up-regulated in Transcription
  misc_feature: MA Experiment 20000235 PARAMETER Experiment Name: At_Siliques_P Parameter: Age (day) Value: 21
  misc_feature: MA Experiment 20000235 PARAMETER Experiment Name: At_Siliques_P Parameter: Organism Value: A. thaliana
  misc_feature: MA Experiment 20000235 PARAMETER Experiment Name: At_Siliques_P Parameter: Plant Line Value: WS
  misc_feature: MA Experiment 20000235 PARAMETER Experiment Name: At_Siliques_P Parameter: Tissue Value: 5-10mm Siliques vs. Whole Plant
  misc_feature: MA Experiment ID: 20000264 Result: Up-regulated in Transcription
  misc_feature: MA Experiment 20000264 PARAMETER Experiment Name: At_Open_Flower_P Parameter: Age (day) Value: 21
  misc_feature: MA Experiment 20000264 PARAMETER Experiment Name: At_Open_Flower_P Parameter: Plant Line Value: WS
  misc_feature: MA Experiment 20000264 PARAMETER Experiment Name: At_Open_Flower_P Parameter: Tissue Value: Open Flower vs. Whole Plant
  misc_feature: MA Experiment ID: 20000265 Result: Up-regulated in Transcription
  misc_feature: MA Experiment 20000265 PARAMETER Experiment Name: At_Open_Flower_P Parameter: Age (day) Value: 21
  misc_feature: MA Experiment 20000265 PARAMETER Experiment Name: At_Open_Flower_P Parameter: Plant Line Value: WS
  misc_feature: MA Experiment 20000265 PARAMETER Experiment Name: At_Open_Flower_P Parameter: Tissue Value: Closed Flower vs. Whole Plant
  misc_feature: MA Experiment ID: 20000286 Result: Up-regulated in Transcription
  misc_feature: MA Experiment 20000286 PARAMETER Experiment Name: At_Open_Flower_P Parameter: Age (day) Value: 21
  misc_feature: MA Experiment 20000286 PARAMETER Experiment Name: At_Open_Flower_P Parameter: Plant Line Value: WS
  misc_feature: MA Experiment 20000286 PARAMETER Experiment Name: At_Open_Flower_P Parameter: Tissue Value: Half Open vs. Whole Plant
  misc_feature: MA Experiment ID: 20000439 Result: Down-regulated in Transcription
  misc_feature: MA Experiment 20000439 PARAMETER Experiment Name: At_Roots__P Parameter: Age (day) Value: 14 vs. 21
  misc_feature: MA Experiment 20000439 PARAMETER Experiment Name: At_Roots__P Parameter: Organism Value: A. thaliana
  misc_feature: MA Experiment 20000439 PARAMETER Experiment Name: At_Roots__P Parameter: Tissue Value: Roots vs. Whole Plant
  misc_feature: MA Experiment ID: 20000573 Result: Down-regulated in Transcription
  misc_feature: MA Experiment 20000573 PARAMETER Experiment Name: At_100uM_ABA_Mutants__P Parameter: Organism Value: A. thaliana
  misc_feature: MA Experiment 20000573 PARAMETER Experiment Name: At_100uM_ABA_Mutants__P Parameter: Plant Line Value: CS22 vs. Ler wt
  misc_feature: MA Experiment 20000573 PARAMETER Experiment Name: At_100uM_ABA_Mutants__P Parameter: Timepoint (hr) Value: N/A
  misc_feature: MA Experiment 20000573 PARAMETER Experiment Name: At_100uM_ABA_Mutants__P Parameter: Tissue Value: Whole Plant
  misc_feature: MA Experiment 20000573 PARAMETER Experiment Name: At_100uM_ABA_Mutants__P Parameter: Treatment Value: None
  misc_feature: MA Experiment ID: 20001248 Result: Down-regulated in Transcription
  misc_feature: MA Experiment 20001248 PARAMETER Experiment Name: At_Far-red-induction_P Parameter: Age (day) Value: 7
  misc_feature: MA Experiment 20001248 PARAMETER Experiment Name: At_Far-red-induction_P Parameter: Light Value: Far-red vs. White
  misc_feature: MA Experiment 20001248 PARAMETER Experiment Name: At_Far-red-induction_P Parameter: Organism Value: A. thaliana
  misc_feature: MA Experiment 20001248 PARAMETER Experiment Name: At_Far-red-induction_P Parameter: Plant Line Value: Columbia
  misc_feature: MA Experiment 20001248 PARAMETER Experiment Name: At_Far-red-induction_P Parameter: Timepoint (hr) Value: 4
  misc_feature: MA Experiment 20001248 PARAMETER Experiment Name: At_Far-red-induction_P Parameter: Tissue Value: Whole Plant
gaacacaaaagaaactctcacattctcaagagtttctttcttctttcaatggctttactaactttcttgccggagaacgcagaggcgccacaaaaacacaagccaacgtctagcaaacgaaagaaacgcgataatcccaccgaccaaacgcagacacagaaacataaaccgcagaaaccgaagaaagcagtacctccgaagcagccatcttcatgggaccaaatcaagaacctattgacttgcaaacaaatcgaagggtcaagagtccatgatccttccaagaactctcaatctggtccgtccatgacaactaacttatctccttccaagcttggctcgtcgtgcagctccatttgcagctttagagacgtggctcacggcaacactcgtgtggttcatagagctgatcactcaccagacgtaggtaactcggctactcctaactcggagactcggcttctgactcggaaacctggtcaacacggttcttcttcgtctcggtctcttacatctggctcaacgagatctaacgccagtgggagttacacgtcatcgtcaacgacttcgtttagagccatgcagttccgtaaactctccggatgttacgaatgtcacatgatcgttgacccgagcaggtatccgatttcgcctagggtttgtgcttgttcccaatgtggagaagttttccccaagcttgaaagcttagagcttcatcaagcagttcgtcacgcagtttcggagttaggtccggaggattcgggtcgaaacatagtggagatcatattcaaatcaagctggcttaaaaaagacagtcccatctgtcagatcgaacggatattaaaagtccacaacactcaacgtacgatccaacggtttgaggattgccgagacgcagtgaaggcgcgtgcacttcaagcaaccagaaaagatgctcgttgtgccgccgacggcaacgagctcttacgttttcactgcaccactctcacttgttcactcggagctcgtggctcttcttctctctgctctaacctccctgtttgtggcgtctgcaccgtgattcgccacggtttccaaggaaaatctggtggcggaggagccaacgtcgcaaacgccggtgtgaggacgacggcgagcagcggaagagctgatgatttgctgaggtgtagcgatgatgcgaggagagtgatgcttgtgtgccgtgtgatcgctgggagagttaagcgagttgatttaccggcggcggatgcttcggctacagcggagaagaagtcaacggtggaggataactcggtggttggagtttcttcgagtggtggtacgtttgactcggtggcggtcaatgctggagtttattcgaatcttgaggagcttgtggtttataacccgagagctatattaccttgcttcgtggttatttacaaagttttagaatcttga

SEQ ID NO: 48975 - protein, 478 aa, Arabidopsis thaliana
  peptide (1)..(478): Ceres Seq. ID no. 13579036
  misc_feature (220)..(243): Pfam Name: Zinc finger, C2H2 type Pfam Description: Zinc finger, C2H2 type
  misc_feature (221)..(474): Homolog of NCBI NO: 34910152 NR Description: B1070A12.19 [Oryza sativa (japonica
  misc_feature (57)..(444): Homolog of NCBI NO: 38346001 NR Description: OSJNBa0073L13.11 [Oryza sativa (japonica
  misc_feature (426)..(474): Homolog of NCBI NO: 18416951 NR Description: expressed protein [Arabidopsis thaliana]
  misc_feature (36)..(408): Homolog of NCBI NO: 18416951 NR Description: expressed protein [Arabidopsis thaliana]
  misc_feature (144)..(426): Homolog of NCBI NO: 38345520 NR Description: OSJNBa0039K24.23 [Oryza sativa (japonica
  misc_feature (144)..(435): Homolog of NCBI NO: 5777616 NR Description: CAA30374.1 protein [Oryza sativa]
  misc_feature (54)..(474): Homolog of NCBI NO: 15220992 NR Description: reverse transcriptase-related [Arabidopsis
  misc_feature (17)..(244): Homolog of NCBI NO: 26451258 NR Description: unknown protein [Arabidopsis thaliana]
  misc_feature (54)..(477): Homolog of NCBI NO: 9802582 NR Description: T2E6.3 [Arabidopsis thaliana]
  misc_feature (17)..(478): Homolog of NCBI NO: 15222333 NR Description: expressed protein [Arabidopsis thaliana]
EHKRNSHILKSFFLLSMALLTFLPENAEAPQKHKPTSSKRKKRDNPTDQTQTQKHKPQKPKKAVPPKQPSSWDQIKNLLTCKQIEGSRVHDPSKNSQSGPSMTTNLSPSKLGSSCSSICSFRDVAHGNTRVVHRADHSPDVGNSATPNSETRLLTRKPGQHGSSSSRSLTSGSTRSNASGSYTSSSTTSFRAMQFRKLSGCYECHMIVDPSRYPISPRVCACSQCGEVFPKLESLELHQAVRHAVSELGPEDSGRNIVEIIFKSSWLKKDSPICQIERILKVHNTQRTIQRFEDCRDAVKARALQATRKDARCAADGNELLRFHCTTLTCSLGARGSSSLCSNLPVCGVCTVIRHGFQGKSGGGGANVANAGVRTTASSGRADDLLRCSDDARRVMLVCRVIAGRVKRVDLPAADASATAEKKSTVEDNSVVGVSSSGGTFDSVAVNAGVYSNLEELVVYNPRAILPCFVVIYKVLES

SEQ ID NO: 48976 - protein, 462 aa, Arabidopsis thaliana
  peptide (1)..(462): Ceres Seq. ID no. 13579037
  misc_feature (204)..(227): Pfam Name: Zinc finger, C2H2 type Pfam Description: Zinc finger, C2H2 type
  misc_feature (205)..(458): Homolog of NCBI NO: 34910152 NR Description: B1070A12.19 [Oryza sativa (japonica
  misc_feature (41)..(428): Homolog of NCBI NO: 38346001 NR Description: OSJNBa0073L13.11 [Oryza sativa (japonica
  misc_feature (410)..(458): Homolog of NCBI NO: 18416951 NR Description: expressed protein [Arabidopsis thaliana]
  misc_feature (20)..(392): Homolog of NCBI NO: 18416951 NR Description: expressed protein [Arabidopsis thaliana]
  misc_feature (128)..(410): Homolog of NCBI NO: 38345520 NR Description: OSJNBa0039K24.23 [Oryza sativa (japonica
  misc_feature (128)..(419): Homolog of NCBI NO: 5777616 NR Description: CAA30374.1 protein [Oryza sativa]
  misc_feature (38)..(458): Homolog of NCBI NO: 15220992 NR Description: reverse transcriptase-related [Arabidopsis
  misc_feature (1)..(228): Homolog of NCBI NO: 26451258 NR Description: unknown protein [Arabidopsis thaliana]
  misc_feature (38)..(461): Homolog of NCBI NO: 9802582 NR Description: T2E6.3 [Arabidopsis thaliana]
  misc_feature (1)..(462): Homolog of NCBI NO: 15222333 NR Description: expressed protein [Arabidopsis thaliana]
MALLTFLPENAEAPQKHKPTSSKRKKRDNPTDQTQTQKHKPQKPKKAVPPKQPSSWDQIKNLLTCKQIEGSRVHDPSKNSQSGPSMTTNLSPSKLGSSCSSICSFRDVAHGNTRVVHRADHSPDVGNSATPNSETRLLTRKPGQHGSSSSRSLTSGSTRSNASGSYTSSSTTSFRAMQFRKLSGCYECHMIVDPSRYPISPRVCACSQCGEVFPKLESLELHQAVRHAVSELGPEDSGRNIVEIIFKSSWLKKDSPICQIERILKVHNTQRTIQRFEDCRDAVKARALQATRKDARCAADGNELLRFHCTTLTCSLGARGSSSLCSNLPVCGVCTVIRHGFQGKSGGGGANVANAGVRTTASSGRADDLLRCSDDARRVMLVCRVIAGRVKRVDLPAADASATAEKKSTVEDNSVVGVSSSGGTFDSVAVNAGVYSNLEELVVYNPRAILPCFVVIYKVLES

SEQ ID NO: 48977 - protein, 377 aa, Arabidopsis thaliana
  peptide (1)..(377): Ceres Seq. ID no. 13579038
  misc_feature (119)..(142): Pfam Name: Zinc finger, C2H2 type Pfam Description: Zinc finger, C2H2 type
  misc_feature (120)..(373): Homolog of NCBI NO: 34910152 NR Description: B1070A12.19 [Oryza sativa (japonica
  misc_feature (1)..(343): Homolog of NCBI NO: 38346001 NR Description: OSJNBa0073L13.11 [Oryza sativa (japonica
  misc_feature (325)..(373): Homolog of NCBI NO: 18416951 NR Description: expressed protein [Arabidopsis thaliana]
  misc_feature (1)..(307): Homolog of NCBI NO: 18416951 NR Description: expressed protein [Arabidopsis thaliana]
  misc_feature (43)..(325): Homolog of NCBI NO: 38345520 NR Description: OSJNBa0039K24.23 [Oryza sativa (japonica
  misc_feature (43)..(334): Homolog of NCBI NO: 5777616 NR Description: CAA30374.1 protein [Oryza sativa]
  misc_feature (1)..(373): Homolog of NCBI NO: 15220992 NR Description: reverse transcriptase-related [Arabidopsis
  misc_feature (1)..(143): Homolog of NCBI NO: 26451258 NR Description: unknown protein [Arabidopsis thaliana]
  misc_feature (1)..(376): Homolog of NCBI NO: 9802582 NR Description: T2E6.3 [Arabidopsis thaliana]
  misc_feature (1)..(377): Homolog of NCBI NO: 15222333 NR Description: expressed protein [Arabidopsis thaliana]
MTTNLSPSKLGSSCSSICSFRDVAHGNTRVVHRADHSPDVGNSATPNSETRLLTRKPGQHGSSSSRSLTSGSTRSNASGSYTSSSTTSFRAMQFRKLSGCYECHMIVDPSRYPISPRVCACSQCGEVFPKLESLELHQAVRHAVSELGPEDSGRNIVEIIFKSSWLKKDSPICQIERILKVHNTQRTIQRFEDCRDAVKARALQATRKDARCAADGNELLRFHCTTLTCSLGARGSSSLCSNLPVCGVCTVIRHGFQGKSGGGGANVANAGVRTTASSGRADDLLRCSDDARRVMLVCRVIAGRVKRVDLPAADASATAEKKSTVEDNSVVGVSSSGGTFDSVAVNAGVYSNLEELVVYNPRAILPCFVVIYKVLES

SEQ ID NO: 48978 - DNA, 2039 bp, Arabidopsis thaliana
  misc_feature (1)..(2039): Ceres Seq. ID no. 12575840
  misc_feature: MA Experiment ID: 20000169 Result: Up-regulated in Transcription
  misc_feature: MA Experiment 20000169 PARAMETER Experiment Name: At_100uM_ABA_P Parameter: Age (day) Value: 14
  misc_feature: MA Experiment 20000169 PARAMETER Experiment Name: At_100uM_ABA_P Parameter: Organism Value: A. thaliana
  misc_feature: MA Experiment 20000169 PARAMETER Experiment Name: At_100uM_ABA_P Parameter: Plant Line Value: WS
  misc_feature: MA Experiment 20000169 PARAMETER Experiment Name: At_100uM_ABA_P Parameter: Timepoint (hr) Value: 6
  misc_feature: MA Experiment 20000169 PARAMETER Experiment Name: At_100uM_ABA_P Parameter: Tissue Value: Aerial
  misc_feature: MA Experiment 20000169 PARAMETER Experiment Name: At_100uM_ABA_P Parameter: Treatment Value: 100uM ABA vs. No Treatment
  misc_feature: MA Experiment ID: 20000182 Result: Up-regulated in Transcription
  misc_feature: MA Experiment 20000182 PARAMETER Experiment Name: At_2mM_SA_P Parameter: Age (day) Value: 14
  misc_feature: MA Experiment 20000182 PARAMETER Experiment Name: At_2mM_SA_P Parameter: Organism Value: A. thaliana
  misc_feature: MA Experiment 20000182 PARAMETER Experiment Name: At_2mM_SA_P Parameter: Plant Line Value: WS
  misc_feature: MA Experiment 20000182 PARAMETER Experiment Name: At_2mM_SA_P Parameter: Timepoint (hr) Value: 6
  misc_feature: MA Experiment 20000182 PARAMETER Experiment Name: At_2mM_SA_P Parameter: Tissue Value: Aerial
  misc_feature: MA Experiment 20000182 PARAMETER Experiment Name: At_2mM_SA_P Parameter: Treatment Value: 2mM SA vs. No Treatment
  misc_feature: MA Experiment ID: 20000184 Result: Down-regulated in Transcription
  misc_feature: MA Experiment 20000184 PARAMETER Experiment Name: At_Shoots__P Parameter: Age (day) Value: 7
  misc_feature: MA Experiment 20000184 PARAMETER Experiment Name: At_Shoots__P Parameter: Tissue Value: Shoots vs. Whole Plant
  misc_feature: MA Experiment ID: 20000185 Result: Up-regulated in Transcription
  misc_feature: MA Experiment 20000185 PARAMETER Experiment Name: At_Roots__P Parameter: Age (day) Value: 7 vs. 21
  misc_feature: MA Experiment 20000185 PARAMETER Experiment Name: At_Roots__P Parameter: Organism Value: A. thaliana
  misc_feature: MA Experiment 20000185 PARAMETER Experiment Name: At_Roots__P Parameter: Tissue Value: Roots vs. Whole Plant
  misc_feature: MA Experiment ID: 20000227 Result: Down-regulated in Transcription
  misc_feature: MA Experiment 20000227 PARAMETER Experiment Name: At_Root-Tips-vs-Tops_P Parameter: Tissue Value: Root Tips vs. Root Tops
  misc_feature: MA Experiment ID: 20000234 Result: Down-regulated in Transcription
  misc_feature: MA Experiment 20000234 PARAMETER Experiment Name: At_Siliques_P Parameter: Age (day) Value: 21
  misc_feature: MA Experiment 20000234 PARAMETER Experiment Name: At_Siliques_P Parameter: Organism Value: A. thaliana
  misc_feature: MA Experiment 20000234 PARAMETER Experiment Name: At_Siliques_P Parameter: Plant Line Value: WS
  misc_feature: MA Experiment 20000234 PARAMETER Experiment Name: At_Siliques_P Parameter: Tissue Value: Less Than 5mm Siliques vs. Whole Plant
  misc_feature: MA Experiment ID: 20000235 Result: Down-regulated in Transcription
  misc_feature: MA Experiment 20000235 PARAMETER Experiment Name: At_Siliques_P Parameter: Age (day) Value: 21
  misc_feature: MA Experiment 20000235 PARAMETER Experiment Name: At_Siliques_P Parameter: Organism Value: A. thaliana
  misc_feature: MA Experiment 20000235 PARAMETER Experiment Name: At_Siliques_P Parameter: Plant Line Value: WS
  misc_feature: MA Experiment 20000235 PARAMETER Experiment Name: At_Siliques_P Parameter: Tissue Value: 5-10mm Siliques vs. Whole Plant
  misc_feature: MA Experiment ID: 20000265 Result: Down-regulated in Transcription
  misc_feature: MA Experiment 20000265 PARAMETER Experiment Name: At_Open_Flower_P Parameter: Age (day) Value: 21
  misc_feature: MA Experiment 20000265 PARAMETER Experiment Name: At_Open_Flower_P Parameter: Plant Line Value: WS
  misc_feature: MA Experiment 20000265 PARAMETER Experiment Name: At_Open_Flower_P Parameter: Tissue Value: Closed Flower vs. Whole Plant
  misc_feature: MA Experiment ID: 20000286 Result: Down-regulated in Transcription
  misc_feature: MA Experiment 20000286 PARAMETER Experiment Name: At_Open_Flower_P Parameter: Age (day) Value: 21
  misc_feature: MA Experiment 20000286 PARAMETER Experiment Name: At_Open_Flower_P Parameter: Plant Line Value: WS
  misc_feature: MA Experiment 20000286 PARAMETER Experiment Name: At_Open_Flower_P Parameter: Tissue Value: Half Open vs. Whole Plant
  misc_feature: MA Experiment ID: 20000439 Result: Up-regulated in Transcription
  misc_feature: MA Experiment 20000439 PARAMETER Experiment Name: At_Roots__P Parameter: Age (day) Value: 14 vs. 21
  misc_feature: MA Experiment 20000439 PARAMETER Experiment Name: At_Roots__P Parameter: Organism Value: A. thaliana
  misc_feature: MA Experiment 20000439 PARAMETER Experiment Name: At_Roots__P Parameter: Tissue Value: Roots vs. Whole Plant
  misc_feature: MA Experiment ID: 20000496 Result: Up-regulated in Transcription
  misc_feature: MA Experiment 20000496 PARAMETER Experiment Name: At_Guard_Cells_P Parameter: Harvest Date Value: 7/19/2002
  misc_feature: MA Experiment 20000496 PARAMETER Experiment Name: At_Guard_Cells_P Parameter: Organism Value: Canola
  misc_feature: MA Experiment 20000496 PARAMETER Experiment Name: At_Guard_Cells_P Parameter: Tissue Value: Guard Cells vs. Leaves
  misc_feature: MA Experiment ID: 20000573 Result: Up-regulated in Transcription
  misc_feature: MA Experiment 20000573 PARAMETER Experiment Name: At_100uM_ABA_Mutants__P Parameter: Organism Value: A. thaliana
  misc_feature: MA Experiment 20000573 PARAMETER Experiment Name: At_100uM_ABA_Mutants__P Parameter: Plant Line Value: CS22 vs. Ler wt
  misc_feature: MA Experiment 20000573 PARAMETER Experiment Name: At_100uM_ABA_Mutants__P Parameter: Timepoint (hr) Value: N/A
  misc_feature: MA Experiment 20000573 PARAMETER Experiment Name: At_100uM_ABA_Mutants__P Parameter: Tissue Value: Whole Plant
  misc_feature: MA Experiment 20000573 PARAMETER Experiment Name: At_100uM_ABA_Mutants__P Parameter: Treatment Value: None
  misc_feature: MA Experiment ID: 20000574 Result: Up-regulated in Transcription
  misc_feature: MA Experiment 20000574 PARAMETER Experiment Name: At_100uM_ABA_Mutants__P Parameter: Organism Value: A. thaliana
  misc_feature: MA Experiment 20000574 PARAMETER Experiment Name: At_100uM_ABA_Mutants__P Parameter: Plant Line Value: CS23 vs. Ler wt
  misc_feature: MA Experiment 20000574 PARAMETER Experiment Name: At_100uM_ABA_Mutants__P Parameter: Timepoint (hr) Value: N/A
  misc_feature: MA Experiment 20000574 PARAMETER Experiment Name: At_100uM_ABA_Mutants__P Parameter: Tissue Value: Whole Plant
  misc_feature: MA Experiment 20000574 PARAMETER Experiment Name: At_100uM_ABA_Mutants__P Parameter: Treatment Value: None
  misc_feature: MA Experiment ID: 20000794 Result: Up-regulated in Transcription
  misc_feature: MA Experiment 20000794 PARAMETER Experiment Name: At_Petals_P Parameter: Age (day) Value: 23-25 days
  misc_feature: MA Experiment 20000794 PARAMETER Experiment Name: At_Petals_P Parameter: Plant Line Value: WS
  misc_feature: MA Experiment 20000794 PARAMETER Experiment Name: At_Petals_P Parameter: Tissue Value: Petals vs. Whole plant
  misc_feature: MA Experiment ID: 20001451 Result: Up-regulated in Transcription
  misc_feature: MA Experiment 20001451 PARAMETER Experiment Name: At_Far-red-induction_P Parameter: Age (day) Value: 7
  misc_feature: MA Experiment 20001451 PARAMETER Experiment Name: At_Far-red-induction_P Parameter: Light Value: Far-red vs. White
  misc_feature: MA Experiment 20001451 PARAMETER Experiment Name: At_Far-red-induction_P Parameter: Organism Value: A. thaliana
  misc_feature: MA Experiment 20001451 PARAMETER Experiment Name: At_Far-red-induction_P Parameter: Plant Line Value: Columbia
  misc_feature: MA Experiment 20001451 PARAMETER Experiment Name: At_Far-red-induction_P Parameter: Timepoint (hr) Value: 24
  misc_feature: MA Experiment 20001451 PARAMETER Experiment Name: At_Far-red-induction_P Parameter: Tissue Value: Whole Plant
  misc_feature: MA Experiment ID: 20001904 Result: Up-regulated in Transcription
  misc_feature: MA Experiment 20001904 PARAMETER Experiment Name: At_Drought_Reproduction_P Parameter: Age (day) Value: 37
  misc_feature: MA Experiment 20001904 PARAMETER Experiment Name: At_Drought_Reproduction_P Parameter: Organism Value: A. thaliana
  misc_feature: MA Experiment 20001904 PARAMETER Experiment Name: At_Drought_Reproduction_P Parameter: Plant Line Value: WS
  misc_feature: MA Experiment 20001904 PARAMETER Experiment Name: At_Drought_Reproduction_P Parameter: Timepoint (day) Value: 7
  misc_feature: MA Experiment 20001904 PARAMETER Experiment Name: At_Drought_Reproduction_P Parameter: Tissue Value: Rosettes
  misc_feature: MA Experiment 20001904 PARAMETER Experiment Name: At_Drought_Reproduction_P Parameter: Treatment Value: Drought vs. No Drought
  misc_feature: MA Experiment ID: 20001905 Result: Up-regulated in Transcription
  misc_feature: MA Experiment 20001905 PARAMETER Experiment Name: At_Drought_Reproduction_P Parameter: Age (day) Value: 40
  misc_feature: MA Experiment 20001905 PARAMETER Experiment Name: At_Drought_Reproduction_P Parameter: Organism Value: A. thaliana
  misc_feature: MA Experiment 20001905 PARAMETER Experiment Name: At_Drought_Reproduction_P Parameter: Plant Line Value: WS
  misc_feature: MA Experiment 20001905 PARAMETER Experiment Name: At_Drought_Reproduction_P Parameter: Timepoint (day) Value: 10
  misc_feature: MA Experiment 20001905 PARAMETER Experiment Name: At_Drought_Reproduction_P Parameter: Tissue Value: Rosettes
  misc_feature: MA Experiment 20001905 PARAMETER Experiment Name: At_Drought_Reproduction_P Parameter: Treatment Value: Drought vs. No Drought
  misc_feature: MA Experiment ID: 20001906 Result: Up-regulated in Transcription
  misc_feature: MA Experiment 20001906 PARAMETER Experiment Name: At_Drought_Reproduction_P Parameter: Age (day) Value: 35
  misc_feature: MA Experiment 20001906 PARAMETER Experiment Name: At_Drought_Reproduction_P Parameter: Organism Value: A. thaliana
  misc_feature: MA Experiment 20001906 PARAMETER Experiment Name: At_Drought_Reproduction_P Parameter: Plant Line Value: WS
  misc_feature: MA Experiment 20001906 PARAMETER Experiment Name: At_Drought_Reproduction_P Parameter: Timepoint (day) Value: 5
  misc_feature: MA Experiment 20001906 PARAMETER Experiment Name: At_Drought_Reproduction_P Parameter: Tissue Value: Siliques
  misc_feature: MA Experiment 20001906 PARAMETER Experiment Name: At_Drought_Reproduction_P Parameter: Treatment Value: Drought vs. No Drought
  misc_feature: MA Experiment ID: 20001908 Result: Up-regulated in Transcription
  misc_feature: MA Experiment 20001908 PARAMETER Experiment Name: At_Drought_Reproduction_P Parameter: Age (day) Value: 40
  misc_feature: MA Experiment 20001908 PARAMETER Experiment Name: At_Drought_Reproduction_P Parameter: Organism Value: A. thaliana
  misc_feature: MA Experiment 20001908 PARAMETER Experiment Name: At_Drought_Reproduction_P Parameter: Plant Line Value: WS
  misc_feature: MA Experiment 20001908 PARAMETER Experiment Name: At_Drought_Reproduction_P Parameter: Timepoint (day) Value: 10
  misc_feature: MA Experiment 20001908 PARAMETER Experiment Name: At_Drought_Reproduction_P Parameter: Tissue Value: Siliques
  misc_feature: MA Experiment 20001908 PARAMETER Experiment Name: At_Drought_Reproduction_P Parameter: Treatment Value: Drought vs. No Drought
  misc_feature: MA Experiment ID: 20001910 Result: Up-regulated in Transcription
  misc_feature: MA Experiment 20001910 PARAMETER Experiment Name: At_Drought_Reproduction_P Parameter: Age (day) Value: 37
  misc_feature: MA Experiment 20001910 PARAMETER Experiment Name: At_Drought_Reproduction_P Parameter: Organism Value: A. thaliana
  misc_feature: MA Experiment 20001910 PARAMETER Experiment Name: At_Drought_Reproduction_P Parameter: Plant Line Value: WS
  misc_feature: MA Experiment 20001910 PARAMETER Experiment Name: At_Drought_Reproduction_P Parameter: Timepoint (day) Value: 7
  misc_feature: MA Experiment 20001910 PARAMETER Experiment Name: At_Drought_Reproduction_P Parameter: Tissue Value: Flowers
  misc_feature: MA Experiment 20001910 PARAMETER Experiment Name: At_Drought_Reproduction_P Parameter: Treatment Value: Drought vs. No Drought
  misc_feature: MA Experiment ID: 20001911 Result: Up-regulated in Transcription
  misc_feature: MA Experiment 20001911 PARAMETER Experiment Name: At_Drought_Reproduction_P Parameter: Age (day) Value: 40
  misc_feature: MA Experiment 20001911 PARAMETER Experiment Name: At_Drought_Reproduction_P Parameter: Organism Value: A. thaliana
  misc_feature: MA Experiment 20001911 PARAMETER Experiment Name: At_Drought_Reproduction_P Parameter: Plant Line Value: WS
  misc_feature: MA Experiment 20001911 PARAMETER Experiment Name: At_Drought_Reproduction_P Parameter: Timepoint (day) Value: 10
  misc_feature: MA Experiment 20001911 PARAMETER Experiment Name: At_Drought_Reproduction_P Parameter: Tissue Value: Flowers
  misc_feature: MA Experiment 20001911 PARAMETER Experiment Name: At_Drought_Reproduction_P Parameter: Treatment Value: Drought vs. No Drought
aaattgtctttattctttttatcccaaatgggtgattgacgccaacgactgttcaacatattttctgctgacgcttctttaatgaagtagcacgaagaagtaaacaggacgacttttggccaccggaaaatttctctgttataaaaacgaaagtctgtgtcctcttaaacatttttgggatcatcaatcggtttttggtcaaccatgaatatgaatcaagttgcagagtatgtggaaactgatccaactggtcgctatggacgttttgcagaaattcttggaaggggagcgatgaagacagtgtacaaagcaatcgacgagaagctgggaatagaagtagcatggagccaggtgaagcttaaggaggttctgcgttcctctgttgatctacagaggctttactccgaggttcatctcctcagcactctcaaccacaaatccatcattcgtttctacacttcctggatcgatgttcataaccacactctcaacttcatcaccgagttgttcacttcagggaccctccgacaatacaaaaataagtacttgcggatagatatccgagcaatcaagtcctgggctcggcaaatcttggaagggctagtttatctccacgagcacgaccctcctgttatccatagagaccttaagtgtgataatatctttgtgaatgggcatcttggacaagtcaaaattggtgatcttggtcttgcaagaatgctgcgggactgccactcggcccatagcatcattggcactcctgagttcatggcaccagaattatatgaggagaactataatgaactcattgacgtatattcctttggtatgtgctttttggagatgatcacctctgagttcccgtatagtgagtgcaaccatccggcacagatttacaagaaagttgttgggggaaagctaccaggagcattttacagagttggagacatcgaggcacagaggttcatcgggaaatgcctcgtgtctgcctcaaagagagtatcagcaaaagaactattgcaagatccatttcttgcctccgatgagtcctggatggtatacacgagcggtgctgggaatccaaagcccttcttgaacgagaatgaaatggacacactgaagttggaagatgatgagttaaggaccgagatgtccatcgctgggaagctgggcgctgaagataacaaaatcgatctggaagtacaaatcgcatatgataatggtctggccaataatgtattctttccctttgacatcatgaatgatacttccattgatgttgcaaaggagatggtaaaagaactcgaaattatagattgggagccagtcgagattgctaaaatgattgatggagcgatttcttctttggtgtctgattggaagtatgaggaagatgatgaaacccctcatgatcatcatcgtcatcgtaccgattcttttcactcttcttcctcgcacgcgtcatcttcccaagcttcactctcgaactatatggctcgaggccttcaagattgggtacaagatgatttacacgatgagacgtattctcagagttcttcccattcagggtcttactccaacctcaactacatagctgttgatgagtacagctcccaatctcctgttatgagcagaactcacaacatgacgaggttttgccccgaagaaagctctcatctacagtcaggacaagccaacgcgtatgcagcttccagttcaactaacagaagcttggcttcagacaaccgcacacttacaaggaaccgatcacttgtagacgtgcagagacagttactgcaccggtcgccaggggaagaggctagaaaaagaagattgttcaaaactgttggagacgtagaaacagttgggtttcagtcaccttatgcggtttcacggaagccaccaagctcaaggcgctagcttctccagtattttaattactgtaatatataagtatactgtaaaaaacaagtttgctggttcaaaaatgtaaaaagtacatgtgtttaataaagttgttcaaagggtgtgtttgtgtt

SEQ ID NO: 48979 - protein, 571 aa, Arabidopsis thaliana
  peptide (1)..(571): Ceres Seq. ID no. 12575841
  misc_feature (19)..(277): Pfam Name: Protein kinase domain Pfam Description: Protein kinase domain
  misc_feature (296)..(393): Homolog of NCBI NO: 15229843 NR Description: putative mitogen activated protein kinase kinase
  misc_feature (7)..(281): Homolog of NCBI NO: 15229843 NR Description: putative mitogen activated protein kinase kinase
  misc_feature (308)..(435): Homolog of NCBI NO: 34393547 NR Description: mitogen activated protein kinase kinase
  misc_feature (8)..(292): Homolog of NCBI NO: 34393547 NR Description: mitogen activated protein kinase kinase
  misc_feature (308)..(460): Homolog of NCBI NO: 7489544 NR Description: probable mitogen activated protein kinase - rice
  misc_feature (8)..(292): Homolog of NCBI NO: 7489544 NR Description: probable mitogen activated protein kinase - rice
  misc_feature (9)..(489): Homolog of NCBI NO: 27542950 NR Description: mitogen-activated protein kinase [Triticum
  misc_feature (1)..(471): Homolog of NCBI NO: 30693513 NR Description: MAP kinase [Arabidopsis thaliana]
  misc_feature (1)..(471): Homolog of NCBI NO: 11358499 NR Description: MAP kinase - Arabidopsis thaliana
  misc_feature (1)..(571): Homolog of NCBI NO: 15237174 NR Description: MAP kinase
MNMNQVAEYVETDPTGRYGRFAEILGRGAMKTVYKAIDEKLGIEVAWSQVKLKEVLRSSVDLQRLYSEVHLLSTLNHKSIIRFYTSWIDVHNHTLNFITELFTSGTLRQYKNKYLRIDIRAIKSWARQILEGLVYLHEHDPPVIHRDLKCDNIFVNGHLGQVKIGDLGLARMLRDCHSAHSIIGTPEFMAPELYEENYNELIDVYSFGMCFLEMITSEFPYSECNHPAQIYKKVVGGKLPGAFYRVGDIEAQRFIGKCLVSASKRVSAKELLQDPFLASDESWMVYTSGAGNPKPFLNENEMDTLKLEDDELRTEMSIAGKLGAEDNKIDLEVQIAYDNGLANNVFFPFDIMNDTSIDVAKEMVKELEIIDWEPVEIAKMIDGAISSLVSDWKYEEDDETPHDHHRHRTDSFHSSSSHASSSQASLSNYMARGLQDWVQDDLHDETYSQSSSHSGSYSNLNYIAVDEYSSQSPVMSRTHNMTRFCPEESSHLQSGQANAYAASSSTNRSLASDNRTLTRNRSLVDVQRQLLHRSPGEEARKRRLFKTVGDVETVGFQSPYAVSRKPPSSRR

SEQ ID NO: 48980 - protein, 569 aa, Arabidopsis thaliana
  peptide (1)..(569): Ceres Seq. ID no. 12575842
  misc_feature (17)..(275): Pfam Name: Protein kinase domain Pfam Description: Protein kinase domain
  misc_feature (294)..(391): Homolog of NCBI NO: 15229843 NR Description: putative mitogen activated protein kinase kinase
  misc_feature (5)..(279): Homolog of NCBI NO: 15229843 NR Description: putative mitogen activated protein kinase kinase
  misc_feature (306)..(433): Homolog of NCBI NO: 34393547 NR Description: mitogen activated protein kinase kinase
  misc_feature (6)..(290): Homolog of NCBI NO: 34393547 NR Description: mitogen activated protein kinase kinase
  misc_feature (306)..(458): Homolog of NCBI NO: 7489544 NR Description: probable mitogen activated protein kinase - rice
  misc_feature (6)..(290): Homolog of NCBI NO: 7489544 NR Description: probable mitogen activated protein kinase - rice
  misc_feature (7)..(487): Homolog of NCBI NO: 27542950 NR Description: mitogen-activated protein kinase [Triticum
  misc_feature (1)..(469): Homolog of NCBI NO: 30693513 NR Description: MAP kinase [Arabidopsis thaliana]
  misc_feature (1)..(469): Homolog of NCBI NO: 11358499 NR Description: MAP kinase - Arabidopsis thaliana
  misc_feature (1)..(569): Homolog of NCBI NO: 15237174 NR Description: MAP kinase
MNQVAEYVETDPTGRYGRFAEILGRGAMKTVYKAIDEKLGIEVAWSQVKLKEVLRSSVDLQRLYSEVHLLSTLNHKSIIRFYTSWIDVHNHTLNFITELFTSGTLRQYKNKYLRIDIRAIKSWARQILEGLVYLHEHDPPVIHRDLKCDNIFVNGHLGQVKIGDLGLARMLRDCHSAHSIIGTPEFMAPELYEENYNELIDVYSFGMCFLEMITSEFPYSECNHPAQIYKKVVGGKLPGAFYRVGDIEAQRFIGKCLVSASKRVSAKELLQDPFLASDESWMVYTSGAGNPKPFLNENEMDTLKLEDDELRTEMSIAGKLGAEDNKIDLEVQIAYDNGLANNVFFPFDIMNDTSIDVAKEMVKELEIIDWEPVEIAKMIDGAISSLVSDWKYEEDDETPHDHHRHRTDSFHSSSSHASSSQASLSNYMARGLQDWVQDDLHDETYSQSSSHSGSYSNLNYIAVDEYSSQSPVMSRTHNMTRFCPEESSHLQSGQANAYAASSSTNRSLASDNRTLTRNRSLVDVQRQLLHRSPGEEARKRRLFKTVGDVETVGFQSPYAVSRKPPSSRR

SEQ ID NO: 48981 - protein, 542 aa, Arabidopsis thaliana
  peptide (1)..(542): Ceres Seq. ID no. 12575843
  misc_feature (1)..(248): Pfam Name: Protein kinase domain Pfam Description: Protein kinase domain
  misc_feature (267)..(364): Homolog of NCBI NO: 15229843 NR Description: putative mitogen activated protein kinase kinase
  misc_feature (1)..(252): Homolog of NCBI NO: 15229843 NR Description: putative mitogen activated protein kinase kinase
  misc_feature (279)..(406): Homolog of NCBI NO: 34393547 NR Description: mitogen activated protein kinase kinase
  misc_feature (1)..(263): Homolog of NCBI NO: 34393547 NR Description: mitogen activated protein kinase kinase
  misc_feature (279)..(431): Homolog of NCBI NO: 7489544 NR Description: probable mitogen activated protein kinase - rice
  misc_feature (1)..(263): Homolog of NCBI NO: 7489544 NR Description: probable mitogen activated protein kinase - rice
  misc_feature (1)..(460): Homolog of NCBI NO: 27542950 NR Description: mitogen-activated protein kinase [Triticum
  misc_feature (1)..(442): Homolog of NCBI NO: 30693513 NR Description: MAP kinase [Arabidopsis thaliana]
  misc_feature (1)..(442): Homolog of NCBI NO: 11358499 NR Description: MAP kinase - Arabidopsis thaliana
  misc_feature (1)..(542): Homolog of NCBI NO: 15237174 NR Description: MAP kinase
MKTVYKAIDEKLGIEVAWSQVKLKEVLRSSVDLQRLYSEVHLLSTLNHKSIIRFYTSWIDVHNHTLNFITELFTSGTLRQYKNKYLRIDIRAIKSWARQILEGLVYLHEHDPPVIHRDLKCDNIFVNGHLGQVKIGDLGLARMLRDCHSAHSIIGTPEFMAPELYEENYNELIDVYSFGMCFLEMITSEFPYSECNHPAQIYKKVVGGKLPGAFYRVGDIEAQRFIGKCLVSASKRVSAKELLQDPFLASDESWMVYTSGAGNPKPFLNENEMDTLKLEDDELRTEMSIAGKLGAEDNKIDLEVQIAYDNGLANNVFFPFDIMNDTSIDVAKEMVKELEIIDWEPVEIAKMIDGAISSLVSDWKYEEDDETPHDHHRHRTDSFHSSSSHASSSQASLSNYMARGLQDWVQDDLHDETYSQSSSHSGSYSNLNYIAVDEYSSQSPVMSRTHNMTRFCPEESSHLQSGQANAYAASSSTNRSLASDNRTLTRNRSLVDVQRQLLHRSPGEEARKRRLFKTVGDVETVGFQSPYAVSRKPPSSRR

SEQ ID NO: 48982 - DNA, 1803 bp, Arabidopsis thaliana
  misc_feature (1)..(1803): Ceres Seq. ID no. 12601153
  misc_feature: MA Experiment ID: 20000179 Result: Up-regulated in Transcription
  misc_feature: MA Experiment 20000179 PARAMETER Experiment Name: At_Germinating_Seeds_P Parameter: Age (hr) Value: 6 vs. 0
  misc_feature: MA Experiment 20000179 PARAMETER Experiment Name: At_Germinating_Seeds_P Parameter: Tissue Value: Germinating Seeds
  misc_feature: MA Experiment ID: 20000180 Result: Up-regulated in Transcription
  misc_feature: MA Experiment 20000180 PARAMETER Experiment Name: At_Germinating_Seeds_P Parameter: Age (hr) Value: 24 vs. 0
  misc_feature: MA Experiment 20000180 PARAMETER Experiment Name: At_Germinating_Seeds_P Parameter: Tissue Value: Germinating Seeds
  misc_feature: MA Experiment ID: 20000264 Result: Up-regulated in Transcription
  misc_feature: MA Experiment 20000264 PARAMETER Experiment Name: At_Open_Flower_P Parameter: Age (day) Value: 21
  misc_feature: MA Experiment 20000264 PARAMETER Experiment Name: At_Open_Flower_P Parameter: Plant Line Value: WS
  misc_feature: MA Experiment 20000264 PARAMETER Experiment Name: At_Open_Flower_P Parameter: Tissue Value: Open Flower vs. Whole Plant
  misc_feature: MA Experiment ID: 20000269 Result: Up-regulated in Transcription
  misc_feature: MA Experiment 20000269 PARAMETER Experiment Name: At_1mM_KNO3_L-vs-H_Roots_P Parameter: Age (day) Value: 7,10,12
  misc_feature: MA Experiment 20000269 PARAMETER Experiment Name: At_1mM_KNO3_L-vs-H_Roots_P Parameter: Organism Value: A. thaliana
  misc_feature: MA Experiment 20000269 PARAMETER Experiment Name: At_1mM_KNO3_L-vs-H_Roots_P Parameter: Plant Line Value: WS
  misc_feature: MA Experiment 20000269 PARAMETER Experiment Name: At_1mM_KNO3_L-vs-H_Roots_P Parameter: Timepoint (day) Value: 7,10,12
  misc_feature: MA Experiment 20000269 PARAMETER Experiment Name: At_1mM_KNO3_L-vs-H_Roots_P Parameter: Tissue Value: Roots
  misc_feature: MA Experiment 20000269 PARAMETER Experiment Name: At_1mM_KNO3_L-vs-H_Roots_P Parameter: Treatment Value: 1mM KNO3 vs. 50mM KNO3
  misc_feature: MA Experiment ID: 20000286 Result: Up-regulated in Transcription
  misc_feature: MA Experiment 20000286 PARAMETER Experiment Name: At_Open_Flower_P Parameter: Age (day) Value: 21
  misc_feature: MA Experiment 20000286 PARAMETER Experiment Name: At_Open_Flower_P Parameter: Plant Line Value: WS
  misc_feature: MA Experiment 20000286 PARAMETER Experiment Name: At_Open_Flower_P Parameter: Tissue Value: Half Open vs. Whole Plant
  misc_feature: MA Experiment ID: 20000436 Result: Up-regulated in Transcription
  misc_feature: MA Experiment 20000436 PARAMETER Experiment Name: At_Drought_P Parameter: Age (day) Value: 7
  misc_feature: MA Experiment 20000436 PARAMETER Experiment Name: At_Drought_P Parameter: Organism Value: A. thaliana
  misc_feature: MA Experiment 20000436 PARAMETER Experiment Name: At_Drought_P Parameter: Plant Line Value: WS
  misc_feature: MA Experiment 20000436 PARAMETER Experiment Name: At_Drought_P Parameter: Timepoint (hr) Value: 12
  misc_feature: MA Experiment 20000436 PARAMETER Experiment Name: At_Drought_P Parameter: Tissue Value: Whole Plant
  misc_feature: MA Experiment 20000436 PARAMETER Experiment Name: At_Drought_P Parameter: Treatment Value: Drought vs. No Drought
  misc_feature: MA Experiment ID: 20000439 Result: Up-regulated in Transcription
  misc_feature: MA Experiment 20000439 PARAMETER Experiment Name: At_Roots__P Parameter: Age (day) Value: 14 vs. 21
  misc_feature: MA Experiment 20000439 PARAMETER Experiment Name: At_Roots__P Parameter: Organism Value: A. thaliana
  misc_feature: MA Experiment 20000439 PARAMETER Experiment Name: At_Roots__P Parameter: Tissue Value: Roots vs. Whole Plant
  misc_feature: MA Experiment ID: 20000452 Result: Up-regulated in Transcription
  misc_feature: MA Experiment 20000452 PARAMETER Experiment Name: At_CS6879_Shoots-Roots_P Parameter: Age (day) Value: 14
  misc_feature: MA Experiment 20000452 PARAMETER Experiment Name: At_CS6879_Shoots-Roots_P Parameter: Organism Value: A. thaliana
  misc_feature: MA Experiment 20000452 PARAMETER Experiment Name: At_CS6879_Shoots-Roots_P Parameter: Plant Line Value: CS6879 vs. WS
  misc_feature: MA Experiment 20000452 PARAMETER Experiment Name: At_CS6879_Shoots-Roots_P Parameter: Tissue Value: Shoots
  misc_feature: MA Experiment ID: 20000527 Result: Down-regulated in Transcription
  misc_feature: MA Experiment 20000527 PARAMETER Experiment Name: At_10percent_PEG_P Parameter: Age (day) Value: 20
  misc_feature: MA Experiment 20000527 PARAMETER Experiment Name: At_10percent_PEG_P Parameter: Organism Value: A. thaliana
  misc_feature: MA Experiment 20000527 PARAMETER Experiment Name: At_10percent_PEG_P Parameter: Plant Line Value: WS
  misc_feature: MA Experiment 20000527 PARAMETER Experiment Name: At_10percent_PEG_P Parameter: Timepoint (day) Value: 20
  misc_feature: MA Experiment 20000527 PARAMETER Experiment Name: At_10percent_PEG_P Parameter: Tissue Value: Whole Plant
  misc_feature: MA Experiment 20000527 PARAMETER Experiment Name: At_10percent_PEG_P Parameter: Treatment Value: 10percent PEG vs. No Treatment
  misc_feature: MA Experiment ID: 20000573 Result: Down-regulated in Transcription
  misc_feature: MA Experiment 20000573 PARAMETER Experiment Name: At_100uM_ABA_Mutants__P Parameter: Organism Value: A. thaliana
  misc_feature: MA Experiment 20000573 PARAMETER Experiment Name: At_100uM_ABA_Mutants__P Parameter: Plant Line Value: CS22 vs. Ler wt
  misc_feature: MA Experiment 20000573 PARAMETER Experiment Name: At_100uM_ABA_Mutants__P Parameter: Timepoint (hr) Value: N/A
  misc_feature: MA Experiment 20000573 PARAMETER Experiment Name: At_100uM_ABA_Mutants__P Parameter: Tissue Value: Whole Plant
  misc_feature: MA Experiment 20000573 PARAMETER Experiment Name: At_100uM_ABA_Mutants__P Parameter: Treatment Value: None
  misc_feature: MA Experiment ID: 20000574 Result: Down-regulated in Transcription
  misc_feature: MA Experiment 20000574 PARAMETER Experiment Name: At_100uM_ABA_Mutants__P Parameter: Organism Value: A. thaliana
  misc_feature: MA Experiment 20000574 PARAMETER Experiment Name: At_100uM_ABA_Mutants__P Parameter: Plant Line Value: CS23 vs. Ler wt
  misc_feature: MA Experiment 20000574 PARAMETER Experiment Name: At_100uM_ABA_Mutants__P Parameter: Timepoint (hr) Value: N/A
  misc_feature: MA Experiment 20000574 PARAMETER Experiment Name: At_100uM_ABA_Mutants__P Parameter: Tissue Value: Whole Plant
  misc_feature: MA Experiment 20000574 PARAMETER Experiment Name: At_100uM_ABA_Mutants__P Parameter: Treatment Value: None
  misc_feature: MA Experiment ID: 20000794 Result: Up-regulated in Transcription
  misc_feature: MA Experiment 20000794 PARAMETER Experiment Name: At_Petals_P Parameter: Age (day) Value: 23-25 days
  misc_feature: MA Experiment 20000794 PARAMETER Experiment Name: At_Petals_P Parameter: Plant Line Value: WS
  misc_feature: MA Experiment 20000794 PARAMETER Experiment Name: At_Petals_P Parameter: Tissue Value: Petals vs. Whole plant
  misc_feature: MA Experiment ID: 20001247 Result: Down-regulated in Transcription
  misc_feature: MA Experiment 20001247 PARAMETER Experiment Name: At_Far-red-induction_P Parameter: Age (day) Value: 7
  misc_feature: MA Experiment 20001247 PARAMETER Experiment Name: At_Far-red-induction_P Parameter: Light Value: Far-red vs. White
  misc_feature: MA Experiment 20001247 PARAMETER Experiment Name: At_Far-red-induction_P Parameter: Organism Value: A. thaliana
  misc_feature: MA Experiment 20001247 PARAMETER Experiment Name: At_Far-red-induction_P Parameter: Plant Line Value: Columbia
  misc_feature: MA Experiment 20001247 PARAMETER Experiment Name: At_Far-red-induction_P Parameter: Timepoint (hr) Value: 1
  misc_feature: MA Experiment 20001247 PARAMETER Experiment Name: At_Far-red-induction_P Parameter: Tissue Value: Whole Plant
  misc_feature: MA Experiment ID: 20001248 Result: Down-regulated in Transcription
  misc_feature: MA Experiment 20001248 PARAMETER Experiment Name: At_Far-red-induction_P Parameter: Age (day) Value: 7
  misc_feature: MA Experiment 20001248 PARAMETER Experiment Name: At_Far-red-induction_P Parameter: Light Value: Far-red vs. White
  misc_feature: MA Experiment 20001248 PARAMETER Experiment Name: At_Far-red-induction_P Parameter: Organism Value: A. thaliana
  misc_feature: MA Experiment 20001248 PARAMETER Experiment Name: At_Far-red-induction_P Parameter: Plant Line Value: Columbia
  misc_feature: MA Experiment 20001248 PARAMETER Experiment Name: At_Far-red-induction_P Parameter: Timepoint (hr) Value: 4
  misc_feature: MA Experiment 20001248 PARAMETER Experiment Name: At_Far-red-induction_P Parameter: Tissue Value: Whole Plant
  misc_feature: MA Experiment ID: 20001450 Result: Down-regulated in Transcription
  misc_feature: MA Experiment 20001450 PARAMETER Experiment Name: At_Far-red-induction_P Parameter: Age (day) Value: 7
  misc_feature: MA Experiment 20001450 PARAMETER Experiment Name: At_Far-red-induction_P Parameter: Light Value: Far-red vs. White
  misc_feature: MA Experiment 20001450 PARAMETER Experiment Name: At_Far-red-induction_P Parameter: Organism Value: A. thaliana
  misc_feature: MA Experiment 20001450 PARAMETER Experiment Name: At_Far-red-induction_P Parameter: Plant Line Value: Columbia
  misc_feature: MA Experiment 20001450 PARAMETER Experiment Name: At_Far-red-induction_P Parameter: Timepoint (hr) Value: 8
  misc_feature: MA Experiment 20001450 PARAMETER Experiment Name: At_Far-red-induction_P Parameter: Tissue Value: Whole Plant
  misc_feature: MA Experiment ID: 20001554 Result: Up-regulated in Transcription
  misc_feature: MA Experiment 20001554 PARAMETER Experiment Name: At_Drought_Soil_Dry_P Parameter: Age (day) Value: 21
  misc_feature: MA Experiment 20001554 PARAMETER Experiment Name: At_Drought_Soil_Dry_P Parameter: Organism Value: A. thaliana
  misc_feature: MA Experiment 20001554 PARAMETER Experiment Name: At_Drought_Soil_Dry_P Parameter: Plant Line Value: WS
  misc_feature: MA Experiment 20001554 PARAMETER Experiment Name: At_Drought_Soil_Dry_P Parameter: Post Timepoint (hr) Value: None
  misc_feature: MA Experiment 20001554 PARAMETER Experiment Name: At_Drought_Soil_Dry_P Parameter: Post-Treatment Value: None
  misc_feature: MA Experiment 20001554 PARAMETER Experiment Name: At_Drought_Soil_Dry_P Parameter: Timepoint (day) Value: 7
  misc_feature: MA Experiment 20001554 PARAMETER Experiment Name: At_Drought_Soil_Dry_P Parameter: Treatment Value: Drought vs. No Drought
  misc_feature: MA Experiment ID: 20001560 Result: Down-regulated in Transcription
  misc_feature: MA Experiment 20001560 PARAMETER Experiment Name: At_Drought_Soil_Dry_P Parameter: Age (day) Value: 28
  misc_feature: MA Experiment 20001560 PARAMETER Experiment Name: At_Drought_Soil_Dry_P Parameter: Organism Value: A. thaliana
  misc_feature: MA Experiment 20001560 PARAMETER Experiment Name: At_Drought_Soil_Dry_P Parameter: Plant Line Value: WS
  misc_feature: MA Experiment 20001560 PARAMETER Experiment Name: At_Drought_Soil_Dry_P Parameter: Post Timepoint (hr) Value: None
  misc_feature: MA Experiment 20001560 PARAMETER Experiment Name: At_Drought_Soil_Dry_P Parameter: Post-Treatment Value: None
  misc_feature: MA Experiment 20001560 PARAMETER Experiment Name: At_Drought_Soil_Dry_P Parameter: Timepoint (day) Value: 14
  misc_feature: MA Experiment 20001560 PARAMETER Experiment Name: At_Drought_Soil_Dry_P Parameter: Treatment Value: Drought vs. No Drought
  misc_feature: MA Experiment ID: 20001904 Result: Up-regulated in Transcription
  misc_feature: MA Experiment 20001904 PARAMETER Experiment Name: At_Drought_Reproduction_P Parameter: Age (day) Value: 37
  misc_feature: MA Experiment 20001904 PARAMETER Experiment Name: At_Drought_Reproduction_P Parameter: Organism Value: A. thaliana
  misc_feature: MA Experiment 20001904 PARAMETER Experiment Name: At_Drought_Reproduction_P Parameter: Plant Line Value: WS
  misc_feature: MA Experiment 20001904 PARAMETER Experiment Name: At_Drought_Reproduction_P Parameter: Timepoint (day) Value: 7
  misc_feature: MA Experiment 20001904 PARAMETER Experiment Name: At_Drought_Reproduction_P Parameter: Tissue Value: Rosettes
  misc_feature: MA Experiment 20001904 PARAMETER Experiment Name: At_Drought_Reproduction_P Parameter: Treatment Value: Drought vs. No Drought
  misc_feature: MA Experiment ID: 20001905 Result: Up-regulated in Transcription
  misc_feature: MA Experiment 20001905 PARAMETER Experiment Name: At_Drought_Reproduction_P Parameter: Age (day) Value: 40
  misc_feature: MA Experiment 20001905 PARAMETER Experiment Name: At_Drought_Reproduction_P Parameter: Organism Value: A. thaliana
  misc_feature: MA Experiment 20001905 PARAMETER Experiment Name: At_Drought_Reproduction_P Parameter: Plant Line Value: WS
  misc_feature: MA Experiment 20001905 PARAMETER Experiment Name: At_Drought_Reproduction_P Parameter: Timepoint (day) Value: 10
  misc_feature: MA Experiment 20001905 PARAMETER Experiment Name: At_Drought_Reproduction_P Parameter: Tissue Value: Rosettes
  misc_feature: MA Experiment 20001905 PARAMETER Experiment Name: At_Drought_Reproduction_P Parameter: Treatment Value: Drought vs. No Drought
atctcttatccgaatcctcccaatttgtctgtctctcttttgttttctctgctaacagatctctctaaatatctgttacttttgttcatatctttttacttttcaaactactaattttcctttcgcttcttctattaataacaacactctctctctcagacttcttttcttttttttctacggcgttgattcattcgcaatgacctcagtttctgtgtaccataattgacctagcagattctgtttttaatggtagattctgacccggtggaatttccgccggagaaccgccgtggacagctcttcggcaaatacgaggtcggaaaattggtgggatgcggcgccttcgcgaaagtgtaccacgggaggagcacagcgacgggtcagagcgttgcgatcaaagtggtgagcaagcaacggctgcagaaaggaggactcaatggcaacattcagagagagatcgctatcatgcaccgtctgcgccacccttctatcgtgcgcctgttcgaggtcctcgccaccaaatccaagatcttcttcgtcatggaattcgccaagggcggtgagctattcgccaaagtctccaagggcaggttctgcgaggatcttagccgtcgttatttccagcagctcatctccgccgtcggatattgccactcccgcggcatctttcaccgtgatctcaaaccggagaatctcctcctcgacgagaagctcgatttgaagatctctgatttcggactcagcgctcttaccgatcagatccgacccgacggcctcctccacacactctgtggtacgccggcgtacgtggcgcctgaggttttggcgaagaaagggtacgacggtgctaaaatcgacatatggtcatgtggaatcatactgttcgtcctcaacgccggttatctccctttcaacgaccataatctcatggttatgtaccggaaaatctacaagggagaatttcgcattcccaagtggacctcaccggatctccggcgactgctgactcggcttttagacacgaatccgcagacgaggatcactatcgaagagatcatccacgatccatggttcaaacagggctacgacgatcggatgtctaaattccatctagaggactccgatatgaaactcccggcggacgagaccgacagcgagatgggagcaaggaggatgaacgcattcgacatcatctcaggatctccagggttcaatctctccggtcttttcggagacgccagaaagtacgaccgagtggaacggttcgtgtcggcgtggacggcggagagggtggtggagaggctggaggagatcgtgtcggcggagaatctgacggtggcgaagaaggaaacatgggggatgaagatcgaggggcaaaaaggtaacttcgcaatggtggttgagataaaccagctaacggacgagctggttatgatagaggtgaggaagagacaaagagccgctgcatctggacgagatttatggacagatacactcaggcctttcttcgtcgagcttgtgcacgaatcagaccaaacggacccagaaccaactcaagtacatacgacgtcgtagtttaggtatctgtcaaataaattatccaaataataattaaaaaaaaatatcccgggttatatgtaattgcttttttttttacccggagaatatctctgacataattattcaggaaatttctcgacaaatcttaatttttagttggcaagtatgtatcttcttgttatgtaatcataattatattttatataaatgaaaaataaaatataaaaaaatgtattactt

SEQ ID NO: 48983 - protein, 442 aa, Arabidopsis thaliana
  peptide (1)..(442): Ceres Seq. ID no. 12601154
  misc_feature (22)..(276): Pfam Name: Protein kinase domain Pfam Description: Protein kinase domain
  misc_feature (310)..(427): Homolog of NCBI NO: 15218854 NR Description: protein kinase PK4, putative
  misc_feature (10)..(319): Homolog of NCBI NO: 15218854 NR Description: protein kinase PK4, putative
  misc_feature (310)..(436): Homolog of NCBI NO: 3928519 NR Description: wpk4 protein kinase [Triticum aestivum]
  misc_feature (15)..(294): Homolog of NCBI NO: 3928519 NR Description: wpk4 protein kinase [Triticum aestivum]
  misc_feature (310)..(426): Homolog of NCBI NO: 5821067 NR Description: OsPK4 [Oryza sativa]
  misc_feature (16)..(305): Homolog of NCBI NO: 5821067 NR Description: OsPK4 [Oryza sativa]
  misc_feature (12)..(427): Homolog of NCBI NO: 15224888 NR Description: putative protein kinase
  misc_feature (18)..(418): Homolog of NCBI NO: 30013673 NR Description: Avr9/Cf-9 rapidly elicited protein 216 [Nicotiana
  misc_feature (18)..(431): Homolog of NCBI NO: 15227739 NR Description: putative protein kinase
  misc_feature (1)..(442): Homolog of NCBI NO: 15241067 NR Description: putative protein
MVDSDPVEFPPENRRGQLFGKYEVGKLVGCGAFAKVYHGRSTATGQSVAIKVVSKQRLQKGGLNGNIQREIAIMHRLRHPSIVRLFEVLATKSKIFFVMEFAKGGELFAKVSKGRFCEDLSRRYFQQLISAVGYCHSRGIFHRDLKPENLLLDEKLDLKISDFGLSALTDQIRPDGLLHTLCGTPAYVAPEVLAKKGYDGAKIDIWSCGIILFVLNAGYLPFNDHNLMVMYRKIYKGEFRIPKWTSPDLRRLLTRLLDTNPQTRITIEEIIHDPWFKQGYDDRMSKFHLEDSDMKLPADETDSEMGARRMNAFDIISGSPGFNLSGLFGDARKYDRVERFVSAWTAERVVERLEEIVSAENLTVAKKETWGMKIEGQKGNFAMVVEINQLTDELVMIEVRKRQRAAASGRDLWTDTLRPFFVELVHESDQTDPEPTQVHTTS

SEQ ID NO: 48984 - protein, 369 aa, Arabidopsis thaliana
  peptide (1)..(369): Ceres Seq. ID no. 12601155
  misc_feature (1)..(203): Pfam Name: Protein kinase domain Pfam Description: Protein kinase domain
  misc_feature (237)..(354): Homolog of NCBI NO: 15218854 NR Description: protein kinase PK4, putative
  misc_feature (1)..(246): Homolog of NCBI NO: 15218854 NR Description: protein kinase PK4, putative
  misc_feature (237)..(363): Homolog of NCBI NO: 3928519 NR Description: wpk4 protein kinase [Triticum aestivum]
  misc_feature (1)..(221): Homolog of NCBI NO: 3928519 NR Description: wpk4 protein kinase [Triticum aestivum]
  misc_feature (237)..(353): Homolog of NCBI NO: 5821067 NR Description: OsPK4 [Oryza sativa]
  misc_feature (1)..(232): Homolog of NCBI NO: 5821067 NR Description: OsPK4 [Oryza sativa]
  misc_feature (1)..(354): Homolog of NCBI NO: 15224888 NR Description: putative protein kinase
  misc_feature (1)..(345): Homolog of NCBI NO: 30013673 NR Description: Avr9/Cf-9 rapidly elicited protein 216 [Nicotiana
  misc_feature (1)..(358): Homolog of NCBI NO: 15227739 NR Description: putative protein kinase
  misc_feature (1)..(369): Homolog of NCBI NO: 15241067 NR Description: putative protein
MHRLRHPSIVRLFEVLATKSKIFFVMEFAKGGELFAKVSKGRFCEDLSRRYFQQLISAVGYCHSRGIFHRDLKPENLLLDEKLDLKISDFGLSALTDQIRPDGLLHTLCGTPAYVAPEVLAKKGYDGAKIDIWSCGIILFVLNAGYLPFNDHNLMVMYRKIYKGEFRIPKWTSPDLRRLLTRLLDTNPQTRITIEEIIHDPWFKQGYDDRMSKFHLEDSDMKLPADETDSEMGARRMNAFDIISGSPGFNLSGLFGDARKYDRVERFVSAWTAERVVERLEEIVSAENLTVAKKETWGMKIEGQKGNFAMVVEINQLTDELVMIEVRKRQRAAASGRDLWTDTLRPFFVELVHESDQTDPEPTQVHTTS

SEQ ID NO: 48985 - protein, 344 aa, Arabidopsis thaliana
  peptide (1)..(344): Ceres Seq. ID no. 12601156
  misc_feature (1)..(178): Pfam Name: Protein kinase domain Pfam Description: Protein kinase domain
  misc_feature (212)..(329): Homolog of NCBI NO: 15218854 NR Description: protein kinase PK4, putative
  misc_feature (1)..(221): Homolog of NCBI NO: 15218854 NR Description: protein kinase PK4, putative
  misc_feature (212)..(338): Homolog of NCBI NO: 3928519 NR Description: wpk4 protein kinase [Triticum aestivum]
  misc_feature (1)..(196): Homolog of NCBI NO: 3928519 NR Description: wpk4 protein kinase [Triticum aestivum]
  misc_feature (212)..(328): Homolog of NCBI NO: 5821067 NR Description: OsPK4 [Oryza sativa]
  misc_feature (1)..(207): Homolog of NCBI NO: 5821067 NR Description: OsPK4 [Oryza sativa]
  misc_feature (1)..(329): Homolog of NCBI NO: 15224888 NR Description: putative protein kinase
  misc_feature (1)..(320): Homolog of NCBI NO: 30013673 NR Description: Avr9/Cf-9 rapidly elicited protein 216 [Nicotiana
  misc_feature (1)..(333): Homolog of NCBI NO: 15227739 NR Description: putative protein kinase
  misc_feature (1)..(344): Homolog of NCBI NO: 15241067 NR Description: putative protein
MEFAKGGELFAKVSKGRFCEDLSRRYFQQLISAVGYCHSRGIFHRDLKPENLLLDEKLDLKISDFGLSALTDQIRPDGLLHTLCGTPAYVAPEVLAKKGYDGAKIDIWSCGIILFVLNAGYLPFNDHNLMVMYRKIYKGEFRIPKWTSPDLRRLLTRLLDTNPQTRITIEEIIHDPWFKQGYDDRMSKFHLEDSDMKLPADETDSEMGARRMNAFDIISGSPGFNLSGLFGDARKYDRVERFVSAWTAERVVERLEEIVSAENLTVAKKETWGMKIEGQKGNFAMVVEINQLTDELVMIEVRKRQRAAASGRDLWTDTLRPFFVELVHESDQTDPEPTQVHTTS

SEQ ID NO: 48986 - DNA, 1945 bp, Arabidopsis thaliana
  misc_feature (1)..(1945): Ceres Seq. ID no. 12575102
  misc_feature: MA Experiment ID: 20000495 Result: Up-regulated in Transcription
  misc_feature: MA Experiment 20000495 PARAMETER Experiment Name: At_Guard_Cells_P Parameter: Harvest Date Value: 8/2/2002
  misc_feature: MA Experiment 20000495 PARAMETER Experiment Name: At_Guard_Cells_P Parameter: Organism Value: A. thaliana
  misc_feature: MA Experiment 20000495 PARAMETER Experiment Name: At_Guard_Cells_P Parameter: Tissue Value: Guard Cells vs. Leaves
  misc_feature: MA Experiment ID: 20001247 Result: Down-regulated in Transcription
  misc_feature: MA Experiment 20001247 PARAMETER Experiment Name: At_Far-red-induction_P Parameter: Age (day) Value: 7
  misc_feature: MA Experiment 20001247 PARAMETER Experiment Name: At_Far-red-induction_P Parameter: Light Value: Far-red vs. White
  misc_feature: MA Experiment 20001247 PARAMETER Experiment Name: At_Far-red-induction_P Parameter: Organism Value: A. thaliana
  misc_feature: MA Experiment 20001247 PARAMETER Experiment Name: At_Far-red-induction_P Parameter: Plant Line Value: Columbia
  misc_feature: MA Experiment 20001247 PARAMETER Experiment Name: At_Far-red-induction_P Parameter: Timepoint (hr) Value: 1
  misc_feature: MA Experiment 20001247 PARAMETER Experiment Name: At_Far-red-induction_P Parameter: Tissue Value: Whole Plant
gaaggaaacaatcgtttgacaacttcgaggattttcccgcttccatttgctataatcgtcaatttctttatttgtcttcttcttcttcttcttcatctcgattcaatttaatgccaaaaaaaacttatctttttaatgtatttataatgtttcaaatggtctgccctagaagaaagggcatacaaatgataactaacattgaagtctagagaattcttatactttttctacgatggagatttctttgatgaagtttctgtttttaggaatctgggtttattattactctgttcttgactctgtttctgccatggatagtcttttatctcccaagggtgttaactatgaagtggctgcgttaatgtcagtgaagaacaagatgaaagatgagaaagaggttttgtctggttgggatattaactctgttgatccttgtacttggaacatggttggttgttcttctgaaggttttgtggtttctctgttacttcagaataatcagttaactggtccgattccttctgagttaggccaactctctgagcttgaaacgcttgatttatcggggaatcggtttagtggtgaaatcccagcttctttagggttcttaactcacttaaactacttgcggcttagcaggaatcttttatctgggcaagtccctcacctcgtcgctggcctctcaggtctttctttcttgattgtaggaaatgcatttctttgtggtccagcttcccaagagctttgctcagatgctacacctgtgagaaatgcgacgggtttgtctgaaaaggacaatagcaaacatcacagcttagtgctctcttttgcatttggcattgttgttgcctttatcatctccctaatgtttctcttcttctgggtgctttggcatcgatcacgtctctcaagatcacacgtgcagcaagactacgaatttgaaatcggccatctgaaaaggttcagttttcgcgaaatacaaaccgcaacaagcaattttagtccaaagaacattttgggacaaggagggtttgggatggtttataaagggtatctcccaaatggaactgtggtggcagttaaaagattgaaagatccgatttatacaggagaagttcagtttcaaaccgaagtagagatgattggcttagctgttcaccgtaaccttttacgcctctttggattctgtatgaccccggaagagagaatgcttgtgtatccgtacatgccaaatggaagcgtagctgatcgtctgagagacaattatggagaaaagccgtctctagattggaatcggaggataagcattgcactcggcgcagctcgaggacttgtttacttgcacgagcaatgcaatccaaagattattcacagagacgtcaaagctgcaaatattctacttgatgagagctttgaagcaatagttggcgattttggtctagcaaagcttttagaccagagagattcacatgtcactaccgcagtccgaggaaccattggacacatcgctcccgagtacctttccactggacagtcctcagagaaaaccgatgttttcggattcggagtactaatccttgaactcataacaggtcataagatgattgatcaaggcaatggtcaagttcgaaaaggaatgatattgagctgggtaaggacattgaaagcagagaagagatttgcagagatggtggacagagatttgaagggagagtttgatgatttggtgttggaggaagtagtggaattggctttgctttgtacacagccacatccgaatctaagaccgaggatgtctcaagtgttgaaggtactagaaggtttagtggaacagtgtgaaggagggtatgaagctagagctccaagtgtctctaggaactacagtaatggtcatgaagagcagtcctttattattgaagccattgagctctctggaccacgatga

SEQ ID NO: 48987 - protein, 570 aa, Arabidopsis thaliana
  peptide (1)..(570): Ceres Seq. ID no. 12575103
  misc_feature (83)..(570): Homolog of NCBI NO: 15237242 NR Description: receptor protein kinase-like protein
  misc_feature (31)..(166): Homolog of NCBI NO: 25407653 NR Description: receptor-like kinase homolog [imported] -
  misc_feature (238)..(530): Homolog of NCBI NO: 25407653 NR Description: receptor-like kinase homolog [imported] -
  misc_feature (83)..(570): Homolog of NCBI NO: 22331326 NR Description: somatic embryogenesis receptor-like kinase,
  misc_feature (83)..(570): Homolog of NCBI NO: 9279736 NR Description: receptor-like kinase [Arabidopsis thaliana]
  misc_feature (31)..(87): Homolog of NCBI NO: 15528710 NR Description: putative receptor-like kinase
  misc_feature (184)..(523): Homolog of NCBI NO: 15528710 NR Description: putative receptor-like kinase
  misc_feature (83)..(570): Homolog of NCBI NO: 15219817 NR Description: receptor-like kinase, putative; protein id:
  misc_feature (11)..(570): Homolog of NCBI NO: 25404291 NR Description: probable Serine/Threonine protein kinase F8A5.31
  misc_feature (1)..(570): Homolog of NCBI NO: 15242500 NR Description: leucine-rich repeat transmembrane protein kinase,
MEISLMKFLFLGIWVYYYSVLDSVSAMDSLLSPKGVNYEVAALMSVKNKMKDEKEVLSGWDINSVDPCTWNMVGCSSEGFVVSLLLQNNQLTGPIPSELGQLSELETLDLSGNRFSGEIPASLGFLTHLNYLRLSRNLLSGQVPHLVAGLSGLSFLIVGNAFLCGPASQELCSDATPVRNATGLSEKDNSKHHSLVLSFAFGIVVAFIISLMFLFFWVLWHRSRLSRSHVQQDYEFEIGHLKRFSFREIQTATSNFSPKNILGQGGFGMVYKGYLPNGTVVAVKRLKDPIYTGEVQFQTEVEMIGLAVHRNLLRLFGFCMTPEERMLVYPYMPNGSVADRLRDNYGEKPSLDWNRRISIALGAARGLVYLHEQCNPKIIHRDVKAANILLDESFEAIVGDFGLAKLLDQRDSHVTTAVRGTIGHIAPEYLSTGQSSEKTDVFGFGVLILELITGHKMIDQGNGQVRKGMILSWVRTLKAEKRFAEMVDRDLKGEFDDLVLEEVVELALLCTQPHPNLRPRMSQVLKVLEGLVEQCEGGYEARAPSVSRNYSNGHEEQSFIIEAIELSGPR

SEQ ID NO: 48988 - protein, 565 aa, Arabidopsis thaliana
  peptide (1)..(565): Ceres Seq. ID no. 12575104
  misc_feature (78)..(565): Homolog of NCBI NO: 15237242 NR Description: receptor protein kinase-like protein
  misc_feature (26)..(161): Homolog of NCBI NO: 25407653 NR Description: receptor-like kinase homolog [imported] -
  misc_feature (233)..(525): Homolog of NCBI NO: 25407653 NR Description: receptor-like kinase homolog [imported] -
  misc_feature (78)..(565): Homolog of NCBI NO: 22331326 NR Description: somatic embryogenesis receptor-like kinase,
  misc_feature (78)..(565): Homolog of NCBI NO: 9279736 NR Description: receptor-like kinase [Arabidopsis thaliana]
  misc_feature (26)..(82): Homolog of NCBI NO: 15528710 NR Description: putative receptor-like kinase
  misc_feature (179)..(518): Homolog of NCBI NO: 15528710 NR Description: putative receptor-like kinase
  misc_feature (78)..(565): Homolog of NCBI NO: 15219817 NR Description: receptor-like kinase, putative; protein id:
  misc_feature (6)..(565): Homolog of NCBI NO: 25404291 NR Description: probable Serine/Threonine protein kinase F8A5.31
  misc_feature (1)..(565): Homolog of NCBI NO: 15242500 NR Description: leucine-rich repeat transmembrane protein kinase,
MKFLFLGIWVYYYSVLDSVSAMDSLLSPKGVNYEVAALMSVKNKMKDEKEVLSGWDINSVDPCTWNMVGCSSEGFVVSLLLQNNQLTGPIPSELGQLSELETLDLSGNRFSGEIPASLGFLTHLNYLRLSRNLLSGQVPHLVAGLSGLSFLIVGNAFLCGPASQELCSDATPVRNATGLSEKDNSKHHSLVLSFAFGIVVAFIISLMFLFFWVLWHRSRLSRSHVQQDYEFEIGHLKRFSFREIQTATSNFSPKNILGQGGFGMVYKGYLPNGTVVAVKRLKDPIYTGEVQFQTEVEMIGLAVHRNLLRLFGFCMTPEERMLVYPYMPNGSVADRLRDNYGEKPSLDWNRRISIALGAARGLVYLHEQCNPKIIHRDVKAANILLDESFEAIVGDFGLAKLLDQRDSHVTTAVRGTIGHIAPEYLSTGQSSEKTDVFGFGVLILELITGHKMIDQGNGQVRKGMILSWVRTLKAEKRFAEMVDRDLKGEFDDLVLEEVVELALLCTQPHPNLRPRMSQVLKVLEGLVEQCEGGYEARAPSVSRNYSNGHEEQSFIIEAIELSGPR

SEQ ID NO: 48989 - protein, 544 aa, Arabidopsis thaliana
  peptide (1)..(544): Ceres Seq. ID no. 12575105
  misc_feature (57)..(544): Homolog of NCBI NO: 15237242 NR Description: receptor protein kinase-like protein
  misc_feature (5)..(140): Homolog of NCBI NO: 25407653 NR Description: receptor-like kinase homolog [imported] -
  misc_feature (212)..(504): Homolog of NCBI NO: 25407653 NR Description: receptor-like kinase homolog [imported] -
  misc_feature (57)..(544): Homolog of NCBI NO: 22331326 NR Description: somatic embryogenesis receptor-like kinase,
  misc_feature (57)..(544): Homolog of NCBI NO: 9279736 NR Description: receptor-like kinase [Arabidopsis thaliana]
  misc_feature (5)..(61): Homolog of NCBI NO: 15528710 NR Description: putative receptor-like kinase
  misc_feature (158)..(497): Homolog of NCBI NO: 15528710 NR Description: putative receptor-like kinase
  misc_feature (57)..(544): Homolog of NCBI NO: 15219817 NR Description: receptor-like kinase, putative; protein id:
  misc_feature (1)..(544): Homolog of NCBI NO: 25404291 NR Description: probable Serine/Threonine protein kinase F8A5.31
  misc_feature (1)..(544): Homolog of NCBI NO: 15242500 NR Description: leucine-rich repeat transmembrane protein kinase,
MDSLLSPKGVNYEVAALMSVKNKMKDEKEVLSGWDINSVDPCTWNMVGCSSEGFVVSLLLQNNQLTGPIPSELGQLSELETLDLSGNRFSGEIPASLGFLTHLNYLRLSRNLLSGQVPHLVAGLSGLSFLIVGNAFLCGPASQELCSDATPVRNATGLSEKDNSKHHSLVLSFAFGIVVAFIISLMFLFFWVLWHRSRLSRSHVQQDYEFEIGHLKRFSFREIQTATSNFSPKNILGQGGFGMVYKGYLPNGTVVAVKRLKDPIYTGEVQFQTEVEMIGLAVHRNLLRLFGFCMTPEERMLVYPYMPNGSVADRLRDNYGEKPSLDWNRRISIALGAARGLVYLHEQCNPKIIHRDVKAANILLDESFEAIVGDFGLAKLLDQRDSHVTTAVRGTIGHIAPEYLSTGQSSEKTDVFGFGVLILELITGHKMIDQGNGQVRKGMILSWVRTLKAEKRFAEMVDRDLKGEFDDLVLEEVVELALLCTQPHPNLRPRMSQVLKVLEGLVEQCEGGYEARAPSVSRNYSNGHEEQSFIIEAIELSGPR

SEQ ID NO: 48990 - DNA, 3582 bp, Arabidopsis thaliana
  misc_feature (1)..(3582): Ceres Seq. ID no. 12575140
  misc_feature: MA Experiment ID: 20000171 Result: Down-regulated in Transcription
  misc_feature: MA Experiment 20000171 PARAMETER Experiment Name: At_42deg_Heat_P Parameter: Age (day) Value: 14
  misc_feature: MA Experiment 20000171 PARAMETER Experiment Name: At_42deg_Heat_P Parameter: Organism Value: A. thaliana
  misc_feature: MA Experiment 20000171 PARAMETER Experiment Name: At_42deg_Heat_P Parameter: Plant Line Value: WS
  misc_feature: MA Experiment 20000171 PARAMETER Experiment Name: At_42deg_Heat_P Parameter: Temperature (deg C) Value: 42 vs. 22
  misc_feature: MA Experiment 20000171 PARAMETER Experiment Name: At_42deg_Heat_P Parameter: Timepoint (hr) Value: 1
  misc_feature: MA Experiment 20000171 PARAMETER Experiment Name: At_42deg_Heat_P Parameter: Tissue Value: Aerial
  misc_feature: MA Experiment ID: 20000173 Result: Down-regulated in Transcription
  misc_feature: MA Experiment 20000173 PARAMETER Experiment Name: At_42deg_Heat_P Parameter: Age (day) Value: 14
  misc_feature: MA Experiment 20000173 PARAMETER Experiment Name: At_42deg_Heat_P Parameter: Organism Value: A. thaliana
  misc_feature: MA Experiment 20000173 PARAMETER Experiment Name: At_42deg_Heat_P Parameter: Plant Line Value: WS
  misc_feature: MA Experiment 20000173 PARAMETER Experiment Name: At_42deg_Heat_P Parameter: Temperature (deg C) Value: 42 vs. 22
  misc_feature: MA Experiment 20000173 PARAMETER Experiment Name: At_42deg_Heat_P Parameter: Timepoint (hr) Value: 6
  misc_feature: MA Experiment 20000173 PARAMETER Experiment Name: At_42deg_Heat_P Parameter: Tissue Value: Aerial
  misc_feature: MA Experiment ID: 20000184 Result: Down-regulated in Transcription
  misc_feature: MA Experiment 20000184 PARAMETER Experiment Name: At_Shoots__P Parameter: Age (day) Value: 7
  misc_feature: MA Experiment 20000184 PARAMETER Experiment Name: At_Shoots__P Parameter: Tissue Value: Shoots vs. Whole Plant
  misc_feature: MA Experiment ID: 20000227 Result: Up-regulated in Transcription
  misc_feature: MA Experiment 20000227 PARAMETER Experiment Name: At_Root-Tips-vs-Tops_P Parameter: Tissue Value: Root Tips vs. Root Tops
  misc_feature: MA Experiment ID: 20000234 Result: Up-regulated in Transcription
  misc_feature: MA Experiment 20000234 PARAMETER Experiment Name: At_Siliques_P Parameter: Age (day) Value: 21
  misc_feature: MA Experiment 20000234 PARAMETER Experiment Name: At_Siliques_P Parameter: Organism Value: A. thaliana
  misc_feature: MA Experiment 20000234 PARAMETER Experiment Name: At_Siliques_P Parameter: Plant Line Value: WS
  misc_feature: MA Experiment 20000234 PARAMETER Experiment Name: At_Siliques_P Parameter: Tissue Value: Less Than 5mm Siliques vs. Whole Plant
  misc_feature: MA Experiment ID: 20000264 Result: Up-regulated in Transcription
  misc_feature: MA Experiment 20000264 PARAMETER Experiment Name: At_Open_Flower_P Parameter: Age (day) Value: 21
  misc_feature: MA Experiment 20000264 PARAMETER Experiment Name: At_Open_Flower_P Parameter: Plant Line Value: WS
  misc_feature: MA Experiment 20000264 PARAMETER Experiment Name: At_Open_Flower_P Parameter: Tissue Value: Open Flower vs. Whole Plant
  misc_feature: MA Experiment ID: 20000286 Result: Up-regulated in Transcription
  misc_feature: MA Experiment 20000286 PARAMETER Experiment Name: At_Open_Flower_P Parameter: Age (day) Value: 21
  misc_feature: MA Experiment 20000286 PARAMETER Experiment Name: At_Open_Flower_P Parameter: Plant Line Value: WS
  misc_feature: MA Experiment 20000286 PARAMETER Experiment Name: At_Open_Flower_P Parameter: Tissue Value: Half Open vs. Whole Plant
  misc_feature: MA Experiment ID: 20000794 Result: Up-regulated in Transcription
  misc_feature: MA Experiment 20000794 PARAMETER Experiment Name: At_Petals_P Parameter: Age (day) Value: 23-25 days
  misc_feature: MA Experiment 20000794 PARAMETER Experiment Name: At_Petals_P Parameter: Plant Line Value: WS
  misc_feature: MA Experiment 20000794 PARAMETER Experiment Name: At_Petals_P Parameter: Tissue Value: Petals vs. Whole plant
  misc_feature: MA Experiment ID: 20001451 Result: Down-regulated in Transcription
  misc_feature: MA Experiment 20001451 PARAMETER Experiment Name: At_Far-red-induction_P Parameter: Age (day) Value: 7
  misc_feature: MA Experiment 20001451 PARAMETER Experiment Name: At_Far-red-induction_P Parameter: Light Value: Far-red vs. White
  misc_feature: MA Experiment 20001451 PARAMETER Experiment Name: At_Far-red-induction_P Parameter: Organism Value: A. thaliana
  misc_feature: MA Experiment 20001451 PARAMETER Experiment Name: At_Far-red-induction_P Parameter: Plant Line Value: Columbia
  misc_feature: MA Experiment 20001451 PARAMETER Experiment Name: At_Far-red-induction_P Parameter: Timepoint (hr) Value: 24
  misc_feature: MA Experiment 20001451 PARAMETER Experiment Name: At_Far-red-induction_P Parameter: Tissue Value: Whole Plant
  misc_feature: MA Experiment ID: 20001905 Result: Down-regulated in Transcription
  misc_feature: MA Experiment 20001905 PARAMETER Experiment Name: At_Drought_Reproduction_P Parameter: Age (day) Value: 40
  misc_feature: MA Experiment 20001905 PARAMETER Experiment Name: At_Drought_Reproduction_P Parameter: Organism Value: A. thaliana
  misc_feature: MA Experiment 20001905 PARAMETER Experiment Name: At_Drought_Reproduction_P Parameter: Plant Line Value: WS
  misc_feature: MA Experiment 20001905 PARAMETER Experiment Name: At_Drought_Reproduction_P Parameter: Timepoint (day) Value: 10
  misc_feature: MA Experiment 20001905 PARAMETER Experiment Name: At_Drought_Reproduction_P Parameter: Tissue Value: Rosettes
  misc_feature: MA Experiment 20001905 PARAMETER Experiment Name: At_Drought_Reproduction_P Parameter: Treatment Value: Drought vs. No Drought
agagaagaagaagaaagagagaagtgagagaaagacgaagaagatgaagagcatattgctttttctgtccccagccatatttttaccgagtccgtaaccgagtttgaacgagttagtggatggcttcatcgtcgtctagaactaggagtcgttctcctttctcgcaccgtagacctccgagtccttactcttcggcttcgtctacttcttcgtctcttataaataatcgtctattacctcgttcttcttccacacctacttctaccgtttacaattccggcggtgtaaccgggtcccgatctatgtcgattactcgcaccatttccgattccggtcccatcggcggctccgggacttatggagcccaatcgtacccatcggaggggctcattggcgagtctgggcagacgattacctctgagcgagatagcatctccgtcaccgttcgatttcgtccgatgagtgagagggagtatcaacgaggagatgagattgtttggtatcctgacgcagataagatggtcaggaatgaatacaatcccctcacagcttacgcatttgataaagtttttggaccacagtcaacaactccagaagtatatgacgtagctgctaaacctgtagtcaaggctgctatggaaggtgttaacggaaccgtttttgcttatggtgttacaagcagtggaaagacacatacaatgcatggtgatcaagattttcctggaatcataccattagcaataaaagacgtgttcagtatcattcaggaaaccaccggaagagagtttctgctccgtgtttcatatcttgaaatatacaatgaggtgataaatgacttactggatccaacagggcaaaatttacgtattagagaggattcccagggcacttacgttgagggtatcaaggaagaagtcgttttgtctccaggccatgcgttatctttcattgcagctggggaagaacatcgtcatgttggttcaaataatttcaacctgatgagcagcagaagtcacacaatatttacactgatgattgaaagtagtgctcatggagaccaatatgatggagttattttttctcagctaaatttgattgacttagctggatctgagagttccaaaactgagacaacgggactgaggaggaaagagggtgcatacatcaacaagagtcttctgactcttggaactgtgattggaaaactgactgagggcaagacaactcatgtcccatttcgggactctaagctaactcgtcttctgcaatcttcactgagtgggcatgggcatgtatcgctcatatgtacagttactcctgcgtcaagcagtaccgaggaaactcataatactttgaagtttgccagcagggcaaagagaattgaaattaatgcctcacgcaataagatcatagatgagaagtcattgattaagaaatatcagaaagaaatctcgaccctcaaagtcgaacttgatcagctaagaaggggtgtgctagttggtgtcagtcacgaagagttattgagcctaaagcaacagctacaagaaggtcaagtgaagatgcaatcaagattggaggaagaagaagaagctaaagcagctctaatgagtagaatccaaaagcttacaaagctcatacttgtctctaccaagaattctattcctggatatttaggtgacacaccagctcattctcgcagcatttctgctggtaaagatgataagttagactctctgctcttggatagtgataatctggcatctccatcttcgactctctctctagcatcagatgcgcgacggtcttccagcaagtttaaggatgaaaactctccagttggttctcgtgcagaattaactcaaggcgttatgactcccgatgaaatggatctcctcgttgagcaagttaagatgcttgctggtgagatagctttcggcacaagcacactaaagcgtttggtggatcagtccatgaatgatcctgaaaactcgaaaacccaaatccagaatctagaaaatgatattcaagaaaagcaaagacaaatgaaatccttggaacagagaataactgagagtggtgaagcttcaattgctaatgcatcatcgattgagatgcaagagaaagttatgagattgatgacacaatgcaatgagaagagctttgagctggagattatatcagcagataatcgtattctccaagaacaactacagacaaagtgtaccgagaacaatgaattgcacgaaaaggtgcatcttctagagcaacgattatcgagtcagaaggccacactgtcttgttgtgatgttgtgactgaagagtatgtagatgagctgaaaaagaaagtacagtctcaggagattgagaacgaaaagttgaagctagagcatgtgcagagtgtggaggagaagagtggattacgagtgcaaaatcaaaaattagctgaagaagcttcatatgcaaaagaattggcctctgcagctgctattgagctgaagaatctagctgatgaagttacaaagctctcgcttcaaaacgcaaagctagaaaaagaattagtagctgcaagagacttggcagcggcagctcagaagcgtaacaacaactccatgaacagcgcagcgaaccgtaatggaacaaggccagggagaaaggcaaggatctcagactcatggaacctcaaccaagaaaatctcacaatggaattgcaggcaaggaaacagcgagaagcagtacttgaggctgcactagctgagaaagaatacatagaagaagagtttaggaaaaaagctgaagaagcaaagagaagagaagaggcccttgaaaacgatttagccaacatgtgggtgcttgttgccaagttgaagaaagccaatagtggcgccttgtcaatacaaaagagtgacgaagcagagcctgcaaaggaagatgaagtgacagagttagataataagaatgaacaaaatgcaatcttgaaagagaggcaactcgtgaatggacatgaagaagtaatagttgccaaggctgaagagacaccaaaggaggaacctcttgttgctcgtcttaaggcaagaatgcaagagatgaaagagaaagagatgaaatctcaggcggctgcagcagctaatgctgatgcaaactcacatatatgtaaagtctgttttgagtcgccgaccgccacaattctcctcccttgccgtcatttctgcctctgtaaatcttgttcacttgcctgctctgagtgcccaatctgccgaaccaagatctctgatcgcctgttcgccttcccgtcttgacctgcggcaagtatagtcactctcctacacacagtataaggtataaagaactatatggaagtctgtttgtttgctaacattttccagaacggcaggctcgaattcttttattacaagttgttttttgttttcttgtatgtaatgtctttgttatatctttctgttcaaaatgtggtaaagaaagaggaaacataacatgctaacagaaaaataggaaacatatcatagccgtttcatagtaagttcaaaatttgaagtaagtaattaaaaattattttgctaattc

SEQ ID NO: 48991 - protein, 1058 aa, Arabidopsis thaliana
  peptide (1)..(1058): Ceres Seq. ID no. 12575141
  misc_feature (406)..(1001): Pfam Name: Myosin tail Pfam Description: Myosin tail
  misc_feature (24)..(920): Homolog of NCBI NO: 30687506 NR Description: kinesin-related protein [Arabidopsis thaliana]
  misc_feature (538)..(907): Homolog of NCBI NO: 12322006 NR Description: kinesin heavy chain, putative; 55116-47986
  misc_feature (622)..(941): Homolog of NCBI NO: 12322006 NR Description: kinesin heavy chain, putative; 55116-47986
  misc_feature (53)..(512): Homolog of NCBI NO: 12322006 NR Description: kinesin heavy chain, putative; 55116-47986
  misc_feature (534)..(941): Homolog of NCBI NO: 10998143 NR Description: kinesin (centromere protein) like heavy
  misc_feature (53)..(512): Homolog of NCBI NO: 10998143 NR Description: kinesin (centromere protein) like heavy
  misc_feature (534)..(941): Homolog of NCBI NO: 22331006 NR Description: kinesin-related protein; protein id: At3g12020.1
  misc_feature (53)..(512): Homolog of NCBI NO: 22331006 NR Description: kinesin-related protein; protein id: At3g12020.1
  misc_feature (473)..(989): Homolog of NCBI NO: 25412035 NR Description: probable kinesin heavy chain [imported] -
  misc_feature (232)..(1056): Homolog of NCBI NO: 37536000 NR Description: kinesin-like protein [Oryza sativa (japonica
MASSSSRTRSRSPFSHRRPPSPYSSASSTSSSLINNRLLPRSSSTPTSTVYNSGGVTGSRSMSITRTISDSGPIGGSGTYGAQSYPSEGLIGESGQTITSERDSISVTVRFRPMSEREYQRGDEIVWYPDADKMVRNEYNPLTAYAFDKVFGPQSTTPEVYDVAAKPVVKAAMEGVNGTVFAYGVTSSGKTHTMHGDQDFPGIIPLAIKDVFSIIQETTGREFLLRVSYLEIYNEVINDLLDPTGQNLRIREDSQGTYVEGIKEEVVLSPGHALSFIAAGEEHRHVGSNNFNLMSSRSHTIFTLMIESSAHGDQYDGVIFSQLNLIDLAGSESSKTETTGLRRKEGAYINKSLLTLGTVIGKLTEGKTTHVPFRDSKLTRLLQSSLSGHGHVSLICTVTPASSSTEETHNTLKFASRAKRIEINASRNKIIDEKSLIKKYQKEISTLKVELDQLRRGVLVGVSHEELLSLKQQLQEGQVKMQSRLEEEEEAKAALMSRIQKLTKLILVSTKNSIPGYLGDTPAHSRSISAGKDDKLDSLLLDSDNLASPSSTLSLASDARRSSSKFKDENSPVGSRAELTQGVMTPDEMDLLVEQVKMLAGEIAFGTSTLKRLVDQSMNDPENSKTQIQNLENDIQEKQRQMKSLEQRITESGEASIANASSIEMQEKVMRLMTQCNEKSFELEIISADNRILQEQLQTKCTENNELHEKVHLLEQRLSSQKATLSCCDVVTEEYVDELKKKVQSQEIENEKLKLEHVQSVEEKSGLRVQNQKLAEEASYAKELASAAAIELKNLADEVTKLSLQNAKLEKELVAARDLAAAAQKRNNNSMNSAANRNGTRPGRKARISDSWNLNQENLTMELQARKQREAVLEAALAEKEYIEEEFRKKAEEAKRREEALENDLANMWVLVAKLKKANSGALSIQKSDEAEPAKEDEVTELDNKNEQNAILKERQLVNGHEEVIVAKAEETPKEEPLVARLKARMQEMKEKEMKSQAAAAANADANSHICKVCFESPTATILLPCRHFCLCKSCSLACSECPICRTKISDRLFAFPS

SEQ ID NO: 48992 - protein, 997 aa, Arabidopsis thaliana
  peptide (1)..(997): Ceres Seq. ID no. 12575142
  misc_feature (345)..(940): Pfam Name: Myosin tail Pfam Description: Myosin tail
  misc_feature (1)..(859): Homolog of NCBI NO: 30687506 NR Description: kinesin-related protein [Arabidopsis thaliana]
  misc_feature (477)..(846): Homolog of NCBI NO: 12322006 NR Description: kinesin heavy chain, putative; 55116-47986
  misc_feature (561)..(880): Homolog of NCBI NO: 12322006 NR Description: kinesin heavy chain, putative; 55116-47986
  misc_feature (1)..(451): Homolog of NCBI NO: 12322006 NR Description: kinesin heavy chain, putative; 55116-47986
  misc_feature (473)..(880): Homolog of NCBI NO: 10998143 NR Description: kinesin (centromere protein) like heavy
  misc_feature (1)..(451): Homolog of NCBI NO: 10998143 NR Description: kinesin (centromere protein) like heavy
  misc_feature (473)..(880): Homolog of NCBI NO: 22331006 NR Description: kinesin-related protein; protein id: At3g12020.1
  misc_feature (1)..(451): Homolog of NCBI NO: 22331006 NR Description: kinesin-related protein; protein id: At3g12020.1
  misc_feature (412)..(928): Homolog of NCBI NO: 25412035 NR Description: probable kinesin heavy chain [imported] -
  misc_feature (171)..(995): Homolog of NCBI NO: 37536000 NR Description: kinesin-like protein [Oryza sativa (japonica
MSITRTISDSGPIGGSGTYGAQSYPSEGLIGESGQTITSERDSISVTVRFRPMSEREYQRGDEIVWYPDADKMVRNEYNPLTAYAFDKVFGPQSTTPEVYDVAAKPVVKAAMEGVNGTVFAYGVTSSGKTHTMHGDQDFPGIIPLAIKDVFSIIQETTGREFLLRVSYLEIYNEVINDLLDPTGQNLRIREDSQGTYVEGIKEEVVLSPGHALSFIAAGEEHRHVGSNNFNLMSSRSHTIFTLMIESSAHGDQYDGVIFSQLNLIDLAGSESSKTETTGLRRKEGAYINKSLLTLGTVIGKLTEGKTTHVPFRDSKLTRLLQSSLSGHGHVSLICTVTPASSSTEETHNTLKFASRAKRIEINASRNKIIDEKSLIKKYQKEISTLKVELDQLRRGVLVGVSHEELLSLKQQLQEGQVKMQSRLEEEEEAKAALMSRIQKLTKLILVSTKNSIPGYLGDTPAHSRSISAGKDDKLDSLLLDSDNLASPSSTLSLASDARRSSSKFKDENSPVGSRAELTQGVMTPDEMDLLVEQVKMLAGEIAFGTSTLKRLVDQSMNDPENSKTQIQNLENDIQEKQRQMKSLEQRITESGEASIANASSIEMQEKVMRLMTQCNEKSFELEIISADNRILQEQLQTKCTENNELHEKVHLLEQRLSSQKATLSCCDVVTEEYVDELKKKVQSQEIENEKLKLEHVQSVEEKSGLRVQNQKLAEEASYAKELASAAAIELKNLADEVTKLSLQNAKLEKELVAARDLAAAAQKRNNNSMNSAANRNGTRPGRKARISDSWNLNQENLTMELQARKQREAVLEAALAEKEYIEEEFRKKAEEAKRREEALENDLANMWVLVAKLKKANSGALSIQKSDEAEPAKEDEVTELDNKNEQNAILKERQLVNGHEEVIVAKAEETPKEEPLVARLKARMQEMKEKEMKSQAAAAANADANSHICKVCFESPTATILLPCRHFCLCKSCSLACSECPICRTKISDRLFAFPS

SEQ ID NO: 48993 - protein, 945 aa, Arabidopsis thaliana
  peptide (1)..(945): Ceres Seq. ID no. 12575143
  misc_feature (293)..(888): Pfam Name: Myosin tail Pfam Description: Myosin tail
  misc_feature (1)..(807): Homolog of NCBI NO: 30687506 NR Description: kinesin-related protein [Arabidopsis thaliana]
  misc_feature (425)..(794): Homolog of NCBI NO: 12322006 NR Description: kinesin heavy chain, putative; 55116-47986
  misc_feature (509)..(828): Homolog of NCBI NO: 12322006 NR Description: kinesin heavy chain, putative; 55116-47986
  misc_feature (1)..(399): Homolog of NCBI NO: 12322006 NR Description: kinesin heavy chain, putative; 55116-47986
  misc_feature (421)..(828): Homolog of NCBI NO: 10998143 NR Description: kinesin (centromere protein) like heavy
  misc_feature (1)..(399): Homolog of NCBI NO: 10998143 NR Description: kinesin (centromere protein) like heavy
  misc_feature (421)..(828): Homolog of NCBI NO: 22331006 NR Description: kinesin-related protein; protein id: At3g12020.1
  misc_feature (1)..(399): Homolog of NCBI NO: 22331006 NR Description: kinesin-related protein; protein id: At3g12020.1
  misc_feature (360)..(876): Homolog of NCBI NO: 25412035 NR Description: probable kinesin heavy chain [imported] -
  misc_feature (119)..(943): Homolog of NCBI NO: 37536000 NR Description: kinesin-like protein [Oryza sativa (japonica
MSEREYQRGDEIVWYPDADKMVRNEYNPLTAYAFDKVFGPQSTTPEVYDVAAKPVVKAAMEGVNGTVFAYGVTSSGKTHTMHGDQDFPGIIPLAIKDVFSIIQETTGREFLLRVSYLEIYNEVINDLLDPTGQNLRIREDSQGTYVEGIKEEVVLSPGHALSFIAAGEEHRHVGSNNFNLMSSRSHTIFTLMIESSAHGDQYDGVIFSQLNLIDLAGSESSKTETTGLRRKEGAYINKSLLTLGTVIGKLTEGKTTHVPFRDSKLTRLLQSSLSGHGHVSLICTVTPASSSTEETHNTLKFASRAKRIEINASRNKIIDEKSLIKKYQKEISTLKVELDQLRRGVLVGVSHEELLSLKQQLQEGQVKMQSRLEEEEEAKAALMSRIQKLTKLILVSTKNSIPGYLGDTPAHSRSISAGKDDKLDSLLLDSDNLASPSSTLSLASDARRSSSKFKDENSPVGSRAELTQGVMTPDEMDLLVEQVKMLAGEIAFGTSTLKRLVDQSMNDPENSKTQIQNLENDIQEKQRQMKSLEQRITESGEASIANASSIEMQEKVMRLMTQCNEKSFELEIISADNRILQEQLQTKCTENNELHEKVHLLEQRLSSQKATLSCCDVVTEEYVDELKKKVQSQEIENEKLKLEHVQSVEEKSGLRVQNQKLAEEASYAKELASAAAIELKNLADEVTKLSLQNAKLEKELVAARDLAAAAQKRNNNSMNSAANRNGTRPGRKARISDSWNLNQENLTMELQARKQREAVLEAALAEKEYIEEEFRKKAEEAKRREEALENDLANMWVLVAKLKKANSGALSIQKSDEAEPAKEDEVTELDNKNEQNAILKERQLVNGHEEVIVAKAEETPKEEPLVARLKARMQEMKEKEMKSQAAAAANADANSHICKVCFESPTATILLPCRHFCLCKSCSLACSECPICRTKISDRLFAFPS

SEQ ID NO: 48994 - DNA, 1383 bp, Arabidopsis thaliana
  misc_feature (1)..(1383): Ceres Seq. ID no. 12601598
  misc_feature: MA Experiment ID: 20000185 Result: Down-regulated in Transcription
  misc_feature: MA Experiment 20000185 PARAMETER Experiment Name: At_Roots__P Parameter: Age (day) Value: 7 vs. 21
  misc_feature: MA Experiment 20000185 PARAMETER Experiment Name: At_Roots__P Parameter: Organism Value: A. thaliana
  misc_feature: MA Experiment 20000185 PARAMETER Experiment Name: At_Roots__P Parameter: Tissue Value: Roots vs. Whole Plant
  misc_feature: MA Experiment ID: 20000234 Result: Down-regulated in Transcription
  misc_feature: MA Experiment 20000234 PARAMETER Experiment Name: At_Siliques_P Parameter: Age (day) Value: 21
  misc_feature: MA Experiment 20000234 PARAMETER Experiment Name: At_Siliques_P Parameter: Organism Value: A. thaliana
  misc_feature: MA Experiment 20000234 PARAMETER Experiment Name: At_Siliques_P Parameter: Plant Line Value: WS
  misc_feature: MA Experiment 20000234 PARAMETER Experiment Name: At_Siliques_P Parameter: Tissue Value: Less Than 5mm Siliques vs. Whole Plant
  misc_feature: MA Experiment ID: 20000235 Result: Down-regulated in Transcription
  misc_feature: MA Experiment 20000235 PARAMETER Experiment Name: At_Siliques_P Parameter: Age (day) Value: 21
  misc_feature: MA Experiment 20000235 PARAMETER Experiment Name: At_Siliques_P Parameter: Organism Value: A. thaliana
  misc_feature: MA Experiment 20000235 PARAMETER Experiment Name: At_Siliques_P Parameter: Plant Line Value: WS
  misc_feature: MA Experiment 20000235 PARAMETER Experiment Name: At_Siliques_P Parameter: Tissue Value: 5-10mm Siliques vs. Whole Plant
  misc_feature: MA Experiment ID: 20000264 Result: Down-regulated in Transcription
  misc_feature: MA Experiment 20000264 PARAMETER Experiment Name: At_Open_Flower_P Parameter: Age (day) Value: 21
  misc_feature: MA Experiment 20000264 PARAMETER Experiment Name: At_Open_Flower_P Parameter: Plant Line Value: WS
  misc_feature: MA Experiment 20000264 PARAMETER Experiment Name: At_Open_Flower_P Parameter: Tissue Value: Open Flower vs. Whole Plant
  misc_feature: MA Experiment ID: 20000265 Result: Down-regulated in Transcription
  misc_feature: MA Experiment 20000265 PARAMETER Experiment Name: At_Open_Flower_P Parameter: Age (day) Value: 21
  misc_feature: MA Experiment 20000265 PARAMETER Experiment Name: At_Open_Flower_P Parameter: Plant Line Value: WS
  misc_feature: MA Experiment 20000265 PARAMETER Experiment Name: At_Open_Flower_P Parameter: Tissue Value: Closed Flower vs. Whole Plant
  misc_feature: MA Experiment ID: 20000268 Result: Down-regulated in Transcription
  misc_feature: MA Experiment 20000268 PARAMETER Experiment Name: At_100mM_NaCl__P Parameter: Age (day) Value: 14
  misc_feature: MA Experiment 20000268 PARAMETER Experiment Name: At_100mM_NaCl__P Parameter: Organism Value: A. thaliana
  misc_feature: MA Experiment 20000268 PARAMETER Experiment Name: At_100mM_NaCl__P Parameter: Plant Line Value: WS
  misc_feature: MA Experiment 20000268 PARAMETER Experiment Name: At_100mM_NaCl__P Parameter: Timepoint (hr) Value: 6
  misc_feature: MA Experiment 20000268 PARAMETER Experiment Name: At_100mM_NaCl__P Parameter: Tissue Value: Whole Plant
  misc_feature: MA Experiment 20000268 PARAMETER Experiment Name: At_100mM_NaCl__P Parameter: Treatment Value: 100mM NaCl vs. No Treatment
  misc_feature: MA Experiment ID: 20000286 Result: Down-regulated in Transcription
  misc_feature: MA Experiment 20000286 PARAMETER Experiment Name: At_Open_Flower_P Parameter: Age (day) Value: 21
  misc_feature: MA Experiment 20000286 PARAMETER Experiment Name: At_Open_Flower_P Parameter: Plant Line Value: WS
  misc_feature: MA Experiment 20000286 PARAMETER Experiment Name: At_Open_Flower_P Parameter: Tissue Value: Half Open vs. Whole Plant
  misc_feature: MA Experiment ID: 20000436 Result: Down-regulated in Transcription
  misc_feature: MA Experiment 20000436 PARAMETER Experiment Name: At_Drought_P Parameter: Age (day) Value: 7
  misc_feature: MA Experiment 20000436 PARAMETER Experiment Name: At_Drought_P Parameter: Organism Value: A. thaliana
  misc_feature: MA Experiment 20000436 PARAMETER Experiment Name: At_Drought_P Parameter: Plant Line Value: WS
  misc_feature: MA Experiment 20000436 PARAMETER Experiment Name: At_Drought_P Parameter: Timepoint (hr) Value: 12
  misc_feature: MA Experiment 20000436 PARAMETER Experiment Name: At_Drought_P Parameter: Tissue Value: Whole Plant
  misc_feature: MA Experiment 20000436 PARAMETER Experiment Name: At_Drought_P Parameter: Treatment Value: Drought vs. No Drought
  misc_feature: MA Experiment ID: 20000437 Result: Down-regulated in Transcription
  misc_feature: MA Experiment 20000437 PARAMETER Experiment Name: At_Drought_P Parameter: Age (day) Value: 8
  misc_feature: MA Experiment 20000437 PARAMETER Experiment Name: At_Drought_P Parameter: Organism Value: A. thaliana
  misc_feature: MA Experiment 20000437 PARAMETER Experiment Name: At_Drought_P Parameter: Plant Line Value: WS
  misc_feature: MA Experiment 20000437 PARAMETER Experiment Name: At_Drought_P Parameter: Timepoint (hr) Value: 24
  misc_feature: MA Experiment 20000437 PARAMETER Experiment Name: At_Drought_P Parameter: Tissue Value: Whole Plant
  misc_feature: MA Experiment 20000437 PARAMETER Experiment Name: At_Drought_P Parameter: Treatment Value: Drought vs. No Drought
  misc_feature: MA Experiment ID: 20000439 Result: Down-regulated in Transcription
  misc_feature: MA Experiment 20000439 PARAMETER Experiment Name: At_Roots__P Parameter: Age (day) Value: 14 vs. 21
  misc_feature: MA Experiment 20000439 PARAMETER Experiment Name: At_Roots__P Parameter: Organism Value: A. thaliana
  misc_feature: MA Experiment 20000439 PARAMETER Experiment Name: At_Roots__P Parameter: Tissue Value: Roots vs. Whole Plant
  misc_feature: MA Experiment ID: 20000794 Result: Down-regulated in Transcription
  misc_feature: MA Experiment 20000794 PARAMETER Experiment Name: At_Petals_P Parameter: Age (day) Value: 23-25 days
  misc_feature: MA Experiment 20000794 PARAMETER Experiment Name: At_Petals_P Parameter: Plant Line Value: WS
  misc_feature: MA Experiment 20000794 PARAMETER Experiment Name: At_Petals_P Parameter: Tissue Value: Petals vs. Whole plant
  misc_feature: MA Experiment ID: 20001248 Result: Down-regulated in Transcription
  misc_feature: MA Experiment 20001248 PARAMETER Experiment Name: At_Far-red-induction_P Parameter: Age (day) Value: 7
  misc_feature: MA Experiment 20001248 PARAMETER Experiment Name: At_Far-red-induction_P Parameter: Light Value: Far-red vs. White
  misc_feature: MA Experiment 20001248 PARAMETER Experiment Name: At_Far-red-induction_P Parameter: Organism Value: A. thaliana
  misc_feature: MA Experiment 20001248 PARAMETER Experiment Name: At_Far-red-induction_P Parameter: Plant Line Value: Columbia
  misc_feature: MA Experiment 20001248 PARAMETER Experiment Name: At_Far-red-induction_P Parameter: Timepoint (hr) Value: 4
  misc_feature: MA Experiment 20001248 PARAMETER Experiment Name: At_Far-red-induction_P Parameter: Tissue Value: Whole Plant
  misc_feature: MA Experiment ID: 20001557 Result: Down-regulated in Transcription
  misc_feature: MA Experiment 20001557 PARAMETER Experiment Name: At_Drought_Soil_Dry_P Parameter: Age (day) Value: 27
  misc_feature: MA Experiment 20001557 PARAMETER Experiment Name: At_Drought_Soil_Dry_P Parameter: Organism Value: A. thaliana
  misc_feature: MA Experiment 20001557 PARAMETER Experiment Name: At_Drought_Soil_Dry_P Parameter: Plant Line Value: WS
  misc_feature: MA Experiment 20001557 PARAMETER Experiment Name: At_Drought_Soil_Dry_P Parameter: Post Timepoint (hr) Value: 3
  misc_feature: MA Experiment 20001557 PARAMETER Experiment Name: At_Drought_Soil_Dry_P Parameter: Post-Treatment Value: Re-Water vs. No Drought
  misc_feature: MA Experiment 20001557 PARAMETER Experiment Name: At_Drought_Soil_Dry_P Parameter: Timepoint (day) Value: 13
  misc_feature: MA Experiment 20001557 PARAMETER Experiment Name: At_Drought_Soil_Dry_P Parameter: Treatment Value: Drought vs. No Drought
  misc_feature: MA Experiment ID: 20001560 Result: Down-regulated in Transcription
  misc_feature: MA Experiment 20001560 PARAMETER Experiment Name: At_Drought_Soil_Dry_P Parameter: Age (day) Value: 28
  misc_feature: MA Experiment 20001560 PARAMETER Experiment Name: At_Drought_Soil_Dry_P Parameter: Organism Value: A. thaliana
  misc_feature: MA Experiment 20001560 PARAMETER Experiment Name: At_Drought_Soil_Dry_P Parameter: Plant Line Value: WS
  misc_feature: MA Experiment 20001560 PARAMETER Experiment Name: At_Drought_Soil_Dry_P Parameter: Post Timepoint (hr) Value: None
  misc_feature: MA Experiment 20001560 PARAMETER Experiment Name: At_Drought_Soil_Dry_P Parameter: Post-Treatment Value: None
  misc_feature: MA Experiment 20001560 PARAMETER Experiment Name: At_Drought_Soil_Dry_P Parameter: Timepoint (day) Value: 14
  misc_feature: MA Experiment 20001560 PARAMETER Experiment Name: At_Drought_Soil_Dry_P Parameter: Treatment Value: Drought vs. No Drought
  misc_feature: MA Experiment ID: 20001756 Result: Up-regulated in Transcription
  misc_feature: MA Experiment 20001756 PARAMETER Experiment Name: At_50mM_NH4NO3_L-to-H_P Parameter: Timepoint (hr) Value: 4
  misc_feature: MA Experiment 20001756 PARAMETER Experiment Name: At_50mM_NH4NO3_L-to-H_P Parameter: Tissue Value: Leaf
  misc_feature: MA Experiment 20001756 PARAMETER Experiment Name: At_50mM_NH4NO3_L-to-H_P Parameter: Treatment Value: 50mM NH4NO3 vs 100mM Mannitol
  misc_feature: MA Experiment ID: 20001757 Result: Up-regulated in Transcription
  misc_feature: MA Experiment 20001757 PARAMETER Experiment Name: At_50mM_NH4NO3_L-to-H_P Parameter: Timepoint (hr) Value: 6
  misc_feature: MA Experiment 20001757 PARAMETER Experiment Name: At_50mM_NH4NO3_L-to-H_P Parameter: Tissue Value: Leaf
  misc_feature: MA Experiment 20001757 PARAMETER Experiment Name: At_50mM_NH4NO3_L-to-H_P Parameter: Treatment Value: 50mM NH4NO3 vs 100mM Mannitol
  misc_feature: MA Experiment ID: 20001905 Result: Down-regulated in Transcription
  misc_feature: MA Experiment 20001905 PARAMETER Experiment Name: At_Drought_Reproduction_P Parameter: Age (day) Value: 40
  misc_feature: MA Experiment 20001905 PARAMETER Experiment Name: At_Drought_Reproduction_P Parameter: Organism Value: A. thaliana
  misc_feature: MA Experiment 20001905 PARAMETER Experiment Name: At_Drought_Reproduction_P Parameter: Plant Line Value: WS
  misc_feature: MA Experiment 20001905 PARAMETER Experiment Name: At_Drought_Reproduction_P Parameter: Timepoint (day) Value: 10
  misc_feature: MA Experiment 20001905 PARAMETER Experiment Name: At_Drought_Reproduction_P Parameter: Tissue Value: Rosettes
  misc_feature: MA Experiment 20001905 PARAMETER Experiment Name: At_Drought_Reproduction_P Parameter: Treatment Value: Drought vs. No Drought
gaatcgttatctttctcttctttccttaaaccaaaacccaaaaaagagagaccagacaaaaaaaaaaaaactccccaacaaaaaaaagatatctgtctctactaaaagtctctctatagcgatgtcatcggacaacgaatcgacaccgtctcaagcgacggtagaaatgatggcgacttcgccggcgaagattaaagagtatccagaaccattggctttacatgaagttgtcgtcaaggattcttctgtcttctgggatactctcaggcggtttcactcaattatgtccactaagttcatgattcctgtgattggaggaaaagaactagatttgcatgttttgtatgtggaagtcacgaggaggggaggttacgaaaaggtagtcgtagagaaaaaatggagggaagttggaggagtgtttagattctctgcgacaacaacaagtgcttcgtttgtcttaaggaaacattatctcaatcttctcttccattacgaacaagttcatctcttcactgctcgtggtcctcttcttcatcccatagctacatttcatgcaaatccctcaacgagcaaagaaatggcgctcgtcgaatatactcctccgagtataagatatcataatactcatcctccttctcaaggttcgtcgagtttcacagccataggtacaatagaaggcaaattcgattgtggttatctggtaaaagttaagttgggctcagagattcttaacggcgttctttatcattcggcccagcccggcccatcatcatctccaaccgctgttctaaacaatgccgttgtaccttatgttgaaactgggaggagacggcgtcgtttaggtaaaagacgaagaagcagacgcagagaagatccgaattacccgaaaccgaaccggagcggttacaatttcttctttgctgagaaacattgcaagctcaaatcactttatcccaacaaggagagagagtttacgaaacttatcggagaatcgtggagcaatctctctaccgaagaacgaatggtttatcaagacattggattgaaggataaggaaaggtatcagagggagttgaatgagtacagagaaacgttgagacttagggatggtgacatgacaaacggcaaggctttttaggtgatttagttaaaacggcaagtcgttttgttgtaggtcgtttctctcttttaagattggacgcctcgccgtttcttttattttctagcttattgtagttgtccatgcttgcttaactaggctcagtgagaggctagacttgccaaacttgaagagtctttatttatttaagaattttagatgttctaatgtattaatcctttttcgtaaacctttcctgttaaacaagaggtttatgttgcatg

SEQ ID NO: 48995 - protein, 378 aa, Arabidopsis thaliana
  peptide (1)..(378): Ceres Seq. ID no. 12601599
  misc_feature (75)..(184): Pfam Name: ARID/BRIGHT DNA binding domain Pfam Description: ARID/BRIGHT DNA binding domain
  misc_feature (132)..(183): Homolog of NCBI NO: 25405992 NR Description: protein F20N2.8 [imported] - Arabidopsis thaliana
  misc_feature (278)..(368): Homolog of NCBI NO: 25405992 NR Description: protein F20N2.8 [imported] - Arabidopsis thaliana
  misc_feature (222)..(364): Homolog of NCBI NO: 18399977 NR Description: expressed protein
  misc_feature (190)..(363): Homolog of NCBI NO: 15220344 NR Description: unknown protein; protein id: At1g04880.1
  misc_feature (41)..(282): Homolog of NCBI NO: 18399977 NR Description: expressed protein
  misc_feature (70)..(290): Homolog of NCBI NO: 15220344 NR Description: unknown protein; protein id: At1g04880.1
  misc_feature (278)..(368): Homolog of NCBI NO: 15222755 NR Description: unknown protein; protein id: At1g55650.1
  misc_feature (73)..(249): Homolog of NCBI NO: 15222755 NR Description: unknown protein; protein id: At1g55650.1
  misc_feature (67)..(372): Homolog of NCBI NO: 32490476 NR Description: glutathione S-transferase GST 16 - like protein
  misc_feature (41)..(378): Homolog of NCBI NO: 15222957 NR Description: unknown protein
NRYLSLLSLNQNPKKRDQTKKKKLPNKKKISVSTKSLSIAMSSDNESTPSQATVEMMATSPAKIKEYPEPLALHEVVVKDSSVFWDTLRRFHSIMSTKFMIPVIGGKELDLHVLYVEVTRRGGYEKVVVEKKWREVGGVFRFSATTTSASFVLRKHYLNLLFHYEQVHLFTARGPLLHPIATFHANPSTSKEMALVEYTPPSIRYHNTHPPSQGSSSFTAIGTIEGKFDCGYLVKVKLGSEILNGVLYHSAQPGPSSSPTAVLNNAVVPYVETGRRRRRLGKRRRSRRREDPNYPKPNRSGYNFFFAEKHCKLKSLYPNKEREFTKLIGESWSNLSTEERMVYQDIGLKDKERYQRELNEYRETLRLRDGDMTNGKAF

SEQ ID NO: 48996 - protein, 338 aa, Arabidopsis thaliana
  peptide (1)..(338): Ceres Seq. ID no. 12601600
  misc_feature (35)..(144): Pfam Name: ARID/BRIGHT DNA binding domain Pfam Description: ARID/BRIGHT DNA binding domain
  misc_feature (92)..(143): Homolog of NCBI NO: 25405992 NR Description: protein F20N2.8 [imported] - Arabidopsis thaliana
  misc_feature (238)..(328): Homolog of NCBI NO: 25405992 NR Description: protein F20N2.8 [imported] - Arabidopsis thaliana
  misc_feature (182)..(324): Homolog of NCBI NO: 18399977 NR Description: expressed protein
  misc_feature (150)..(323): Homolog of NCBI NO: 15220344 NR Description: unknown protein; protein id: At1g04880.1
  misc_feature (1)..(242): Homolog of NCBI NO: 18399977 NR Description: expressed protein
  misc_feature (30)..(250): Homolog of NCBI NO: 15220344 NR Description: unknown protein; protein id: At1g04880.1
  misc_feature (238)..(328): Homolog of NCBI NO: 15222755 NR Description: unknown protein; protein id: At1g55650.1
  misc_feature (33)..(209): Homolog of NCBI NO: 15222755 NR Description: unknown protein; protein id: At1g55650.1
  misc_feature (27)..(332): Homolog of NCBI NO: 32490476 NR Description: glutathione S-transferase GST 16 - like protein
  misc_feature (1)..(338): Homolog of NCBI NO: 15222957 NR Description: unknown protein
MSSDNESTPSQATVEMMATSPAKIKEYPEPLALHEVVVKDSSVFWDTLRRFHSIMSTKFMIPVIGGKELDLHVLYVEVTRRGGYEKVVVEKKWREVGGVFRFSATTTSASFVLRKHYLNLLFHYEQVHLFTARGPLLHPIATFHANPSTSKEMALVEYTPPSIRYHNTHPPSQGSSSFTAIGTIEGKFDCGYLVKVKLGSEILNGVLYHSAQPGPSSSPTAVLNNAVVPYVETGRRRRRLGKRRRSRRREDPNYPKPNRSGYNFFFAEKHCKLKSLYPNKEREFTKLIGESWSNLSTEERMVYQDIGLKDKERYQRELNEYRETLRLRDGDMTNGKAF

SEQ ID NO: 48997 - protein, 323 aa, Arabidopsis thaliana
  peptide (1)..(323): Ceres Seq. ID no. 12601601
  misc_feature (20)..(129): Pfam Name: ARID/BRIGHT DNA binding domain Pfam Description: ARID/BRIGHT DNA binding domain
  misc_feature (77)..(128): Homolog of NCBI NO: 25405992 NR Description: protein F20N2.8 [imported] - Arabidopsis thaliana
  misc_feature (223)..(313): Homolog of NCBI NO: 25405992 NR Description: protein F20N2.8 [imported] - Arabidopsis thaliana
  misc_feature (167)..(309): Homolog of NCBI NO: 18399977 NR Description: expressed protein
  misc_feature (135)..(308): Homolog of NCBI NO: 15220344 NR Description: unknown protein; protein id: At1g04880.1
  misc_feature (1)..(227): Homolog of NCBI NO: 18399977 NR Description: expressed protein
  misc_feature (15)..(235): Homolog of NCBI NO: 15220344 NR Description: unknown protein; protein id: At1g04880.1
  misc_feature (223)..(313): Homolog of NCBI NO: 15222755 NR Description: unknown protein; protein id: At1g55650.1
  misc_feature (18)..(194): Homolog of NCBI NO: 15222755 NR Description: unknown protein; protein id: At1g55650.1
  misc_feature (12)..(317): Homolog of NCBI NO: 32490476 NR Description: glutathione S-transferase GST 16 - like protein
  misc_feature (1)..(323): Homolog of NCBI NO: 15222957 NR Description: unknown protein
MMATSPAKIKEYPEPLALHEVVVKDSSVFWDTLRRFHSIMSTKFMIPVIGGKELDLHVLYVEVTRRGGYEKVVVEKKWREVGGVFRFSATTTSASFVLRKHYLNLLFHYEQVHLFTARGPLLHPIATFHANPSTSKEMALVEYTPPSIRYHNTHPPSQGSSSFTAIGTIEGKFDCGYLVKVKLGSEILNGVLYHSAQPGPSSSPTAVLNNAVVPYVETGRRRRRLGKRRRSRRREDPNYPKPNRSGYNFFFAEKHCKLKSLYPNKEREFTKLIGESWSNLSTEERMVYQDIGLKDKERYQRELNEYRETLRLRDGDMTNGKAF

SEQ ID NO: 48998 - DNA, 2363 bp, Arabidopsis thaliana
  misc_feature (1)..(2363): Ceres Seq. ID no. 12578070
  misc_feature: MA Experiment ID: 20000180 Result: Up-regulated in Transcription
  misc_feature: MA Experiment 20000180 PARAMETER Experiment Name: At_Germinating_Seeds_P Parameter: Age (hr) Value: 24 vs. 0
  misc_feature: MA Experiment 20000180 PARAMETER Experiment Name: At_Germinating_Seeds_P Parameter: Tissue Value: Germinating Seeds
  misc_feature: MA Experiment ID: 20000184 Result: Up-regulated in Transcription
  misc_feature: MA Experiment 20000184 PARAMETER Experiment Name: At_Shoots__P Parameter: Age (day) Value: 7
  misc_feature: MA Experiment 20000184 PARAMETER Experiment Name: At_Shoots__P Parameter: Tissue Value: Shoots vs. Whole Plant
  misc_feature: MA Experiment ID: 20000213 Result: Up-regulated in Transcription
  misc_feature: MA Experiment 20000213 PARAMETER Experiment Name: At_4deg_Cold_P Parameter: Timepoint (hr) Value: 2
  misc_feature: MA Experiment ID: 20000227 Result: Down-regulated in Transcription
  misc_feature: MA Experiment 20000227 PARAMETER Experiment Name: At_Root-Tips-vs-Tops_P Parameter: Tissue Value: Root Tips vs. Root Tops
  misc_feature: MA Experiment ID: 20000264 Result: Up-regulated in Transcription
  misc_feature: MA Experiment 20000264 PARAMETER Experiment Name: At_Open_Flower_P Parameter: Age (day) Value: 21
  misc_feature: MA Experiment 20000264 PARAMETER Experiment Name: At_Open_Flower_P Parameter: Plant Line Value: WS
  misc_feature: MA Experiment 20000264 PARAMETER Experiment Name: At_Open_Flower_P Parameter: Tissue Value: Open Flower vs. Whole Plant
  misc_feature: MA Experiment ID: 20000265 Result: Up-regulated in Transcription
  misc_feature: MA Experiment 20000265 PARAMETER Experiment Name: At_Open_Flower_P Parameter: Age (day) Value: 21
  misc_feature: MA Experiment 20000265 PARAMETER Experiment Name: At_Open_Flower_P Parameter: Plant Line Value: WS
  misc_feature: MA Experiment 20000265 PARAMETER Experiment Name: At_Open_Flower_P Parameter: Tissue Value: Closed Flower vs. Whole Plant
  misc_feature: MA Experiment ID: 20000286 Result: Up-regulated in Transcription
  misc_feature: MA Experiment 20000286 PARAMETER Experiment Name: At_Open_Flower_P Parameter: Age (day) Value: 21
  misc_feature: MA Experiment 20000286 PARAMETER Experiment Name: At_Open_Flower_P Parameter: Plant Line Value: WS
  misc_feature: MA Experiment 20000286 PARAMETER Experiment Name: At_Open_Flower_P Parameter: Tissue Value: Half Open vs. Whole Plant
  misc_feature: MA Experiment ID: 20000438 Result: Up-regulated in Transcription
  misc_feature: MA Experiment 20000438 PARAMETER Experiment Name: At_Shoots__P Parameter: Age (day) Value: 14
  misc_feature: MA Experiment 20000438 PARAMETER Experiment Name: At_Shoots__P Parameter: Tissue Value: Shoots vs. Whole Plant
  misc_feature: MA Experiment ID: 20000495 Result: Down-regulated in Transcription
  misc_feature: MA Experiment 20000495 PARAMETER Experiment Name: At_Guard_Cells_P Parameter: Harvest Date Value: 8/2/2002
  misc_feature: MA Experiment 20000495 PARAMETER Experiment Name: At_Guard_Cells_P Parameter: Organism Value: A. thaliana
  misc_feature: MA Experiment 20000495 PARAMETER Experiment Name: At_Guard_Cells_P Parameter: Tissue Value: Guard Cells vs. Leaves
  misc_feature: MA Experiment ID: 20000794 Result: Up-regulated in Transcription
  misc_feature: MA Experiment 20000794 PARAMETER Experiment Name: At_Petals_P Parameter: Age (day) Value: 23-25 days
  misc_feature: MA Experiment 20000794 PARAMETER Experiment Name: At_Petals_P Parameter: Plant Line Value: WS
  misc_feature: MA Experiment 20000794 PARAMETER Experiment Name: At_Petals_P Parameter: Tissue Value: Petals vs. Whole plant
  misc_feature: MA Experiment ID: 20001247 Result: Up-regulated in Transcription
  misc_feature: MA Experiment 20001247 PARAMETER Experiment Name: At_Far-red-induction_P Parameter: Age (day) Value: 7
  misc_feature: MA Experiment 20001247 PARAMETER Experiment Name: At_Far-red-induction_P Parameter: Light Value: Far-red vs. White
  misc_feature: MA Experiment 20001247 PARAMETER Experiment Name: At_Far-red-induction_P Parameter: Organism Value: A. thaliana
  misc_feature: MA Experiment 20001247 PARAMETER Experiment Name: At_Far-red-induction_P Parameter: Plant Line Value: Columbia
  misc_feature: MA Experiment 20001247 PARAMETER Experiment Name: At_Far-red-induction_P Parameter: Timepoint (hr) Value: 1
  misc_feature: MA Experiment 20001247 PARAMETER Experiment Name: At_Far-red-induction_P Parameter: Tissue Value: Whole Plant
  misc_feature: MA Experiment ID: 20001248 Result: Down-regulated in Transcription
  misc_feature: MA Experiment 20001248 PARAMETER Experiment Name: At_Far-red-induction_P Parameter: Age (day) Value: 7
  misc_feature: MA Experiment 20001248 PARAMETER Experiment Name: At_Far-red-induction_P Parameter: Light Value: Far-red vs. White
  misc_feature: MA Experiment 20001248 PARAMETER Experiment Name: At_Far-red-induction_P Parameter: Organism Value: A. thaliana
  misc_feature: MA Experiment 20001248 PARAMETER Experiment Name: At_Far-red-induction_P Parameter: Plant Line Value: Columbia
  misc_feature: MA Experiment 20001248 PARAMETER Experiment Name: At_Far-red-induction_P Parameter: Timepoint (hr) Value: 4
  misc_feature: MA Experiment 20001248 PARAMETER Experiment Name: At_Far-red-induction_P Parameter: Tissue Value: Whole Plant
  misc_feature: MA Experiment ID: 20001557 Result: Down-regulated in Transcription
  misc_feature: MA Experiment 20001557 PARAMETER Experiment Name: At_Drought_Soil_Dry_P Parameter: Age (day) Value: 27
  misc_feature: MA Experiment 20001557 PARAMETER Experiment Name: At_Drought_Soil_Dry_P Parameter: Organism Value: A. thaliana
  misc_feature: MA Experiment 20001557 PARAMETER Experiment Name: At_Drought_Soil_Dry_P Parameter: Plant Line Value: WS
  misc_feature: MA Experiment 20001557 PARAMETER Experiment Name: At_Drought_Soil_Dry_P Parameter: Post Timepoint (hr) Value: 3
  misc_feature: MA Experiment 20001557 PARAMETER Experiment Name: At_Drought_Soil_Dry_P Parameter: Post-Treatment Value: Re-Water vs. No Drought
  misc_feature: MA Experiment 20001557 PARAMETER Experiment Name: At_Drought_Soil_Dry_P Parameter: Timepoint (day) Value: 13
  misc_feature: MA Experiment 20001557 PARAMETER Experiment Name: At_Drought_Soil_Dry_P Parameter: Treatment Value: Drought vs. No Drought
  misc_feature: MA Experiment ID: 20001558 Result: Down-regulated in Transcription
  misc_feature: MA Experiment 20001558 PARAMETER Experiment Name: At_Drought_Soil_Dry_P Parameter: Age (day) Value: 27
  misc_feature: MA Experiment 20001558 PARAMETER Experiment Name: At_Drought_Soil_Dry_P Parameter: Organism Value: A. thaliana
  misc_feature: MA Experiment 20001558 PARAMETER Experiment Name: At_Drought_Soil_Dry_P Parameter: Plant Line Value: WS
  misc_feature: MA Experiment 20001558 PARAMETER Experiment Name: At_Drought_Soil_Dry_P Parameter: Post Timepoint (hr) Value: 6
  misc_feature: MA Experiment 20001558 PARAMETER Experiment Name: At_Drought_Soil_Dry_P Parameter: Post-Treatment Value: Re-Water vs. No Drought
  misc_feature: MA Experiment 20001558 PARAMETER Experiment Name: At_Drought_Soil_Dry_P Parameter: Timepoint (day) Value: 13
  misc_feature: MA Experiment 20001558 PARAMETER Experiment Name: At_Drought_Soil_Dry_P Parameter: Treatment Value: Drought vs. No Drought
  misc_feature: MA Experiment ID: 20001560 Result: Down-regulated in Transcription
  misc_feature: MA Experiment 20001560 PARAMETER Experiment Name: At_Drought_Soil_Dry_P Parameter: Age (day) Value: 28
  misc_feature: MA Experiment 20001560 PARAMETER Experiment Name: At_Drought_Soil_Dry_P Parameter: Organism Value: A. thaliana
  misc_feature: MA Experiment 20001560 PARAMETER Experiment Name: At_Drought_Soil_Dry_P Parameter: Plant Line Value: WS
  misc_feature: MA Experiment 20001560 PARAMETER Experiment Name: At_Drought_Soil_Dry_P Parameter: Post Timepoint (hr) Value: None
  misc_feature: MA Experiment 20001560 PARAMETER Experiment Name: At_Drought_Soil_Dry_P Parameter: Post-Treatment Value: None
  misc_feature: MA Experiment 20001560 PARAMETER Experiment Name: At_Drought_Soil_Dry_P Parameter: Timepoint (day) Value: 14
  misc_feature: MA Experiment 20001560 PARAMETER Experiment Name: At_Drought_Soil_Dry_P Parameter: Treatment Value: Drought vs. No Drought
atttgcctccttcttcttcaaaccaatttcttcttcttcttctctcaggtttgagtctgaggcatcacaacagataaagtcttgaactttgatcaagaattctaaacggagtttttgctcttctcgtcggtgaaagaaaaatcgagatgggttcaactccgttttgctactctatcaatccatctccatcaaagcttgatttcacgaggacccatgtgtttagtcctgtttctaaacagttttacttagatttatcatcgttttccggaaaacccggaggagtatctgggtttaggagccgtcgagctttgctcggagtaaaggcggcgacggcgttagttgagaaggaggagaagagagaggcggtgacggagaagaagaagaaatcgagggttttagttgccggaggtggaatcggaggattggtgtttgctttagcggctaagaagaaaggattcgatgtgttagtgtttgagaaagatttgagtgctataagaggagaaggaaaatacagaggcccgattcaaatacagagcaacgctttagctgctttggaagctattgatattgaagttgctgaacaagttatggaagctgggtgtatcactggtgatcggattaacggtctcgttgatggtatctctggtacttggtatgtaaagtttgatactttcactcctgcggcgtcacggggacttcctgtgactagagtaattagtagaatgactctgcagcagattctagcacgtgcggttggagaagatgtgattagaaacgagagtaatgttgttgattttgaagattctggagataaggttactgtggtactcgagaatggtcaacgctatgaaggtgatctgcttgtgggtgcagatggcatttggtctaaggtgagaaataatttgtttggccgtagtgaagctacttattcaggctacacttgttacacggggattgcagattttataccagcggatatcgagtctgttggctaccgggttttcttgggacacaaacagtactttgtttcttcggatgttggtggtggaaaaatgcaatggtatgcatttcacgaggaaccagctggtggggctgatgctccaaatggtatgaagaaaaggttgtttgaaatatttgacggttggtgcgacaatgtactcgacttgttgcatgcgactgaggaggaagccattctgagaagagatatttatgatagaagtcctggttttacttggggtaaagggcgtgttacgctgctcggggattctatccatgcgatgcagccaaatatgggtcaaggtggatgcatggccattgaggatagttttcaactagcattggagcttgatgaagcatggaaacagagtgttgaaacgactacacctgttgatgttgtttcctctttgaaaagatatgaggaatctagaagactgagagtcgctattatccatgcaatggcgaggatggctgcaattatggcttccacttacaaagcatacttaggtgttgggcttggtcctctgtctttcttgacaaagtttagagtaccacatccaggaagagttggtggtagattcttcgttgacattgctatgccatcgatgcttgactgggtccttggaggtaacagtgaaaaactccaaggaaggccacctagttgcagactcactgacaaagccgatgaccggcttcgagagtggtttgaagatgacgatgctcttgaacgtactataaagggagaatggtatctaattccacacggcgacgattgttgcgtttcggaaacattatgtctaaccaaagatgaagatcaaccttgcatcgtcggaagcgaaccagatcaagattttcctggaatgcgcattgtgatcccttcgtctcaggtttcgaagatgcatgctcgtgtgatttacaaagacggagctttcttcttgatggatcttcgaagcgaacacggaacctatgtgaccgataacgaaggaagaagatatagagcaacaccgaattttcccgcgcggtttagatcgtccgacatcatcgagtttggttcagataagaaggcggcgtttagggtgaaagtaatcaggaaaactccgaaatcgacgaggaagaatgagagtaacaacgataaattacttcagacagcttgaaataagtaaaccgatggtgaaattaagtaattttaatcggtttggcagataatttgagtagtaattttctcaaaagaaaaaaaatctgctttcagctattccttgcatgacaatgtatatataggtctgaaacaaaatataaattatacaagacattaatcttcatttcttcaacttccaggcaacaataatctaattttgattactaaaagg

SEQ ID NO: 48999 - protein, 667 aa, Arabidopsis thaliana
  peptide (1)..(667): Ceres Seq. ID no. 12578071
  misc_feature (235)..(439): Pfam Name: Monooxygenase Pfam Description: Monooxygenase
  misc_feature (78)..(397): Homolog of NCBI NO: 21219844 NR Description: putative monooxygenase (putative secreted
  misc_feature (274)..(373): Homolog of NCBI NO: 30523256 NR Description: zeoxanthin epoxidase [Poncirus trifoliata]
  misc_feature (60)..(540): Homolog of NCBI NO: 28629442 NR Description: zeaxanthin epoxidase precursor [Chlamydomonas
  misc_feature (56)..(536): Homolog of NCBI NO: 28883203 NR Description: zeaxanthin epoxidase precursor [Chlamydomonas sp.
  misc_feature (1)..(657): Homolog of NCBI NO: 5902706 NR Description: Zeaxanthin epoxidase, chloroplast precursor
  misc_feature (78)..(657): Homolog of NCBI NO: 9857294 NR Description: CpABA1 [Vigna unguiculata]
  misc_feature (1)..(657): Homolog of NCBI NO: 5902707 NR Description: Zeaxanthin epoxidase, chloroplast precursor
  misc_feature (1)..(665): Homolog of NCBI NO: 17402597 NR Description: zeaxanthin epoxidase [Citrus unshiu]
  misc_feature (1)..(655): Homolog of NCBI NO: 5902708 NR Description: Zeaxanthin epoxidase, chloroplast precursor
  misc_feature (1)..(494): Homolog of NCBI NO: 19698915 NR Description: zeaxanthin epoxidase precursor [Arabidopsis
MGSTPFCYSINPSPSKLDFTRTHVFSPVSKQFYLDLSSFSGKPGGVSGFRSRRALLGVKAATALVEKEEKREAVTEKKKKSRVLVAGGGIGGLVFALAAKKKGFDVLVFEKDLSAIRGEGKYRGPIQIQSNALAALEAIDIEVAEQVMEAGCITGDRINGLVDGISGTWYVKFDTFTPAASRGLPVTRVISRMTLQQILARAVGEDVIRNESNVVDFEDSGDKVTVVLENGQRYEGDLLVGADGIWSKVRNNLFGRSEATYSGYTCYTGIADFIPADIESVGYRVFLGHKQYFVSSDVGGGKMQWYAFHEEPAGGADAPNGMKKRLFEIFDGWCDNVLDLLHATEEEAILRRDIYDRSPGFTWGKGRVTLLGDSIHAMQPNMGQGGCMAIEDSFQLALELDEAWKQSVETTTPVDVVSSLKRYEESRRLRVAIIHAMARMAAIMASTYKAYLGVGLGPLSFLTKFRVPHPGRVGGRFFVDIAMPSMLDWVLGGNSEKLQGRPPSCRLTDKADDRLREWFEDDDALERTIKGEWYLIPHGDDCCVSETLCLTKDEDQPCIVGSEPDQDFPGMRIVIPSSQVSKMHARVIYKDGAFFLMDLRSEHGTYVTDNEGRRYRATPNFPARFRSSDIIEFGSDKKAAFRVKVIRKTPKSTRKNESNNDKLLQTA

SEQ ID NO: 49000 - protein, 520 aa, Arabidopsis thaliana
  peptide (1)..(520): Ceres Seq. ID no. 12578072
  misc_feature (88)..(292): Pfam Name: Monooxygenase Pfam Description: Monooxygenase
  misc_feature (1)..(250): Homolog of NCBI NO: 21219844 NR Description: putative monooxygenase (putative secreted
  misc_feature (127)..(226): Homolog of NCBI NO: 30523256 NR Description: zeoxanthin epoxidase [Poncirus trifoliata]
  misc_feature (1)..(393): Homolog of NCBI NO: 28629442 NR Description: zeaxanthin epoxidase precursor [Chlamydomonas
  misc_feature (1)..(389): Homolog of NCBI NO: 28883203 NR Description: zeaxanthin epoxidase precursor [Chlamydomonas sp.
  misc_feature (1)..(510): Homolog of NCBI NO: 5902706 NR Description: Zeaxanthin epoxidase, chloroplast precursor
  misc_feature (1)..(510): Homolog of NCBI NO: 9857294 NR Description: CpABA1 [Vigna unguiculata]
  misc_feature (1)..(510): Homolog of NCBI NO: 5902707 NR Description: Zeaxanthin epoxidase, chloroplast precursor
  misc_feature (1)..(518): Homolog of NCBI NO: 17402597 NR Description: zeaxanthin epoxidase [Citrus unshiu]
  misc_feature (1)..(508): Homolog of NCBI NO: 5902708 NR Description: Zeaxanthin epoxidase, chloroplast precursor
  misc_feature (1)..(347): Homolog of NCBI NO: 19698915 NR Description: zeaxanthin epoxidase precursor [Arabidopsis
MEAGCITGDRINGLVDGISGTWYVKFDTFTPAASRGLPVTRVISRMTLQQILARAVGEDVIRNESNVVDFEDSGDKVTVVLENGQRYEGDLLVGADGIWSKVRNNLFGRSEATYSGYTCYTGIADFIPADIESVGYRVFLGHKQYFVSSDVGGGKMQWYAFHEEPAGGADAPNGMKKRLFEIFDGWCDNVLDLLHATEEEAILRRDIYDRSPGFTWGKGRVTLLGDSIHAMQPNMGQGGCMAIEDSFQLALELDEAWKQSVETTTPVDVVSSLKRYEESRRLRVAIIHAMARMAAIMASTYKAYLGVGLGPLSFLTKFRVPHPGRVGGRFFVDIAMPSMLDWVLGGNSEKLQGRPPSCRLTDKADDRLREWFEDDDALERTIKGEWYLIPHGDDCCVSETLCLTKDEDQPCIVGSEPDQDFPGMRIVIPSSQVSKMHARVIYKDGAFFLMDLRSEHGTYVTDNEGRRYRATPNFPARFRSSDIIEFGSDKKAAFRVKVIRKTPKSTRKNESNNDKLLQTA

SEQ ID NO: 49001 - protein, 475 aa, Arabidopsis thaliana
  peptide (1)..(475): Ceres Seq. ID no. 12578073
  misc_feature (43)..(247): Pfam Name: Monooxygenase Pfam Description: Monooxygenase
  misc_feature (1)..(205): Homolog of NCBI NO: 21219844 NR Description: putative monooxygenase (putative secreted
  misc_feature (82)..(181): Homolog of NCBI NO: 30523256 NR Description: zeoxanthin epoxidase [Poncirus trifoliata]
  misc_feature (1)..(348): Homolog of NCBI NO: 28629442 NR Description: zeaxanthin epoxidase precursor [Chlamydomonas
  misc_feature (1)..(344): Homolog of NCBI NO: 28883203 NR Description: zeaxanthin epoxidase precursor [Chlamydomonas sp.
  misc_feature (1)..(465): Homolog of NCBI NO: 5902706 NR Description: Zeaxanthin epoxidase, chloroplast precursor
  misc_feature (1)..(465): Homolog of NCBI NO: 9857294 NR Description: CpABA1 [Vigna unguiculata]
  misc_feature (1)..(465): Homolog of NCBI NO: 5902707 NR Description: Zeaxanthin epoxidase, chloroplast precursor
  misc_feature (1)..(473): Homolog of NCBI NO: 17402597 NR Description: zeaxanthin epoxidase [Citrus unshiu]
  misc_feature (1)..(463): Homolog of NCBI NO: 5902708 NR Description: Zeaxanthin epoxidase, chloroplast precursor
  misc_feature (1)..(302): Homolog of NCBI NO: 19698915 NR Description: zeaxanthin epoxidase precursor [Arabidopsis
MTLQQILARAVGEDVIRNESNVVDFEDSGDKVTVVLENGQRYEGDLLVGADGIWSKVRNNLFGRSEATYSGYTCYTGIADFIPADIESVGYRVFLGHKQYFVSSDVGGGKMQWYAFHEEPAGGADAPNGMKKRLFEIFDGWCDNVLDLLHATEEEAILRRDIYDRSPGFTWGKGRVTLLGDSIHAMQPNMGQGGCMAIEDSFQLALELDEAWKQSVETTTPVDVVSSLKRYEESRRLRVAIIHAMARMAAIMASTYKAYLGVGLGPLSFLTKFRVPHPGRVGGRFFVDIAMPSMLDWVLGGNSEKLQGRPPSCRLTDKADDRLREWFEDDDALERTIKGEWYLIPHGDDCCVSETLCLTKDEDQPCIVGSEPDQDFPGMRIVIPSSQVSKMHARVIYKDGAFFLMDLRSEHGTYVTDNEGRRYRATPNFPARFRSSDIIEFGSDKKAAFRVKVIRKTPKSTRKNESNNDKLLQTA

SEQ ID NO: 49002 - DNA, 1566 bp, Arabidopsis thaliana
  misc_feature (1)..(1566): Ceres Seq. ID no. 12578221
  misc_feature: MA Experiment ID: 20000173 Result: Down-regulated in Transcription
  misc_feature: MA Experiment 20000173 PARAMETER Experiment Name: At_42deg_Heat_P Parameter: Age (day) Value: 14
  misc_feature: MA Experiment 20000173 PARAMETER Experiment Name: At_42deg_Heat_P Parameter: Organism Value: A. thaliana
  misc_feature: MA Experiment 20000173 PARAMETER Experiment Name: At_42deg_Heat_P Parameter: Plant Line Value: WS
  misc_feature: MA Experiment 20000173 PARAMETER Experiment Name: At_42deg_Heat_P Parameter: Temperature (deg C) Value: 42 vs. 22
  misc_feature: MA Experiment 20000173 PARAMETER Experiment Name: At_42deg_Heat_P Parameter: Timepoint (hr) Value: 6
  misc_feature: MA Experiment 20000173 PARAMETER Experiment Name: At_42deg_Heat_P Parameter: Tissue Value: Aerial
  misc_feature: MA Experiment ID: 20000180 Result: Up-regulated in Transcription
  misc_feature: MA Experiment 20000180 PARAMETER Experiment Name: At_Germinating_Seeds_P Parameter: Age (hr) Value: 24 vs. 0
  misc_feature: MA Experiment 20000180 PARAMETER Experiment Name: At_Germinating_Seeds_P Parameter: Tissue Value: Germinating Seeds
  misc_feature: MA Experiment ID: 20000184 Result: Down-regulated in Transcription
  misc_feature: MA Experiment 20000184 PARAMETER Experiment Name: At_Shoots__P Parameter: Age (day) Value: 7
  misc_feature: MA Experiment 20000184 PARAMETER Experiment Name: At_Shoots__P Parameter: Tissue Value: Shoots vs. Whole Plant
  misc_feature: MA Experiment ID: 20000211 Result: Up-regulated in Transcription
  misc_feature: MA Experiment 20000211 PARAMETER Experiment Name: At_0.001percent_MeJA__P Parameter: Age (day) Value: 14
  misc_feature: MA Experiment 20000211 PARAMETER Experiment Name: At_0.001percent_MeJA__P Parameter: Organism Value: A. thaliana
  misc_feature: MA Experiment 20000211 PARAMETER Experiment Name: At_0.001percent_MeJA__P Parameter: Plant Line Value: WS
  misc_feature: MA Experiment 20000211 PARAMETER Experiment Name: At_0.001percent_MeJA__P Parameter: Timepoint (hr) Value: 1
  misc_feature: MA Experiment 20000211 PARAMETER Experiment Name: At_0.001percent_MeJA__P Parameter: Tissue Value: Aerial
  misc_feature: MA Experiment 20000211 PARAMETER Experiment Name: At_0.001percent_MeJA__P Parameter: Treatment Value: 0.001percent MeJA vs. No Treatment
  misc_feature: MA Experiment ID: 20000234 Result: Down-regulated in Transcription
  misc_feature: MA Experiment 20000234 PARAMETER Experiment Name: At_Siliques_P Parameter: Age (day) Value: 21
  misc_feature: MA Experiment 20000234 PARAMETER Experiment Name: At_Siliques_P Parameter: Organism Value: A. thaliana
  misc_feature: MA Experiment 20000234 PARAMETER Experiment Name: At_Siliques_P Parameter: Plant Line Value: WS
  misc_feature: MA Experiment 20000234 PARAMETER Experiment Name: At_Siliques_P Parameter: Tissue Value: Less Than 5mm Siliques vs. Whole Plant
  misc_feature: MA Experiment ID: 20000264 Result: Down-regulated in Transcription
  misc_feature: MA Experiment 20000264 PARAMETER Experiment Name: At_Open_Flower_P Parameter: Age (day) Value: 21
  misc_feature: MA Experiment 20000264 PARAMETER Experiment Name: At_Open_Flower_P Parameter: Plant Line Value: WS
  misc_feature: MA Experiment 20000264 PARAMETER Experiment Name: At_Open_Flower_P Parameter: Tissue Value: Open Flower vs. Whole Plant
  misc_feature: MA Experiment ID: 20000286 Result: Down-regulated in Transcription
  misc_feature: MA Experiment 20000286 PARAMETER Experiment Name: At_Open_Flower_P Parameter: Age (day) Value: 21
  misc_feature: MA Experiment 20000286 PARAMETER Experiment Name: At_Open_Flower_P Parameter: Plant Line Value: WS
  misc_feature: MA Experiment 20000286 PARAMETER Experiment Name: At_Open_Flower_P Parameter: Tissue Value: Half Open vs. Whole Plant
  misc_feature: MA Experiment ID: 20000437 Result: Down-regulated in Transcription
  misc_feature: MA Experiment 20000437 PARAMETER Experiment Name: At_Drought_P Parameter: Age (day) Value: 8
  misc_feature: MA Experiment 20000437 PARAMETER Experiment Name: At_Drought_P Parameter: Organism Value: A. thaliana
  misc_feature: MA Experiment 20000437 PARAMETER Experiment Name: At_Drought_P Parameter: Plant Line Value: WS
  misc_feature: MA Experiment 20000437 PARAMETER Experiment Name: At_Drought_P Parameter: Timepoint (hr) Value: 24
  misc_feature: MA Experiment 20000437 PARAMETER Experiment Name: At_Drought_P Parameter: Tissue Value: Whole Plant
  misc_feature: MA Experiment 20000437 PARAMETER Experiment Name: At_Drought_P Parameter: Treatment Value: Drought vs. No Drought
  misc_feature: MA Experiment ID: 20000794 Result: Down-regulated in Transcription
  misc_feature: MA Experiment 20000794 PARAMETER Experiment Name: At_Petals_P Parameter: Age (day) Value: 23-25 days
  misc_feature: MA Experiment 20000794 PARAMETER Experiment Name: At_Petals_P Parameter: Plant Line Value: WS
  misc_feature: MA Experiment 20000794 PARAMETER Experiment Name: At_Petals_P Parameter: Tissue Value: Petals vs. Whole plant
  misc_feature: MA Experiment ID: 20001450 Result: Down-regulated in Transcription
  misc_feature: MA Experiment 20001450 PARAMETER Experiment Name: At_Far-red-induction_P Parameter: Age (day) Value: 7
  misc_feature: MA Experiment 20001450 PARAMETER Experiment Name: At_Far-red-induction_P Parameter: Light Value: Far-red vs. White
  misc_feature: MA Experiment 20001450 PARAMETER Experiment Name: At_Far-red-induction_P Parameter: Organism Value: A. thaliana
  misc_feature: MA Experiment 20001450 PARAMETER Experiment Name: At_Far-red-induction_P Parameter: Plant Line Value: Columbia
  misc_feature: MA Experiment 20001450 PARAMETER Experiment Name: At_Far-red-induction_P Parameter: Timepoint (hr) Value: 8
  misc_feature: MA Experiment 20001450 PARAMETER Experiment Name: At_Far-red-induction_P Parameter: Tissue Value: Whole Plant
  misc_feature: MA Experiment ID: 20001451 Result: Down-regulated in Transcription
  misc_feature: MA Experiment 20001451 PARAMETER Experiment Name: At_Far-red-induction_P Parameter: Age (day) Value: 7
  misc_feature: MA Experiment 20001451 PARAMETER Experiment Name: At_Far-red-induction_P Parameter: Light Value: Far-red vs. White
  misc_feature: MA Experiment 20001451 PARAMETER Experiment Name: At_Far-red-induction_P Parameter: Organism Value: A. thaliana
  misc_feature: MA Experiment 20001451 PARAMETER Experiment Name: At_Far-red-induction_P Parameter: Plant Line Value: Columbia
  misc_feature: MA Experiment 20001451 PARAMETER Experiment Name: At_Far-red-induction_P Parameter: Timepoint (hr) Value: 24
  misc_feature: MA Experiment 20001451 PARAMETER Experiment Name: At_Far-red-induction_P Parameter: Tissue Value: Whole Plant
  misc_feature: MA Experiment ID: 20001556 Result: Down-regulated in Transcription
  misc_feature: MA Experiment 20001556 PARAMETER Experiment Name: At_Drought_Soil_Dry_P Parameter: Age (day) Value: 26
  misc_feature: MA Experiment 20001556 PARAMETER Experiment Name: At_Drought_Soil_Dry_P Parameter: Organism Value: A. thaliana
  misc_feature: MA Experiment 20001556 PARAMETER Experiment Name: At_Drought_Soil_Dry_P Parameter: Plant Line Value: WS
  misc_feature: MA Experiment 20001556 PARAMETER Experiment Name: At_Drought_Soil_Dry_P Parameter: Post Timepoint (hr) Value: None
  misc_feature: MA Experiment 20001556 PARAMETER Experiment Name: At_Drought_Soil_Dry_P Parameter: Post-Treatment Value: None
  misc_feature: MA Experiment 20001556 PARAMETER Experiment Name: At_Drought_Soil_Dry_P Parameter: Timepoint (day) Value: 12
  misc_feature: MA Experiment 20001556 PARAMETER Experiment Name: At_Drought_Soil_Dry_P Parameter: Treatment Value: Drought vs. No Drought
  misc_feature: MA Experiment ID: 20001905 Result: Down-regulated in Transcription
  misc_feature: MA Experiment 20001905 PARAMETER Experiment Name: At_Drought_Reproduction_P Parameter: Age (day) Value: 40
  misc_feature: MA Experiment 20001905 PARAMETER Experiment Name: At_Drought_Reproduction_P Parameter: Organism Value: A. thaliana
  misc_feature: MA Experiment 20001905 PARAMETER Experiment Name: At_Drought_Reproduction_P Parameter: Plant Line Value: WS
  misc_feature: MA Experiment 20001905 PARAMETER Experiment Name: At_Drought_Reproduction_P Parameter: Timepoint (day) Value: 10
  misc_feature: MA Experiment 20001905 PARAMETER Experiment Name: At_Drought_Reproduction_P Parameter: Tissue Value: Rosettes
  misc_feature: MA Experiment 20001905 PARAMETER Experiment Name: At_Drought_Reproduction_P Parameter: Treatment Value: Drought vs. No Drought
gtcttcaacactttatcatcttcaattgaaaaaaaaaaaaaaatcaacccaaagctctgcttcgttgagctaaaacaatggcggaaacaactcccaaagtgaaaggccacgtcgtaatcttaccatacccagttcaaggccacctaaacccaatggttcaattcgctaaacgtctagtctccaaaaacgtcaaagtcacaatcgccaccactacctacaccgcctcctcaatcacaacaccatcactctccgtcgaaccaatctccgatggattcgatttcatccccataggtatccccggtttcagcgtcgatacttactcagaatccttcaagctcaacggatccgaaaccctaactctcctaatcgagaaattcaaatccacagattcaccaatcgattgcttaatctacgattcgtttcttccttggggacttgaagttgctagatctatggaactttcagctgcttctttcttcactaataatctcactgtttgttctgtgttgcgtaaattctctaacggtgactttcctcttcccgctgatcctaattcggcgccgtttcgtatccgtggcttaccgtctttgagctacgatgagttaccttcgtttgtgggacgtcattggttgactcatcctgagcatggcagagttcttctgaatcagtttcctaaccatgaaaatgctgattggttattcgttaatggctttgaagggttagaagaaacacaagattgtgaaaatggtgagtctgatgcaatgaaggcgacgttgatcggaccgatgattccatcggcttatcttgatgatcggatggaagatgataaagactatggtgcgagtctgttgaaaccgatatcgaaggagtgtatggagtggcttgagactaagcaggctcagtcagtagcatttgtttcgtttggttcgtttgggattctctttgagaagcaacttgcagaggtagctattgcgctacaagaatcggatttgaacttcttgtgggtgattaaagaagctcatatagcgaaattgcctgaagggtttgtggaatcgactaaagatagagccttgttggtttcttggtgtaaccagcttgaggttttagctcatgaatcgataggttgctttttgactcattgtggttggaactctacgttggaagggttgagtttgggagttccgatggttggtgtgcctcagtggagtgatcagatgaatgatgctaagtttgtggaggaagtttggaaagttgggtatagagcgaaagaggaagctggggaagtaatcgtgaagagtgaagaattggtgaggtgtttgaaaggagtgatggaaggagagagtagtgtgaagattagagagagttcgaagaagtggaaagatttggctgtgaaggcaatgagtgaaggaggaagctctgatcgaagcattaacgagtttatagagagtttagggaagtaacattattgattcaactttgtaaatcatgaaatgtaagtgtttgttgatgttgtataagagcattgtaccacgatgactgtgattcaataataaaccaattgtgatt

SEQ ID NO: 49003 - protein, 460 aa, Arabidopsis thaliana
  peptide (1)..(460): Ceres Seq. ID no. 12578222
  misc_feature (10)..(460): Pfam Name: UDP-glucoronosyl and UDP-glucosyl transferase Pfam Description: UDP-glucoronosyl and UDP-glucosyl transferase
  misc_feature (9)..(455): Homolog of NCBI NO: 33114570 NR Description: glucosyltransferase 2 [Crocus sativus]
  misc_feature (7)..(458): Homolog of NCBI NO: 21536917 NR Description: putative glucosyltransferase [Arabidopsis
  misc_feature (7)..(458): Homolog of NCBI NO: 15225134 NR Description: putative glucosyltransferase
  misc_feature (9)..(458): Homolog of NCBI NO: 15225138 NR Description: UDP-glycosyltransferase family
  misc_feature (9)..(455): Homolog of NCBI NO: 15224368 NR Description: putative glucosyltransferase
  misc_feature (11)..(455): Homolog of NCBI NO: 15221233 NR Description: putative indole-3-acetate beta-glucosyltransferase
  misc_feature (7)..(458): Homolog of NCBI NO: 15224372 NR Description: putative glucosyltransferase; protein id:
  misc_feature (9)..(458): Homolog of NCBI NO: 7385017 NR Description: UDP-glucose:salicylic acid glucosyltransferase
  misc_feature (1)..(460): Homolog of NCBI NO: 15824451 NR Description: thiohydroximate S-glucosyltransferase [Brassica
  misc_feature (1)..(460): Homolog of NCBI NO: 15221668 NR Description: UDP-glycosyltransferase family
MAETTPKVKGHVVILPYPVQGHLNPMVQFAKRLVSKNVKVTIATTTYTASSITTPSLSVEPISDGFDFIPIGIPGFSVDTYSESFKLNGSETLTLLIEKFKSTDSPIDCLIYDSFLPWGLEVARSMELSAASFFTNNLTVCSVLRKFSNGDFPLPADPNSAPFRIRGLPSLSYDELPSFVGRHWLTHPEHGRVLLNQFPNHENADWLFVNGFEGLEETQDCENGESDAMKATLIGPMIPSAYLDDRMEDDKDYGASLLKPISKECMEWLETKQAQSVAFVSFGSFGILFEKQLAEVAIALQESDLNFLWVIKEAHIAKLPEGFVESTKDRALLVSWCNQLEVLAHESIGCFLTHCGWNSTLEGLSLGVPMVGVPQWSDQMNDAKFVEEVWKVGYRAKEEAGEVIVKSEELVRCLKGVMEGESSVKIRESSKKWKDLAVKAMSEGGSSDRSINEFIESLGK

SEQ ID NO: 49004 - protein, 435 aa, Arabidopsis thaliana
  peptide (1)..(435): Ceres Seq. ID no. 12578223
  misc_feature (1)..(435): Pfam Name: UDP-glucoronosyl and UDP-glucosyl transferase Pfam Description: UDP-glucoronosyl and UDP-glucosyl transferase
  misc_feature (1)..(430): Homolog of NCBI NO: 33114570 NR Description: glucosyltransferase 2 [Crocus sativus]
  misc_feature (1)..(433): Homolog of NCBI NO: 21536917 NR Description: putative glucosyltransferase [Arabidopsis
  misc_feature (1)..(433): Homolog of NCBI NO: 15225134 NR Description: putative glucosyltransferase
  misc_feature (1)..(433): Homolog of NCBI NO: 15225138 NR Description: UDP-glycosyltransferase family
  misc_feature (1)..(430): Homolog of NCBI NO: 15224368 NR Description: putative glucosyltransferase
  misc_feature (1)..(430): Homolog of NCBI NO: 15221233 NR Description: putative indole-3-acetate beta-glucosyltransferase
  misc_feature (1)..(433): Homolog of NCBI NO: 15224372 NR Description: putative glucosyltransferase; protein id:
  misc_feature (1)..(433): Homolog of NCBI NO: 7385017 NR Description: UDP-glucose:salicylic acid glucosyltransferase
  misc_feature (1)..(435): Homolog of NCBI NO: 15824451 NR Description: thiohydroximate S-glucosyltransferase [Brassica
  misc_feature (1)..(435): Homolog of NCBI NO: 15221668 NR Description: UDP-glycosyltransferase family
MVQFAKRLVSKNVKVTIATTTYTASSITTPSLSVEPISDGFDFIPIGIPGFSVDTYSESFKLNGSETLTLLIEKFKSTDSPIDCLIYDSFLPWGLEVARSMELSAASFFTNNLTVCSVLRKFSNGDFPLPADPNSAPFRIRGLPSLSYDELPSFVGRHWLTHPEHGRVLLNQFPNHENADWLFVNGFEGLEETQDCENGESDAMKATLIGPMIPSAYLDDRMEDDKDYGASLLKPISKECMEWLETKQAQSVAFVSFGSFGILFEKQLAEVAIALQESDLNFLWVIKEAHIAKLPEGFVESTKDRALLVSWCNQLEVLAHESIGCFLTHCGWNSTLEGLSLGVPMVGVPQWSDQMNDAKFVEEVWKVGYRAKEEAGEVIVKSEELVRCLKGVMEGESSVKIRESSKKWKDLAVKAMSEGGSSDRSINEFIESLGK

SEQ ID NO: 49005 - protein, 335 aa, Arabidopsis thaliana
  peptide (1)..(335): Ceres Seq. ID no. 12578224
  misc_feature (1)..(335): Pfam Name: UDP-glucoronosyl and UDP-glucosyl transferase Pfam Description: UDP-glucoronosyl and UDP-glucosyl transferase
  misc_feature (1)..(330): Homolog of NCBI NO: 33114570 NR Description: glucosyltransferase 2 [Crocus sativus]
  misc_feature (1)..(333): Homolog of NCBI NO: 21536917 NR Description: putative glucosyltransferase [Arabidopsis
  misc_feature (1)..(333): Homolog of NCBI NO: 15225134 NR Description: putative glucosyltransferase
  misc_feature (1)..(333): Homolog of NCBI NO: 15225138 NR Description: UDP-glycosyltransferase family
  misc_feature (1)..(330): Homolog of NCBI NO: 15224368 NR Description: putative glucosyltransferase
  misc_feature (1)..(330): Homolog of NCBI NO: 15221233 NR Description: putative indole-3-acetate beta-glucosyltransferase
  misc_feature (1)..(333): Homolog of NCBI NO: 15224372 NR Description: putative glucosyltransferase; protein id:
  misc_feature (1)..(333): Homolog of NCBI NO: 7385017 NR Description: UDP-glucose:salicylic acid glucosyltransferase
  misc_feature (1)..(335): Homolog of NCBI NO: 15824451 NR Description: thiohydroximate S-glucosyltransferase [Brassica
  misc_feature (1)..(335): Homolog of NCBI NO: 15221668 NR Description: UDP-glycosyltransferase family
MELSAASFFTNNLTVCSVLRKFSNGDFPLPADPNSAPFRIRGLPSLSYDELPSFVGRHWLTHPEHGRVLLNQFPNHENADWLFVNGFEGLEETQDCENGESDAMKATLIGPMIPSAYLDDRMEDDKDYGASLLKPISKECMEWLETKQAQSVAFVSFGSFGILFEKQLAEVAIALQESDLNFLWVIKEAHIAKLPEGFVESTKDRALLVSWCNQLEVLAHESIGCFLTHCGWNSTLEGLSLGVPMVGVPQWSDQMNDAKFVEEVWKVGYRAKEEAGEVIVKSEELVRCLKGVMEGESSVKIRESSKKWKDLAVKAMSEGGSSDRSINEFIESLGK

SEQ ID NO: 49006 - DNA, 2773 bp, Arabidopsis thaliana
  misc_feature (1)..(2773): Ceres Seq. ID no. 12604179
  misc_feature: MA Experiment ID: 20000437 Result: Up-regulated in Transcription
  misc_feature: MA Experiment 20000437 PARAMETER Experiment Name: At_Drought_P Parameter: Age (day) Value: 8
  misc_feature: MA Experiment 20000437 PARAMETER Experiment Name: At_Drought_P Parameter: Organism Value: A. thaliana
  misc_feature: MA Experiment 20000437 PARAMETER Experiment Name: At_Drought_P Parameter: Plant Line Value: WS
  misc_feature: MA Experiment 20000437 PARAMETER Experiment Name: At_Drought_P Parameter: Timepoint (hr) Value: 24
  misc_feature: MA Experiment 20000437 PARAMETER Experiment Name: At_Drought_P Parameter: Tissue Value: Whole Plant
  misc_feature: MA Experiment 20000437 PARAMETER Experiment Name: At_Drought_P Parameter: Treatment Value: Drought vs. No Drought
  misc_feature: MA Experiment ID: 20000496 Result: Up-regulated in Transcription
  misc_feature: MA Experiment 20000496 PARAMETER Experiment Name: At_Guard_Cells_P Parameter: Harvest Date Value: 7/19/2002
  misc_feature: MA Experiment 20000496 PARAMETER Experiment Name: At_Guard_Cells_P Parameter: Organism Value: Canola
  misc_feature: MA Experiment 20000496 PARAMETER Experiment Name: At_Guard_Cells_P Parameter: Tissue Value: Guard Cells vs. Leaves
aaaacgaaactcaagtcaatgaataaaaagacgaaacaatgctatgataagaaaagaaacaacactcgaaaaagttcttctttttcttccgcacatgtctgactctctcataagcgtaaatcgctctgtcaaatatctctgaccagagagacagagttgcctccacgtttcttcagacaagactcacgctcttccctttcaccacattcccttctccatttctcaatctcacttaccttctcgattcttgctccaatttcgaatcttccgagtgaaaaaagcttcaaagtttggaactttctagtgtttattaatctgggtctgctctgagtttcgtgtgtagctgcatatgagcttaaagctcgagtttttccatctgggtttggaattctagggctagtgattggagattttgggaatttaggttgattttagtaggtttgacttcaggttgcgtaatttaggttgattttgatccgatttgtggaattagggtttgtttgttcacaaagcttcaatttttggagtttaaatggatcgataacgactgtgttagaagaaagtttgctgcttcagattcgtattcgatatagaaatgagtttggttcctcctttaccgattttatcaccaccgtcgtcaaattcttcaacaactgcacctcctccgttacagactcagcccaccactccatctgctccacctccggttacaccacctccttctccgccgcaatctccgccgccggttgtatcatcatcaccaccaccaccggttgtttcgtcacctccaccgtcttcttctccaccaccgtcacctcctgtcatcacttcacctcctcccaccgttgcttcttcccctccacctcctgtggtgattgcttcccctcctccctcaactccggcgacaacaccaccagctcctccgcaaactgtctcacctccaccgcctcctgatgcttctccatcacctcccgcaccaacaacaacaaatcctcctcctaaaccttctccttcaccgccgggagaaacaccttcaccaccgggagaaacaccttcaccgcctaaaccttctccgtcaactccaactccaacaacaaccacatctcctcctcctcctccagctacctctgcttctcctccgtcttcaaatcctactgatccttctacgttagctcctcctccaactccattacctgttgttcccagagagaaaccaattgctaaaccaactggaccagcttcaaacaatggaaacaacactttgccgtctagttcaccaggtaaaagcgaagttggtactggaggtattgtagctatcggagtgattgtgggattggtttttcttagcctttttgtgatgggtgtgtggttcactcggaaacgaaagcgaaaggaccctggaacctttgttggatacacaatgcctccttccgcttattcatctcctcaaggctcagatgtagtgctcttcaactcgcgttcttcagctcctcctaaaatgagaagccattctggtagcgattacatgtatgcgtcatctgattcaggcatggttagcaaccaaagatcatggttttcatatgatgagttatctcaagttaccagtgggttctccgagaagaatcttctcggtgaaggagggtttggctgtgtatacaaaggcgttctttctgacggaagggaagtggcagttaaacagttaaagattggtggaagccaaggggagagagagttcaaagcagaagttgaaatcatttctcgggttcatcaccgccatttggttacactagttggttattgcatctcagagcaacataggttgcttgtatatgattatgtacctaacaacactctccattatcatctccatgctccaggaagaccagttatgacttgggaaactcgggtaagggtcgctgctggtgcagctcgtggaatcgcctacttacatgaagactgtcatccccgcattattcaccgtgacataaaatcttccaacatacttcttgataacagctttgaagccttggttgcggattttggacttgcaaaaattgcacaagaactggatttaaacacacacgtctcaacgcgcgtaatgggaacctttgggtacatggctcctgaatatgcaacaagtggaaagctgtctgaaaaagcagatgtttattcgtatggggtaatactgttggagcttataactggccgtaaacccgtagatacgtctcaaccacttggtgatgagagccttgttgaatgggcaagacccttgctgggtcaagcaatcgagaacgaagaattcgacgagctagtagatccgaggctagggaaaaacttcatcccaggagagatgttcagaatggtagaagctgcggctgcatgtgtccgccactcagctgcaaaaagaccaaagatgagtcaagtggtgagagctttggacacacttgaagaagcaacggacataaccaacggaatgagaccaggacagagccaagtgtttgactcgagacaacaatctgctcagataaggatgtttcaaagaatggcttttgggagtcaagattatagttctgacttctttgatcgctcacagtcacatagtagctggggcagtcgtgaccagtccagatttgtaccttagtagtttttattgcctttgcttctttcttctttccctttaaacatgtcctcgatcttgtatattcttttgcatgatataatgtatttttgaaatatacatacatacacacataaaatttggtagtcttttgaa

SEQ ID NO: 49007 - protein, 681 aa, Arabidopsis thaliana
  peptide (1)..(681): Ceres Seq. ID no. 12604180
  misc_feature (339)..(540): Pfam Name: Protein kinase domain Pfam Description: Protein kinase domain
  misc_feature (77)..(300): Homolog of NCBI NO: 13447449 NR Description: receptor protein kinase PERK1 [Brassica napus]
  misc_feature (52)..(178): Homolog of NCBI NO: 13447449 NR Description: receptor protein kinase PERK1 [Brassica napus]
  misc_feature (299)..(659): Homolog of NCBI NO: 13447449 NR Description: receptor protein kinase PERK1 [Brassica napus]
  misc_feature (1)..(677): Homolog of NCBI NO: 25518375 NR Description: hypothetical protein F5O8.10 - Arabidopsis
  misc_feature (17)..(660): Homolog of NCBI NO: 15218591 NR Description: protein kinase, putative; protein id: At1g10620.1
  misc_feature (19)..(637): Homolog of NCBI NO: 15230108 NR Description: protein kinase, putative; protein id: At3g24400.1
  misc_feature (11)..(675): Homolog of NCBI NO: 15230108 NR Description: protein kinase, putative; protein id: At3g24400.1
  misc_feature (5)..(677): Homolog of NCBI NO: 15223161 NR Description: putative protein kinase; protein id: At1g70460.1
  misc_feature (1)..(677): Homolog of NCBI NO: 15222649 NR Description: Pto kinase interactor, putative; protein id:
  misc_feature (5)..(675): Homolog of NCBI NO: 15221470 NR Description: protein kinase, putative
MSLVPPLPILSPPSSNSSTTAPPPLQTQPTTPSAPPPVTPPPSPPQSPPPVVSSSPPPPVVSSPPPSSSPPPSPPVITSPPPTVASSPPPPVVIASPPPSTPATTPPAPPQTVSPPPPPDASPSPPAPTTTNPPPKPSPSPPGETPSPPGETPSPPKPSPSTPTPTTTTSPPPPPATSASPPSSNPTDPSTLAPPPTPLPVVPREKPIAKPTGPASNNGNNTLPSSSPGKSEVGTGGIVAIGVIVGLVFLSLFVMGVWFTRKRKRKDPGTFVGYTMPPSAYSSPQGSDVVLFNSRSSAPPKMRSHSGSDYMYASSDSGMVSNQRSWFSYDELSQVTSGFSEKNLLGEGGFGCVYKGVLSDGREVAVKQLKIGGSQGEREFKAEVEIISRVHHRHLVTLVGYCISEQHRLLVYDYVPNNTLHYHLHAPGRPVMTWETRVRVAAGAARGIAYLHEDCHPRIIHRDIKSSNILLDNSFEALVADFGLAKIAQELDLNTHVSTRVMGTFGYMAPEYATSGKLSEKADVYSYGVILLELITGRKPVDTSQPLGDESLVEWARPLLGQAIENEEFDELVDPRLGKNFIPGEMFRMVEAAAACVRHSAAKRPKMSQVVRALDTLEEATDITNGMRPGQSQVFDSRQQSAQIRMFQRMAFGSQDYSSDFFDRSQSHSSWGSRDQSRFVP

SEQ ID NO: 49008 - protein, 427 aa, Arabidopsis thaliana
  peptide (1)..(427): Ceres Seq. ID no. 12604181
  misc_feature (85)..(286): Pfam Name: Protein kinase domain Pfam Description: Protein kinase domain
  misc_feature (45)..(405): Homolog of NCBI NO: 15230130 NR Description: protein kinase, putative
  misc_feature (1)..(46): Homolog of NCBI NO: 13447449 NR Description: receptor protein kinase PERK1 [Brassica napus]
  misc_feature (45)..(405): Homolog of NCBI NO: 13447449 NR Description: receptor protein kinase PERK1 [Brassica napus]
  misc_feature (1)..(423): Homolog of NCBI NO: 25518375 NR Description: hypothetical protein F5O8.10 - Arabidopsis
  misc_feature (1)..(406): Homolog of NCBI NO: 15218591 NR Description: protein kinase, putative; protein id: At1g10620.1
  misc_feature (1)..(383): Homolog of NCBI NO: 15230108 NR Description: protein kinase, putative; protein id: At3g24400.1
  misc_feature (1)..(421): Homolog of NCBI NO: 15230108 NR Description: protein kinase, putative; protein id: At3g24400.1
  misc_feature (1)..(423): Homolog of NCBI NO: 15223161 NR Description: putative protein kinase; protein id: At1g70460.1
  misc_feature (1)..(423): Homolog of NCBI NO: 15222649 NR Description: Pto kinase interactor, putative; protein id:
  misc_feature (1)..(421): Homolog of NCBI NO: 15221470 NR Description: protein kinase, putative
MGVWFTRKRKRKDPGTFVGYTMPPSAYSSPQGSDVVLFNSRSSAPPKMRSHSGSDYMYASSDSGMVSNQRSWFSYDELSQVTSGFSEKNLLGEGGFGCVYKGVLSDGREVAVKQLKIGGSQGEREFKAEVEIISRVHHRHLVTLVGYCISEQHRLLVYDYVPNNTLHYHLHAPGRPVMTWETRVRVAAGAARGIAYLHEDCHPRIIHRDIKSSNILLDNSFEALVADFGLAKIAQELDLNTHVSTRVMGTFGYMAPEYATSGKLSEKADVYSYGVILLELITGRKPVDTSQPLGDESLVEWARPLLGQAIENEEFDELVDPRLGKNFIPGEMFRMVEAAAACVRHSAAKRPKMSQVVRALDTLEEATDITNGMRPGQSQVFDSRQQSAQIRMFQRMAFGSQDYSSDFFDRSQSHSSWGSRDQSRFVP

SEQ ID NO: 49009 - protein, 406 aa, Arabidopsis thaliana
  peptide (1)..(406): Ceres Seq. ID no. 12604182
  misc_feature (64)..(265): Pfam Name: Protein kinase domain Pfam Description: Protein kinase domain
  misc_feature (24)..(384): Homolog of NCBI NO: 15230130 NR Description: protein kinase, putative
  misc_feature (1)..(25): Homolog of NCBI NO: 13447449 NR Description: receptor protein kinase PERK1 [Brassica napus]
  misc_feature (24)..(384): Homolog of NCBI NO: 13447449 NR Description: receptor protein kinase PERK1 [Brassica napus]
  misc_feature (1)..(402): Homolog of NCBI NO: 25518375 NR Description: hypothetical protein F5O8.10 - Arabidopsis
  misc_feature (1)..(385): Homolog of NCBI NO: 15218591 NR Description: protein kinase, putative; protein id: At1g10620.1
  misc_feature (1)..(362): Homolog of NCBI NO: 15230108 NR Description: protein kinase, putative; protein id: At3g24400.1
  misc_feature (1)..(400): Homolog of NCBI NO: 15230108 NR Description: protein kinase, putative; protein id: At3g24400.1
  misc_feature (1)..(402): Homolog of NCBI NO: 15223161 NR Description: putative protein kinase; protein id: At1g70460.1
  misc_feature (1)..(402): Homolog of NCBI NO: 15222649 NR Description: Pto kinase interactor, putative; protein id:
  misc_feature (1)..(400): Homolog of NCBI NO: 15221470 NR Description: protein kinase, putative
MPPSAYSSPQGSDVVLFNSRSSAPPKMRSHSGSDYMYASSDSGMVSNQRSWFSYDELSQVTSGFSEKNLLGEGGFGCVYKGVLSDGREVAVKQLKIGGSQGEREFKAEVEIISRVHHRHLVTLVGYCISEQHRLLVYDYVPNNTLHYHLHAPGRPVMTWETRVRVAAGAARGIAYLHEDCHPRIIHRDIKSSNILLDNSFEALVADFGLAKIAQELDLNTHVSTRVMGTFGYMAPEYATSGKLSEKADVYSYGVILLELITGRKPVDTSQPLGDESLVEWARPLLGQAIENEEFDELVDPRLGKNFIPGEMFRMVEAAAACVRHSAAKRPKMSQVVRALDTLEEATDITNGMRPGQSQVFDSRQQSAQIRMFQRMAFGSQDYSSDFFDRSQSHSSWGSRDQSRFVP

SEQ ID NO: 49010 - DNA, 1138 bp, Arabidopsis thaliana
  misc_feature (1)..(1138): Ceres Seq. ID no. 12578074
  misc_feature: MA Experiment ID: 20000314 Result: Down-regulated in Transcription
  misc_feature: MA Experiment 20000314 PARAMETER Experiment Name: At_14day_Shoots-Roots_Sub_P Parameter: Age (day) Value: 14
  misc_feature: MA Experiment 20000314 PARAMETER Experiment Name: At_14day_Shoots-Roots_Sub_P Parameter: Organism Value: A. thaliana
  misc_feature: MA Experiment 20000314 PARAMETER Experiment Name: At_14day_Shoots-Roots_Sub_P Parameter: Plant Line Value: WS
  misc_feature: MA Experiment 20000314 PARAMETER Experiment Name: At_14day_Shoots-Roots_Sub_P Parameter: Tissue Value: Roots vs. Whole Plant
  misc_feature: MA Experiment ID: 20000355 Result: Down-regulated in Transcription
  misc_feature: MA Experiment 20000355 PARAMETER Experiment Name: At_Siliques_Sub_P Parameter: Age (day) Value: 21
  misc_feature: MA Experiment 20000355 PARAMETER Experiment Name: At_Siliques_Sub_P Parameter: Organism Value: A. thaliana
  misc_feature: MA Experiment 20000355 PARAMETER Experiment Name: At_Siliques_Sub_P Parameter: Plant Line Value: WS
  misc_feature: MA Experiment 20000355 PARAMETER Experiment Name: At_Siliques_Sub_P Parameter: Tissue Value: Less Than 5mm Siliques vs. Whole Plant
  misc_feature: MA Experiment ID: 20000440 Result: Down-regulated in Transcription
  misc_feature: MA Experiment 20000440 PARAMETER Experiment Name: At_Closed-Flower__Sub_P Parameter: Tissue Value: Closed Flower vs. Whole Plant
acgaccacacaaagtaattacaatggaacacagaaaggtaagagggaacggcatagacattcacgtagcaatccaaggtccctccgatggtcctatagtcctcctcctccatggtttccctgagctttggtactcatggcgccaccagatccctggactcgccgctcgtggctaccgtgccgtcgctcctgacctacgtggttacggtgactccgatgctcccgctgagatctcttcctacacatgcttcaacatcgttggtgacttaatcgccgtcatatccgccttaaccgcctcagaggatgagaaggtctttgtggttggacatgattggggagctctcatcgcttggtatttatgtctcttccgaccagatagagtcaaagctctggtcaacctcagtgttccgttctctttccggccaaccgatccatcggtgaagcccgttgatcgcatgcgtgctttctacggcgatgattactatatctgcaggtttcaggaatttggagatgtagaagctgagattgcagaggttggaacagagagagtcatgaagagactactcacttatagaactcctggaccggtaattatcccgaaggacaaaagtttttggggatccaaaggcgaaactataccactcccgtcttggctaacggaggaagatgttgcttacttcgtcagcaagtttgaagagaaaggcttctctggtccagtcaattactaccgtaacttcaacaggaacaatgagttgttgggtccatgggtgggaagcaaaatccaggttcctacaaagtttgtgataggggagcttgatctggtctactatatgcctggtgtgaaggaatatatacatggtccccagtttaaggaagatgtgcctttgcttgaagagcctgtggtcatggaaggagtggctcacttcattaaccaagaaaagcctcaggagattctccaaattatccttgatttcatctccaaattctaatgttgctttcccttaaattactcttttaatcaagttccataataagttgaattatgaggatatacatcctcatgtatggttgtatcatcctataacctatataatctatgtatggatgcgtgcatattatttgacattcttttaagttat

SEQ ID NO: 49011 - protein, 328 aa, Arabidopsis thaliana
  peptide (1)..(328): Ceres Seq. ID no. 12578075
  misc_feature (58)..(323): Pfam Name: alpha/beta hydrolase fold Pfam Description: alpha/beta hydrolase fold
  misc_feature (8)..(206): Homolog of NCBI NO: 16226396 NR Description: At2g26740/F18A8.11 [Arabidopsis thaliana]
  misc_feature (8)..(328): Homolog of NCBI NO: 22208300 NR Description: soluble epoxide hydrolase [Brassica napus]
  misc_feature (8)..(328): Homolog of NCBI NO: 15225782 NR Description: putative epoxide hydrolase; protein id:
  misc_feature (8)..(328): Homolog of NCBI NO: 15225781 NR Description: epoxide hydrolase (ATsEH)
RPHKVITMEHRKVRGNGIDIHVAIQGPSDGPIVLLLHGFPELWYSWRHQIPGLAARGYRAVAPDLRGYGDSDAPAEISSYTCFNIVGDLIAVISALTASEDEKVFVVGHDWGALIAWYLCLFRPDRVKALVNLSVPFSFRPTDPSVKPVDRMRAFYGDDYYICRFQEFGDVEAEIAEVGTERVMKRLLTYRTPGPVIIPKDKSFWGSKGETIPLPSWLTEEDVAYFVSKFEEKGFSGPVNYYRNFNRNNELLGPWVGSKIQVPTKFVIGELDLVYYMPGVKEYIHGPQFKEDVPLLEEPVVMEGVAHFINQEKPQEILQIILDFISKF

SEQ ID NO: 49012 - protein, 321 aa, Arabidopsis thaliana
  peptide (1)..(321): Ceres Seq. ID no. 12578076
  misc_feature (51)..(316): Pfam Name: alpha/beta hydrolase fold Pfam Description: alpha/beta hydrolase fold
  misc_feature (1)..(199): Homolog of NCBI NO: 16226396 NR Description: At2g26740/F18A8.11 [Arabidopsis thaliana]
  misc_feature (1)..(321): Homolog of NCBI NO: 22208300 NR Description: soluble epoxide hydrolase [Brassica napus]
  misc_feature (1)..(321): Homolog of NCBI NO: 15225782 NR Description: putative epoxide hydrolase; protein id:
  misc_feature (1)..(321): Homolog of NCBI NO: 15225781 NR Description: epoxide hydrolase (ATsEH)
MEHRKVRGNGIDIHVAIQGPSDGPIVLLLHGFPELWYSWRHQIPGLAARGYRAVAPDLRGYGDSDAPAEISSYTCFNIVGDLIAVISALTASEDEKVFVVGHDWGALIAWYLCLFRPDRVKALVNLSVPFSFRPTDPSVKPVDRMRAFYGDDYYICRFQEFGDVEAEIAEVGTERVMKRLLTYRTPGPVIIPKDKSFWGSKGETIPLPSWLTEEDVAYFVSKFEEKGFSGPVNYYRNFNRNNELLGPWVGSKIQVPTKFVIGELDLVYYMPGVKEYIHGPQFKEDVPLLEEPVVMEGVAHFINQEKPQEILQIILDFISKF

SEQ ID NO: 49013 - protein, 177 aa, Arabidopsis thaliana
  peptide (1)..(177): Ceres Seq. ID no. 12578077
  misc_feature (1)..(172): Pfam Name: alpha/beta hydrolase fold Pfam Description: alpha/beta hydrolase fold
  misc_feature (1)..(55): Homolog of NCBI NO: 16226396 NR Description: At2g26740/F18A8.11 [Arabidopsis thaliana]
  misc_feature (1)..(177): Homolog of NCBI NO: 22208300 NR Description: soluble epoxide hydrolase [Brassica napus]
  misc_feature (1)..(177): Homolog of NCBI NO: 15225782 NR Description: putative epoxide hydrolase; protein id:
  misc_feature (1)..(177): Homolog of NCBI NO: 15225781 NR Description: epoxide hydrolase (ATsEH)
MRAFYGDDYYICRFQEFGDVEAEIAEVGTERVMKRLLTYRTPGPVIIPKDKSFWGSKGETIPLPSWLTEEDVAYFVSKFEEKGFSGPVNYYRNFNRNNELLGPWVGSKIQVPTKFVIGELDLVYYMPGVKEYIHGPQFKEDVPLLEEPVVMEGVAHFINQEKPQEILQIILDFISKF

SEQ ID NO: 49014 - DNA, 1370 bp, Arabidopsis thaliana
  misc_feature (1)..(1370): Ceres Seq. ID no. 13592099
  misc_feature: MA Experiment ID: 20000327 Result: Down-regulated in Transcription
  misc_feature: MA Experiment 20000327 PARAMETER Experiment Name: At_42deg_Heat_Sub_P Parameter: Age (day) Value: 14
  misc_feature: MA Experiment 20000327 PARAMETER Experiment Name: At_42deg_Heat_Sub_P Parameter: Organism Value: A. thaliana
  misc_feature: MA Experiment 20000327 PARAMETER Experiment Name: At_42deg_Heat_Sub_P Parameter: Plant Line Value: WS
  misc_feature: MA Experiment 20000327 PARAMETER Experiment Name: At_42deg_Heat_Sub_P Parameter: Temperature (deg C) Value: 42 vs. 22
  misc_feature: MA Experiment 20000327 PARAMETER Experiment Name: At_42deg_Heat_Sub_P Parameter: Timepoint (hr) Value: 1
  misc_feature: MA Experiment 20000327 PARAMETER Experiment Name: At_42deg_Heat_Sub_P Parameter: Tissue Value: Aerial
  misc_feature: MA Experiment ID: 20000328 Result: Down-regulated in Transcription
  misc_feature: MA Experiment 20000328 PARAMETER Experiment Name: At_42deg_Heat_Sub_P Parameter: Age (day) Value: 14
  misc_feature: MA Experiment 20000328 PARAMETER Experiment Name: At_42deg_Heat_Sub_P Parameter: Organism Value: A. thaliana
  misc_feature: MA Experiment 20000328 PARAMETER Experiment Name: At_42deg_Heat_Sub_P Parameter: Plant Line Value: WS
  misc_feature: MA Experiment 20000328 PARAMETER Experiment Name: At_42deg_Heat_Sub_P Parameter: Temperature (deg C) Value: 42 vs. 22
  misc_feature: MA Experiment 20000328 PARAMETER Experiment Name: At_42deg_Heat_Sub_P Parameter: Timepoint (hr) Value: 6
  misc_feature: MA Experiment 20000328 PARAMETER Experiment Name: At_42deg_Heat_Sub_P Parameter: Tissue Value: Aerial
gatatttattattcacatttattaacatttttatatctctccctattaaattattttattctctcttagcaacattcatcaaccagagcagattcactatcatcatcttataacacatcttcttcctctaaagtttattttcttaaacttattacaaaaaacatgatcttcaaaagttgatttaatctctttttatccatcttcttcttcatttctcaatatcaaacttttctttttttgtaagcttaacataaaccctaatattttcttgatttttttcaagaaaataaaaacataaagatgcttgaagttagatcaatggatatgactccaaaatcaccagaacccgaatccgaaactccgacccggatccaaccagctaaaccaatctctttcagtaacggaatcatcaaacgccaccaccaccaccaccacaacaacaacaaagtcacttacaaagaatgtctcaagaaccacgcggcggcgattggtggtcacgcgcttgacggttgcggcgaatttatgccgtctccttcgtcaacaccttccgatccaacttctctcaagtgtgcagcttgtggttgtcaccgtaacttccaccgccgtgaaactgacgattcctccgccgttccaccaccgtctcttcttccatcttcaacaacaaccgccgcaattgagtatcagcctcatcaccgtcatcatcctcctcctccgctagctcctccgttaccacgtagtcctaattcatcttctccgccgcctatctcttcctcctacatgcttttagctctctccggtaataataaaaccgcaccgttctcagatctaaacttcgccgccgcggctaaccatctctccgccacgcctggctcgaggaagcgattcaggacgaagtttagctcaaatcagaaagagaagatgcatgaattcgccgatcgaatcggttggaagattcagaaacgtgacgaagacgaagttcgtgatttttgccgtgagatcggagttgataaaggtgttctcaaagtttggatgcataataacaaaaactccttcaaattctccggcggaggagcaaccaccgtgcagagaaacgataacggtatcggcggcgagaacagtaacgatgatggagttcgcggtttagctaacgacggtgacggtggtggtgggagatttgagagtgatagtggaggagctgatggtggcggaaacgtaaacgcctcgtcgtcttcgtcgtgaagaagaaaacatcatgtcgttttgcagggaaagagttataataatggaagcttaagctttgtttttagctttagatcatagagagtaagcactggtattattatcgttaatacgttttattaatattaatt

SEQ ID NO: 49015 - protein, 312 aa, Arabidopsis thaliana
  peptide (1)..(312): Ceres Seq. ID no. 13592100
  misc_feature (47)..(108): Pfam Name: ZF-HD protein dimerisation region Pfam Description: ZF-HD protein dimerisation region
  misc_feature (47)..(108): Pfam Name: ZF-HD protein dimerisation region Pfam Description: ZF-HD protein dimerisation region
  misc_feature (16)..(250): Homolog of NCBI NO: 15226993 NR Description: expressed protein [Arabidopsis thaliana]
  misc_feature (13)..(266): Homolog of NCBI NO: 15223757 NR Description: expressed protein [Arabidopsis thaliana]
  misc_feature (6)..(262): Homolog of NCBI NO: 5091602 NR Description: 10A19I.6 [Oryza sativa]
  misc_feature (50)..(250): Homolog of NCBI NO: 15222382 NR Description: hypothetical protein [Arabidopsis thaliana]
  misc_feature (13)..(178): Homolog of NCBI NO: 15242243 NR Description: expressed protein [Arabidopsis thaliana]
  misc_feature (16)..(250): Homolog of NCBI NO: 15226993 NR Description: expressed protein [Arabidopsis thaliana]
  misc_feature (6)..(262): Homolog of NCBI NO: 5091602 NR Description: 10A19I.6 [Oryza sativa]
  misc_feature (13)..(178): Homolog of NCBI NO: 15242243 NR Description: expressed protein [Arabidopsis thaliana]
  misc_feature (1)..(312): Homolog of NCBI NO: 15228530 NR Description: expressed protein [Arabidopsis thaliana]
  misc_feature (10)..(311): Homolog of NCBI NO: 18421904 NR Description: expressed protein [Arabidopsis thaliana]
  misc_feature (10)..(311): Homolog of NCBI NO: 21592512 NR Description: unknown [Arabidopsis thaliana]
  misc_feature (10)..(312): Homolog of NCBI NO: 13277220 NR Description: ZF-HD homeobox protein [Flaveria bidentis]
  misc_feature (74)..(312): Homolog of NCBI NO: 13277222 NR Description: ZF-HD homeobox protein [Flaveria bidentis]
  misc_feature (50)..(250): Homolog of NCBI NO: 15222382 NR Description: hypothetical protein [Arabidopsis thaliana]
  misc_feature (13)..(266): Homolog of NCBI NO: 15223757 NR Description: expressed protein [Arabidopsis thaliana]
  misc_feature (74)..(312): Homolog of NCBI NO: 13277222 NR Description: ZF-HD homeobox protein [Flaveria bidentis]
  misc_feature (10)..(312): Homolog of NCBI NO: 13277220 NR Description: ZF-HD homeobox protein [Flaveria bidentis]
  misc_feature (10)..(311): Homolog of NCBI NO: 21592512 NR Description: unknown [Arabidopsis thaliana]
  misc_feature (10)..(311): Homolog of NCBI NO: 18421904 NR Description: expressed protein [Arabidopsis thaliana]
  misc_feature (1)..(312): Homolog of NCBI NO: 15228530 NR Description: expressed protein [Arabidopsis thaliana]
MLEVRSMDMTPKSPEPESETPTRIQPAKPISFSNGIIKRHHHHHHNNNKVTYKECLKNHAAAIGGHALDGCGEFMPSPSSTPSDPTSLKCAACGCHRNFHRRETDDSSAVPPPSLLPSSTTTAAIEYQPHHRHHPPPPLAPPLPRSPNSSSPPPISSSYMLLALSGNNKTAPFSDLNFAAAANHLSATPGSRKRFRTKFSSNQKEKMHEFADRIGWKIQKRDEDEVRDFCREIGVDKGVLKVWMHNNKNSFKFSGGGATTVQRNDNGIGGENSNDDGVRGLANDGDGGGGRFESDSGGADGGGNVNASSSSS

SEQ ID NO: 49016 - protein, 306 aa, Arabidopsis thaliana
  peptide (1)..(306): Ceres Seq. ID no. 13592101
  misc_feature (41)..(102): Pfam Name: ZF-HD protein dimerisation region Pfam Description: ZF-HD protein dimerisation region
  misc_feature (41)..(102): Pfam Name: ZF-HD protein dimerisation region Pfam Description: ZF-HD protein dimerisation region
  misc_feature (10)..(244): Homolog of NCBI NO: 15226993 NR Description: expressed protein [Arabidopsis thaliana]
  misc_feature (7)..(260): Homolog of NCBI NO: 15223757 NR Description: expressed protein [Arabidopsis thaliana]
  misc_feature (1)..(256): Homolog of NCBI NO: 5091602 NR Description: 10A19I.6 [Oryza sativa]
  misc_feature (44)..(244): Homolog of NCBI NO: 15222382 NR Description: hypothetical protein [Arabidopsis thaliana]
  misc_feature (7)..(172): Homolog of NCBI NO: 15242243 NR Description: expressed protein [Arabidopsis thaliana]
  misc_feature (10)..(244): Homolog of NCBI NO: 15226993 NR Description: expressed protein [Arabidopsis thaliana]
  misc_feature (1)..(256): Homolog of NCBI NO: 5091602 NR Description: 10A19I.6 [Oryza sativa]
  misc_feature (7)..(172): Homolog of NCBI NO: 15242243 NR Description: expressed protein [Arabidopsis thaliana]
  misc_feature (1)..(306): Homolog of NCBI NO: 15228530 NR Description: expressed protein [Arabidopsis thaliana]
  misc_feature (4)..(305): Homolog of NCBI NO: 18421904 NR Description: expressed protein [Arabidopsis thaliana]
  misc_feature (4)..(305): Homolog of NCBI NO: 21592512 NR Description: unknown [Arabidopsis thaliana]
  misc_feature (4)..(306): Homolog of NCBI NO: 13277220 NR Description: ZF-HD homeobox protein [Flaveria bidentis]
  misc_feature (68)..(306): Homolog of NCBI NO: 13277222 NR Description: ZF-HD homeobox protein [Flaveria bidentis]
  misc_feature (44)..(244): Homolog of NCBI NO: 15222382 NR Description: hypothetical protein [Arabidopsis thaliana]
  misc_feature (7)..(260): Homolog of NCBI NO: 15223757 NR Description: expressed protein [Arabidopsis thaliana]
  misc_feature (68)..(306): Homolog of NCBI NO: 13277222 NR Description: ZF-HD homeobox protein [Flaveria bidentis]
  misc_feature (4)..(306): Homolog of NCBI NO: 13277220 NR Description: ZF-HD homeobox protein [Flaveria bidentis]
  misc_feature (4)..(305): Homolog of NCBI NO: 21592512 NR Description: unknown [Arabidopsis thaliana]
  misc_feature (4)..(305): Homolog of NCBI NO: 18421904 NR Description: expressed protein [Arabidopsis thaliana]
  misc_feature (1)..(306): Homolog of NCBI NO: 15228530 NR Description: expressed protein [Arabidopsis thaliana]
MDMTPKSPEPESETPTRIQPAKPISFSNGIIKRHHHHHHNNNKVTYKECLKNHAAAIGGHALDGCGEFMPSPSSTPSDPTSLKCAACGCHRNFHRRETDDSSAVPPPSLLPSSTTTAAIEYQPHHRHHPPPPLAPPLPRSPNSSSPPPISSSYMLLALSGNNKTAPFSDLNFAAAANHLSATPGSRKRFRTKFSSNQKEKMHEFADRIGWKIQKRDEDEVRDFCREIGVDKGVLKVWMHNNKNSFKFSGGGATTVQRNDNGIGGENSNDDGVRGLANDGDGGGGRFESDSGGADGGGNVNASSSSS

SEQ ID NO: 49017 - protein, 304 aa, Arabidopsis thaliana
  peptide (1)..(304): Ceres Seq. ID no. 13592102
  misc_feature (39)..(100): Pfam Name: ZF-HD protein dimerisation region Pfam Description: ZF-HD protein dimerisation region
  misc_feature (39)..(100): Pfam Name: ZF-HD protein dimerisation region Pfam Description: ZF-HD protein dimerisation region
  misc_feature (8)..(242): Homolog of NCBI NO: 15226993 NR Description: expressed protein [Arabidopsis thaliana]
  misc_feature (5)..(258): Homolog of NCBI NO: 15223757 NR Description: expressed protein [Arabidopsis thaliana]
  misc_feature (1)..(254): Homolog of NCBI NO: 5091602 NR Description: 10A19I.6 [Oryza sativa]
  misc_feature (42)..(242): Homolog of NCBI NO: 15222382 NR Description: hypothetical protein [Arabidopsis thaliana]
  misc_feature (5)..(170): Homolog of NCBI NO: 15242243 NR Description: expressed protein [Arabidopsis thaliana]
  misc_feature (8)..(242): Homolog of NCBI NO: 15226993 NR Description: expressed protein [Arabidopsis thaliana]
  misc_feature (1)..(254): Homolog of NCBI NO: 5091602 NR Description: 10A19I.6 [Oryza sativa]
  misc_feature (5)..(170): Homolog of NCBI NO: 15242243 NR Description: expressed protein [Arabidopsis thaliana]
  misc_feature (1)..(304): Homolog of NCBI NO: 15228530 NR Description: expressed protein [Arabidopsis thaliana]
  misc_feature (2)..(303): Homolog of NCBI NO: 18421904 NR Description: expressed protein [Arabidopsis thaliana]
  misc_feature (2)..(303): Homolog of NCBI NO: 21592512 NR Description: unknown [Arabidopsis thaliana]
  misc_feature (2)..(304): Homolog of NCBI NO: 13277220 NR Description: ZF-HD homeobox protein [Flaveria bidentis]
  misc_feature (66)..(304): Homolog of NCBI NO: 13277222 NR Description: ZF-HD homeobox protein [Flaveria bidentis]
  misc_feature (42)..(242): Homolog of NCBI NO: 15222382 NR Description: hypothetical protein [Arabidopsis thaliana]
  misc_feature (5)..(258): Homolog of NCBI NO: 15223757 NR Description: expressed protein [Arabidopsis thaliana]
  misc_feature (66)..(304): Homolog of NCBI NO: 13277222 NR Description: ZF-HD homeobox protein [Flaveria bidentis]
  misc_feature (2)..(304): Homolog of NCBI NO: 13277220 NR Description: ZF-HD homeobox protein [Flaveria bidentis]
  misc_feature (2)..(303): Homolog of NCBI NO: 21592512 NR Description: unknown [Arabidopsis thaliana]
  misc_feature (2)..(303): Homolog of NCBI NO: 18421904 NR Description: expressed protein [Arabidopsis thaliana]
  misc_feature (1)..(304): Homolog of NCBI NO: 15228530 NR Description: expressed protein [Arabidopsis thaliana]
MTPKSPEPESETPTRIQPAKPISFSNGIIKRHHHHHHNNNKVTYKECLKNHAAAIGGHALDGCGEFMPSPSSTPSDPTSLKCAACGCHRNFHRRETDDSSAVPPPSLLPSSTTTAAIEYQPHHRHHPPPPLAPPLPRSPNSSSPPPISSSYMLLALSGNNKTAPFSDLNFAAAANHLSATPGSRKRFRTKFSSNQKEKMHEFADRIGWKIQKRDEDEVRDFCREIGVDKGVLKVWMHNNKNSFKFSGGGATTVQRNDNGIGGENSNDDGVRGLANDGDGGGGRFESDSGGADGGGNVNASSSSS

SEQ ID NO: 49018 - DNA, 3198 bp, Arabidopsis thaliana; identical to SEQ ID NO: 30942
  misc_feature (1)..(3198): Ceres Seq. ID no. 13579859
  misc_feature: MA Experiment ID: 108434 Result: Up-regulated in Transcription
  misc_feature: MA Experiment 108434 PARAMETER Experiment Name: At_Root_Tips_cDNA_P Parameter: Tissue Value: Root Tips
  misc_feature: MA Experiment ID: 108462 Result: Up-regulated in Transcription
  misc_feature: MA Experiment 108462 PARAMETER Experiment Name: At_Germinating_Seeds_cDNA_P Parameter: Age (day) Value: 2 vs. 0
  misc_feature: MA Experiment 108462 PARAMETER Experiment Name: At_Germinating_Seeds_cDNA_P Parameter: Tissue Value: Germinating Seeds
  misc_feature: MA Experiment ID: 108463 Result: Up-regulated in Transcription
  misc_feature: MA Experiment 108463 PARAMETER Experiment Name: At_Germinating_Seeds_cDNA_P Parameter: Age (day) Value: 3 vs. 0
  misc_feature: MA Experiment 108463 PARAMETER Experiment Name: At_Germinating_Seeds_cDNA_P Parameter: Tissue Value: Germinating Seeds
  misc_feature: MA Experiment ID: 108464 Result: Up-regulated in Transcription
  misc_feature: MA Experiment 108464 PARAMETER Experiment Name: At_Germinating_Seeds_cDNA_P Parameter: Age (day) Value: 4 vs. 0
  misc_feature: MA Experiment 108464 PARAMETER Experiment Name: At_Germinating_Seeds_cDNA_P Parameter: Tissue Value: Germinating Seeds
  misc_feature: MA Experiment ID: 108488 Result: Down-regulated in Transcription
  misc_feature: MA Experiment ID: 108572 Result: Down-regulated in Transcription
  misc_feature: MA Experiment 108572 PARAMETER Experiment Name: At_Drought_cDNA_P Parameter: Timepoint (hr) Value: 1
  misc_feature: MA Experiment 108572 PARAMETER Experiment Name: At_Drought_cDNA_P Parameter: Tissue Value: Aerial
  misc_feature: MA Experiment 108572 PARAMETER Experiment Name: At_Drought_cDNA_P Parameter: Treatment Value: Drought vs. No Drought
  misc_feature: MA Experiment ID: 108576 Result: Down-regulated in Transcription
  misc_feature: MA Experiment 108576 PARAMETER Experiment Name: At_42deg_Heat_cDNA_P Parameter: Temperature (deg C) Value: 42 vs. 22
  misc_feature: MA Experiment 108576 PARAMETER Experiment Name: At_42deg_Heat_cDNA_P Parameter: Timepoint (hr) Value: 1
  misc_feature: MA Experiment 108576 PARAMETER Experiment Name: At_42deg_Heat_cDNA_P Parameter: Tissue Value: Aerial
  misc_feature: MA Experiment ID: 108577 Result: Down-regulated in Transcription
  misc_feature: MA Experiment 108577 PARAMETER Experiment Name: At_42deg_Heat_cDNA_P Parameter: Temperature (deg C) Value: 42 vs. 22
  misc_feature: MA Experiment 108577 PARAMETER Experiment Name: At_42deg_Heat_cDNA_P Parameter: Timepoint (hr) Value: 6
  misc_feature: MA Experiment 108577 PARAMETER Experiment Name: At_42deg_Heat_cDNA_P Parameter: Tissue Value: Aerial
  misc_feature: MA Experiment ID: 108579 Result: Down-regulated in Transcription
  misc_feature: MA Experiment 108579 PARAMETER Experiment Name: At_4deg_Cold_cDNA_P Parameter: Temperature (deg C) Value: 4 vs. 22
  misc_feature: MA Experiment 108579 PARAMETER Experiment Name: At_4deg_Cold_cDNA_P Parameter: Timepoint (hr) Value: 6
  misc_feature: MA Experiment 108579 PARAMETER Experiment Name: At_4deg_Cold_cDNA_P Parameter: Tissue Value: Aerial
  misc_feature: MA Experiment ID: 20000093 Result: Down-regulated in Transcription
  misc_feature: MA Experiment 20000093 PARAMETER Experiment Name: At_42deg_Heat_cDNA_P Parameter: Temperature (deg C) Value: 42 vs. 22
  misc_feature: MA Experiment 20000093 PARAMETER Experiment Name: At_42deg_Heat_cDNA_P Parameter: Timepoint (hr) Value: 0.5
  misc_feature: MA Experiment 20000093 PARAMETER Experiment Name: At_42deg_Heat_cDNA_P Parameter: Tissue Value: Aerial
  misc_feature: MA Experiment ID: 20000111 Result: Down-regulated in Transcription
  misc_feature: MA Experiment 20000111 PARAMETER Experiment Name: At_42deg_Heat_cDNA_P Parameter: Temperature (deg C) Value: 42 vs. 22
  misc_feature: MA Experiment 20000111 PARAMETER Experiment Name: At_42deg_Heat_cDNA_P Parameter: Timepoint (hr) Value: 6
  misc_feature: MA Experiment 20000111 PARAMETER Experiment Name: At_42deg_Heat_cDNA_P Parameter: Tissue Value: Aerial
  misc_feature: MA Experiment ID: 20000113 Result: Down-regulated in Transcription
  misc_feature: MA Experiment 20000113 PARAMETER Experiment Name: At_42deg_Heat_cDNA_P Parameter: Temperature (deg C) Value: 42 vs. 22
  misc_feature: MA Experiment 20000113 PARAMETER Experiment Name: At_42deg_Heat_cDNA_P Parameter: Timepoint (hr) Value: 8
  misc_feature: MA Experiment 20000113 PARAMETER Experiment Name: At_42deg_Heat_cDNA_P Parameter: Tissue Value: Aerial
  misc_feature: MA Experiment ID: 20000144 Result: Down-regulated in Transcription
  misc_feature: MA Experiment 20000144 PARAMETER Experiment Name: At_42deg_Heat_cDNA_P Parameter: Temperature (deg C) Value: 42 vs. 22
  misc_feature: MA Experiment 20000144 PARAMETER Experiment Name: At_42deg_Heat_cDNA_P Parameter: Timepoint (hr) Value: 1
  misc_feature: MA Experiment 20000144 PARAMETER Experiment Name: At_42deg_Heat_cDNA_P Parameter: Tissue Value: Aerial
  misc_feature: MA Experiment ID: 20000173 Result: Down-regulated in Transcription
  misc_feature: MA Experiment 20000173 PARAMETER Experiment Name: At_42deg_Heat_P Parameter: Age (day) Value: 14
  misc_feature: MA Experiment 20000173 PARAMETER Experiment Name: At_42deg_Heat_P Parameter: Organism Value: A. thaliana
  misc_feature: MA Experiment 20000173 PARAMETER Experiment Name: At_42deg_Heat_P Parameter: Plant Line Value: WS
  misc_feature: MA Experiment 20000173 PARAMETER Experiment Name: At_42deg_Heat_P Parameter: Temperature (deg C) Value: 42 vs. 22
  misc_feature: MA Experiment 20000173 PARAMETER Experiment Name: At_42deg_Heat_P Parameter: Timepoint (hr) Value: 6
  misc_feature: MA Experiment 20000173 PARAMETER Experiment Name: At_42deg_Heat_P Parameter: Tissue Value: Aerial
  misc_feature: MA Experiment ID: 20000182 Result: Down-regulated in Transcription
  misc_feature: MA Experiment 20000182 PARAMETER Experiment Name: At_2mM_SA_P Parameter: Age (day) Value: 14
  misc_feature: MA Experiment 20000182 PARAMETER Experiment Name: At_2mM_SA_P Parameter: Organism Value: A. thaliana
  misc_feature: MA Experiment 20000182 PARAMETER Experiment Name: At_2mM_SA_P Parameter: Plant Line Value: WS
  misc_feature: MA Experiment 20000182 PARAMETER Experiment Name: At_2mM_SA_P Parameter: Timepoint (hr) Value: 6
  misc_feature: MA Experiment 20000182 PARAMETER Experiment Name: At_2mM_SA_P Parameter: Tissue Value: Aerial
  misc_feature: MA Experiment 20000182 PARAMETER Experiment Name: At_2mM_SA_P Parameter: Treatment Value: 2mM SA vs. No Treatment
  misc_feature: MA Experiment ID: 20000184 Result: Down-regulated in Transcription
  misc_feature: MA Experiment 20000184 PARAMETER Experiment Name: At_Shoots__P Parameter: Age (day) Value: 7
  misc_feature: MA Experiment 20000184 PARAMETER Experiment Name: At_Shoots__P Parameter: Tissue Value: Shoots vs. Whole Plant
  misc_feature: MA Experiment ID: 20000227 Result: Down-regulated in Transcription
  misc_feature: MA Experiment 20000227 PARAMETER Experiment Name: At_Root-Tips-vs-Tops_P Parameter: Tissue Value: Root Tips vs. Root Tops
  misc_feature: MA Experiment ID: 20000234 Result: Down-regulated in Transcription
  misc_feature: MA Experiment 20000234 PARAMETER Experiment Name: At_Siliques_P Parameter: Age (day) Value: 21
  misc_feature: MA Experiment 20000234 PARAMETER Experiment Name: At_Siliques_P Parameter: Organism Value: A. thaliana
  misc_feature: MA Experiment 20000234 PARAMETER Experiment Name: At_Siliques_P Parameter: Plant Line Value: WS
  misc_feature: MA Experiment 20000234 PARAMETER Experiment Name: At_Siliques_P Parameter: Tissue Value: Less Than 5mm Siliques vs. Whole Plant
  misc_feature: MA Experiment ID: 20000235 Result: Down-regulated in Transcription
  misc_feature: MA Experiment 20000235 PARAMETER Experiment Name: At_Siliques_P Parameter: Age (day) Value: 21
  misc_feature: MA Experiment 20000235 PARAMETER Experiment Name: At_Siliques_P Parameter: Organism Value: A. thaliana
  misc_feature: MA Experiment 20000235 PARAMETER Experiment Name: At_Siliques_P Parameter: Plant Line Value: WS
  misc_feature: MA Experiment 20000235 PARAMETER Experiment Name: At_Siliques_P Parameter: Tissue Value: 5-10mm Siliques vs. Whole Plant
  misc_feature: MA Experiment ID: 20000264 Result: Down-regulated in Transcription
  misc_feature: MA Experiment 20000264 PARAMETER Experiment Name: At_Open_Flower_P Parameter: Age (day) Value: 21
  misc_feature: MA Experiment 20000264 PARAMETER Experiment Name: At_Open_Flower_P Parameter: Plant Line Value: WS
  misc_feature: MA Experiment 20000264 PARAMETER Experiment Name: At_Open_Flower_P Parameter: Tissue Value: Open Flower vs. Whole Plant
  misc_feature: MA Experiment ID: 20000265 Result: Down-regulated in Transcription
  misc_feature: MA Experiment 20000265 PARAMETER Experiment Name: At_Open_Flower_P Parameter: Age (day) Value: 21
  misc_feature: MA Experiment 20000265 PARAMETER Experiment Name: At_Open_Flower_P Parameter: Plant Line Value: WS
  misc_feature: MA Experiment 20000265 PARAMETER Experiment Name: At_Open_Flower_P Parameter: Tissue Value: Closed Flower vs. Whole Plant
  misc_feature: MA Experiment ID: 20000286 Result: Down-regulated in Transcription
  misc_feature: MA Experiment 20000286 PARAMETER Experiment Name: At_Open_Flower_P Parameter: Age (day) Value: 21
  misc_feature: MA Experiment 20000286 PARAMETER Experiment Name: At_Open_Flower_P Parameter: Plant Line Value: WS
  misc_feature: MA Experiment 20000286 PARAMETER Experiment Name: At_Open_Flower_P Parameter: Tissue Value: Half Open vs. Whole Plant
  misc_feature: MA Experiment ID: 20000438 Result: Down-regulated in Transcription
  misc_feature: MA Experiment 20000438 PARAMETER Experiment Name: At_Shoots__P Parameter: Age (day) Value: 14
  misc_feature: MA Experiment 20000438 PARAMETER Experiment Name: At_Shoots__P Parameter: Tissue Value: Shoots vs. Whole Plant
  misc_feature: MA Experiment ID: 20000441 Result: Down-regulated in Transcription
  misc_feature: MA Experiment 20000441 PARAMETER Experiment Name: At_1uM_BR-BRZ__P Parameter: Tissue Value: Shoot Apices
  misc_feature: MA Experiment 20000441 PARAMETER Experiment Name: At_1uM_BR-BRZ__P Parameter: Treatment Value: 1uM BR vs. No Treatment
  misc_feature: MA Experiment ID: 20000443 Result: Down-regulated in Transcription
  misc_feature: MA Experiment 20000443 PARAMETER Experiment Name: At_1uM_BR-BRZ__P Parameter: Tissue Value: Shoot Apices
  misc_feature: MA Experiment 20000443 PARAMETER Experiment Name: At_1uM_BR-BRZ__P Parameter: Treatment Value: 1uM BRZ vs. No Treatment
  misc_feature: MA Experiment ID: 20000445 Result: Down-regulated in Transcription
  misc_feature: MA Experiment 20000445 PARAMETER Experiment Name: At_100uM_NAA__P Parameter: Age (day) Value: 14
  misc_feature: MA Experiment 20000445 PARAMETER Experiment Name: At_100uM_NAA__P Parameter: Organism Value: A. thaliana
  misc_feature: MA Experiment 20000445 PARAMETER Experiment Name: At_100uM_NAA__P Parameter: Plant Line Value: WS
  misc_feature: MA Experiment 20000445 PARAMETER Experiment Name: At_100uM_NAA__P Parameter: Timepoint (hr) Value: 6
  misc_feature: MA Experiment 20000445 PARAMETER Experiment Name: At_100uM_NAA__P Parameter: Tissue Value: Aerial
  misc_feature: MA Experiment 20000445 PARAMETER Experiment Name: At_100uM_NAA__P Parameter: Treatment Value: 100uM NAA vs. No Treatment
  misc_feature: MA Experiment ID: 20000451 Result: Down-regulated in Transcription
  misc_feature: MA Experiment 20000451 PARAMETER Experiment Name: At_CS6879_Shoots-Roots_P Parameter: Age (day) Value: 14
  misc_feature: MA Experiment 20000451 PARAMETER Experiment Name: At_CS6879_Shoots-Roots_P Parameter: Organism Value: A. thaliana
  misc_feature: MA Experiment 20000451 PARAMETER Experiment Name: At_CS6879_Shoots-Roots_P Parameter: Plant Line Value: CS6879 vs. WS
  misc_feature: MA Experiment 20000451 PARAMETER Experiment Name: At_CS6879_Shoots-Roots_P Parameter: Tissue Value: Roots
  misc_feature: MA Experiment ID: 20000453 Result: Up-regulated in Transcription
  misc_feature: MA Experiment 20000453 PARAMETER Experiment Name: At_100uM_ABA_P Parameter: Age (day) Value: 15
  misc_feature: MA Experiment 20000453 PARAMETER Experiment Name: At_100uM_ABA_P Parameter: Organism Value: A. thaliana
  misc_feature: MA Experiment 20000453 PARAMETER Experiment Name: At_100uM_ABA_P Parameter: Plant Line Value: WS
  misc_feature: MA Experiment 20000453 PARAMETER Experiment Name: At_100uM_ABA_P Parameter: Timepoint (hr) Value: 24
  misc_feature: MA Experiment 20000453 PARAMETER Experiment Name: At_100uM_ABA_P Parameter: Tissue Value: Aerial
  misc_feature: MA Experiment 20000453 PARAMETER Experiment Name: At_100uM_ABA_P Parameter: Treatment Value: 100uM ABA vs. No Treatment
  misc_feature: MA Experiment ID: 20000495 Result: Up-regulated in Transcription
  misc_feature: MA Experiment 20000495 PARAMETER Experiment Name: At_Guard_Cells_P Parameter: Harvest Date Value: 8/2/2002
  misc_feature: MA Experiment 20000495 PARAMETER Experiment Name: At_Guard_Cells_P Parameter: Organism Value: A. thaliana
  misc_feature: MA Experiment 20000495 PARAMETER Experiment Name: At_Guard_Cells_P Parameter: Tissue Value: Guard Cells vs. Leaves
  misc_feature: MA Experiment ID: 20000794 Result: Down-regulated in Transcription
  misc_feature: MA Experiment 20000794 PARAMETER Experiment Name: At_Petals_P Parameter: Age (day) Value: 23-25 days
  misc_feature: MA Experiment 20000794 PARAMETER Experiment Name: At_Petals_P Parameter: Plant Line Value: WS
  misc_feature: MA Experiment 20000794 PARAMETER Experiment Name: At_Petals_P Parameter: Tissue Value: Petals vs. Whole plant
  misc_feature: MA Experiment ID: 20001248 Result: Down-regulated in Transcription
  misc_feature: MA Experiment 20001248 PARAMETER Experiment Name: At_Far-red-induction_P Parameter: Age (day) Value: 7
  misc_feature: MA Experiment 20001248 PARAMETER Experiment Name: At_Far-red-induction_P Parameter: Light Value: Far-red vs. White
  misc_feature: MA Experiment 20001248 PARAMETER Experiment Name: At_Far-red-induction_P Parameter: Organism Value: A. thaliana
  misc_feature: MA Experiment 20001248 PARAMETER Experiment Name: At_Far-red-induction_P Parameter: Plant Line Value: Columbia
  misc_feature: MA Experiment 20001248 PARAMETER Experiment Name: At_Far-red-induction_P Parameter: Timepoint (hr) Value: 4
  misc_feature: MA Experiment 20001248 PARAMETER Experiment Name: At_Far-red-induction_P Parameter: Tissue Value: Whole Plant
  misc_feature: MA Experiment ID: 20001450 Result: Down-regulated in Transcription
  misc_feature: MA Experiment 20001450 PARAMETER Experiment Name: At_Far-red-induction_P Parameter: Age (day) Value: 7
  misc_feature: MA Experiment 20001450 PARAMETER Experiment Name: At_Far-red-induction_P Parameter: Light Value: Far-red vs. White
  misc_feature: MA Experiment 20001450 PARAMETER Experiment Name: At_Far-red-induction_P Parameter: Organism Value: A. thaliana
  misc_feature: MA Experiment 20001450 PARAMETER Experiment Name: At_Far-red-induction_P Parameter: Plant Line Value: Columbia
  misc_feature: MA Experiment 20001450 PARAMETER Experiment Name: At_Far-red-induction_P Parameter: Timepoint (hr) Value: 8
  misc_feature: MA Experiment 20001450 PARAMETER Experiment Name: At_Far-red-induction_P Parameter: Tissue Value: Whole Plant
  misc_feature: MA Experiment ID: 20001451 Result: Up-regulated in Transcription
  misc_feature: MA Experiment 20001451 PARAMETER Experiment Name: At_Far-red-induction_P Parameter: Age (day) Value: 7
  misc_feature: MA Experiment 20001451 PARAMETER Experiment Name: At_Far-red-induction_P Parameter: Light Value: Far-red vs. White
  misc_feature: MA Experiment 20001451 PARAMETER Experiment Name: At_Far-red-induction_P Parameter: Organism Value: A. thaliana
  misc_feature: MA Experiment 20001451 PARAMETER Experiment Name: At_Far-red-induction_P Parameter: Plant Line Value: Columbia
  misc_feature: MA Experiment 20001451 PARAMETER Experiment Name: At_Far-red-induction_P Parameter: Timepoint (hr) Value: 24
  misc_feature: MA Experiment 20001451 PARAMETER Experiment Name: At_Far-red-induction_P Parameter: Tissue Value: Whole Plant
  misc_feature: MA Experiment ID: 20001458 Result: Up-regulated in Transcription
  misc_feature: MA Experiment 20001458 PARAMETER Experiment Name: At_50mM_NH4NO3_L-to-H_P Parameter: Age (day) Value: Undefined
  misc_feature: MA Experiment 20001458 PARAMETER Experiment Name: At_50mM_NH4NO3_L-to-H_P Parameter: Organism Value: Undefined
  misc_feature: MA Experiment 20001458 PARAMETER Experiment Name: At_50mM_NH4NO3_L-to-H_P Parameter: Plant Line Value: Undefined
  misc_feature: MA Experiment 20001458 PARAMETER Experiment Name: At_50mM_NH4NO3_L-to-H_P Parameter: Timepoint (hr) Value: 2
  misc_feature: MA Experiment 20001458 PARAMETER Experiment Name: At_50mM_NH4NO3_L-to-H_P Parameter: Tissue Value: Siliques
  misc_feature: MA Experiment 20001458 PARAMETER Experiment Name: At_50mM_NH4NO3_L-to-H_P Parameter: Treatment Value: 50mM NH4NO3 vs. 100mM Manitol
  misc_feature: MA Experiment ID: 20001557 Result: Up-regulated in Transcription
  misc_feature: MA Experiment 20001557 PARAMETER Experiment Name: At_Drought_Soil_Dry_P Parameter: Age (day) Value: 27
  misc_feature: MA Experiment 20001557 PARAMETER Experiment Name: At_Drought_Soil_Dry_P Parameter: Organism Value: A. thaliana
  misc_feature: MA Experiment 20001557 PARAMETER Experiment Name: At_Drought_Soil_Dry_P Parameter: Plant Line Value: WS
  misc_feature: MA Experiment 20001557 PARAMETER Experiment Name: At_Drought_Soil_Dry_P Parameter: Post Timepoint (hr) Value: 3
  misc_feature: MA Experiment 20001557 PARAMETER Experiment Name: At_Drought_Soil_Dry_P Parameter: Post-Treatment Value: Re-Water vs. No Drought
  misc_feature: MA Experiment 20001557 PARAMETER Experiment Name: At_Drought_Soil_Dry_P Parameter: Timepoint (day) Value: 13
  misc_feature: MA Experiment 20001557 PARAMETER Experiment Name: At_Drought_Soil_Dry_P Parameter: Treatment Value: Drought vs. No Drought
  misc_feature: MA Experiment ID: 20001560 Result: Up-regulated in Transcription
  misc_feature: MA Experiment 20001560 PARAMETER Experiment Name: At_Drought_Soil_Dry_P Parameter: Age (day) Value: 28
  misc_feature: MA Experiment 20001560 PARAMETER Experiment Name: At_Drought_Soil_Dry_P Parameter: Organism Value: A. thaliana
  misc_feature: MA Experiment 20001560 PARAMETER Experiment Name: At_Drought_Soil_Dry_P Parameter: Plant Line Value: WS
  misc_feature: MA Experiment 20001560 PARAMETER Experiment Name: At_Drought_Soil_Dry_P Parameter: Post Timepoint (hr) Value: None
  misc_feature: MA Experiment 20001560 PARAMETER Experiment Name: At_Drought_Soil_Dry_P Parameter: Post-Treatment Value: None
  misc_feature: MA Experiment 20001560 PARAMETER Experiment Name: At_Drought_Soil_Dry_P Parameter: Timepoint (day) Value: 14
  misc_feature: MA Experiment 20001560 PARAMETER Experiment Name: At_Drought_Soil_Dry_P Parameter: Treatment Value: Drought vs. No Drought
  misc_feature: MA Experiment ID: 20001757 Result: Up-regulated in Transcription
  misc_feature: MA Experiment 20001757 PARAMETER Experiment Name: At_50mM_NH4NO3_L-to-H_P Parameter: Timepoint (hr) Value: 6
  misc_feature: MA Experiment 20001757 PARAMETER Experiment Name: At_50mM_NH4NO3_L-to-H_P Parameter: Tissue Value: Leaf
  misc_feature: MA Experiment 20001757 PARAMETER Experiment Name: At_50mM_NH4NO3_L-to-H_P Parameter: Treatment Value: 50mM NH4NO3 vs 100mM Mannitol

SEQ ID NO: 49019 - protein, 274 aa, Arabidopsis thaliana; identical to SEQ ID NO: 30943
  peptide (1)..(274): Ceres Seq. ID no. 13579860
  misc_feature (61)..(130): Pfam Name: linker histone H1 and H5 family Pfam Description: linker histone H1 and H5 family
  misc_feature (61)..(130): Pfam Name: linker histone H1 and H5 family Pfam Description: linker histone H1 and H5 family
  misc_feature (1)..(274): Homolog of NCBI NO: 30420972 NR Description: histone H1 [Vicia hirsuta]
  misc_feature (12)..(274): Homolog of NCBI NO: 13540393 NR Description: histone H1 [Pisum sativum]
  misc_feature (10)..(274): Homolog of NCBI NO: 28301619 NR Description: histone H1 [Pisum sativum]
  misc_feature (25)..(271): Homolog of NCBI NO: 6681423 NR Description: histone H1 [Nicotiana tabacum]
  misc_feature (10)..(274): Homolog of NCBI NO: 29469895 NR Description: histone H1 subtype 5 [Pisum sativum]
  misc_feature (1)..(274): Homolog of NCBI NO: 30420972 NR Description: histone H1 [Vicia hirsuta]
  misc_feature (10)..(274): Homolog of NCBI NO: 28301619 NR Description: histone H1 [Pisum sativum]
  misc_feature (10)..(274): Homolog of NCBI NO: 29469895 NR Description: histone H1 subtype 5 [Pisum sativum]
  misc_feature (1)..(274): Homolog of NCBI NO: 15222199 NR Description: histone H1, putative [Arabidopsis thaliana]
  misc_feature (33)..(274): Homolog of NCBI NO: 16314 NR Description: histone H1-1 [Arabidopsis thaliana]
  misc_feature (4)..(274): Homolog of NCBI NO: 15224536 NR Description: histone H1 [Arabidopsis thaliana]
  misc_feature (25)..(271): Homolog of NCBI NO: 1084419 NR Description: histone H1 - common tobacco
  misc_feature (22)..(269): Homolog of NCBI NO: 121953 NR Description: HISTONE H1
  misc_feature (25)..(271): Homolog of NCBI NO: 6681423 NR Description: histone H1 [Nicotiana tabacum]
  misc_feature (12)..(274): Homolog of NCBI NO: 13540393 NR Description: histone H1 [Pisum sativum]
  misc_feature (22)..(269): Homolog of NCBI NO: 121953 NR Description: HISTONE H1
  misc_feature (25)..(271): Homolog of NCBI NO: 1084419 NR Description: histone H1 - common tobacco
  misc_feature (4)..(274): Homolog of NCBI NO: 15224536 NR Description: histone H1 [Arabidopsis thaliana]
  misc_feature (33)..(274): Homolog of NCBI NO: 16314 NR Description: histone H1-1 [Arabidopsis thaliana]
  misc_feature (1)..(274): Homolog of NCBI NO: 15222199 NR Description: histone H1, putative [Arabidopsis thaliana]

SEQ ID NO: 49020 - protein, 207 aa, Arabidopsis thaliana; identical to SEQ ID NO: 30944
  peptide (1)..(207): Ceres Seq. ID no. 13579861
  misc_feature (1)..(63): Pfam Name: linker histone H1 and H5 family Pfam Description: linker histone H1 and H5 family
  misc_feature (1)..(63): Pfam Name: linker histone H1 and H5 family Pfam Description: linker histone H1 and H5 family
  misc_feature (1)..(207): Homolog of NCBI NO: 30420972 NR Description: histone H1 [Vicia hirsuta]
  misc_feature (1)..(207): Homolog of NCBI NO: 13540393 NR Description: histone H1 [Pisum sativum]
  misc_feature (1)..(207): Homolog of NCBI NO: 28301619 NR Description: histone H1 [Pisum sativum]
  misc_feature (1)..(204): Homolog of NCBI NO: 6681423 NR Description: histone H1 [Nicotiana tabacum]
  misc_feature (1)..(207): Homolog of NCBI NO: 29469895 NR Description: histone H1 subtype 5 [Pisum sativum]
  misc_feature (1)..(207): Homolog of NCBI NO: 30420972 NR Description: histone H1 [Vicia hirsuta]
  misc_feature (1)..(207): Homolog of NCBI NO: 28301619 NR Description: histone H1 [Pisum sativum]
  misc_feature (1)..(207): Homolog of NCBI NO: 29469895 NR Description: histone H1 subtype 5 [Pisum sativum]
  misc_feature (1)..(207): Homolog of NCBI NO: 15222199 NR Description: histone H1, putative [Arabidopsis thaliana]
  misc_feature (1)..(207): Homolog of NCBI NO: 16314 NR Description: histone H1-1 [Arabidopsis thaliana]
  misc_feature (1)..(207): Homolog of NCBI NO: 15224536 NR Description: histone H1 [Arabidopsis thaliana]
  misc_feature (1)..(204): Homolog of NCBI NO: 1084419 NR Description: histone H1 - common tobacco
  misc_feature (1)..(202): Homolog of NCBI NO: 121953 NR Description: HISTONE H1
  misc_feature (1)..(204): Homolog of NCBI NO: 6681423 NR Description: histone H1 [Nicotiana tabacum]
  misc_feature (1)..(207): Homolog of NCBI NO: 13540393 NR Description: histone H1 [Pisum sativum]
  misc_feature (1)..(202): Homolog of NCBI NO: 121953 NR Description: HISTONE H1
  misc_feature (1)..(204): Homolog of NCBI NO: 1084419 NR Description: histone H1 - common tobacco
  misc_feature (1)..(207): Homolog of NCBI NO: 15224536 NR Description: histone H1 [Arabidopsis thaliana]
  misc_feature (1)..(207): Homolog of NCBI NO: 16314 NR Description: histone H1-1 [Arabidopsis thaliana]
  misc_feature (1)..(207): Homolog of NCBI NO: 15222199 NR Description: histone H1, putative [Arabidopsis thaliana]

SEQ ID NO: 49021 - protein, 156 aa, Arabidopsis thaliana; identical to SEQ ID NO: 30945
  peptide (1)..(156): Ceres Seq. ID no. 13579862
  misc_feature (29)..(153): Homolog of NCBI NO: 30696912 NR Description: expressed protein [Arabidopsis thaliana]
  misc_feature (1)..(156): Homolog of NCBI NO: 18400628 NR Description: expressed protein [Arabidopsis thaliana]
  misc_feature (29)..(153): Homolog of NCBI NO: 30696912 NR Description: expressed protein [Arabidopsis thaliana]
  misc_feature (1)..(156): Homolog of NCBI NO: 18400628 NR Description: expressed protein [Arabidopsis thaliana]

SEQ ID NO: 49022 - DNA, 670 bp, Arabidopsis thaliana; identical to SEQ ID NO: 31021
  misc_feature (1)..(670): Ceres Seq. ID no. 12601447
  misc_feature: MA Experiment ID: 108434 Result: Up-regulated in Transcription
  misc_feature: MA Experiment 108434 PARAMETER Experiment Name: At_Root_Tips_cDNA_P Parameter: Tissue Value: Root Tips
  misc_feature: MA Experiment ID: 108461 Result: Up-regulated in Transcription
  misc_feature: MA Experiment 108461 PARAMETER Experiment Name: At_Germinating_Seeds_cDNA_P Parameter: Age (day) Value: 1 vs. 0
  misc_feature: MA Experiment 108461 PARAMETER Experiment Name: At_Germinating_Seeds_cDNA_P Parameter: Tissue Value: Germinating Seeds
  misc_feature: MA Experiment ID: 108595 Result: Up-regulated in Transcription
  misc_feature: MA Experiment 108595 PARAMETER Experiment Name: At_Ler-pi_Ovule_cDNA_P Parameter: Plant Line Value: null
  misc_feature: MA Experiment ID: 108607 Result: Down-regulated in Transcription
  misc_feature: MA Experiment 108607 PARAMETER Experiment Name: At_100uM_ABA_cDNA_P Parameter: Timepoint (hr) Value: 4
  misc_feature: MA Experiment 108607 PARAMETER Experiment Name: At_100uM_ABA_cDNA_P Parameter: Tissue Value: Aerial
  misc_feature: MA Experiment 108607 PARAMETER Experiment Name: At_100uM_ABA_cDNA_P Parameter: Treatment Value: 100uM ABA vs. No Treatment
  misc_feature: MA Experiment ID: 108668 Result: Down-regulated in Transcription
  misc_feature: MA Experiment 108668 PARAMETER Experiment Name: At_2mM_SA_cDNA_P Parameter: Plant Line Value: WS
  misc_feature: MA Experiment 108668 PARAMETER Experiment Name: At_2mM_SA_cDNA_P Parameter: Timepoint (hr) Value: 6
  misc_feature: MA Experiment 108668 PARAMETER Experiment Name: At_2mM_SA_cDNA_P Parameter: Treatment Value: 2mM SA vs. No Treatment

SEQ ID NO: 49023 - protein, 223 aa, Arabidopsis thaliana; identical to SEQ ID NO: 31022
  peptide (1)..(223): Ceres Seq. ID no. 12601448
  misc_feature (42)..(217): Pfam Name: Formin Homology 2 Domain Pfam Description: Formin Homology 2 Domain
  misc_feature (42)..(217): Pfam Name: Formin Homology 2 Domain Pfam Description: Formin Homology 2 Domain
  misc_feature (41)..(213): Homolog of NCBI NO: 480109 NR Description: EPPT protein - hydromedusa (Podocoryne carnea)
  misc_feature (41)..(213): Homolog of NCBI NO: 480109 NR Description: EPPT protein - hydromedusa (Podocoryne carnea)
  misc_feature (41)..(213): Homolog of NCBI NO: 480109 NR Description: EPPT protein - hydromedusa (Podocoryne carnea)
  misc_feature (41)..(213): Homolog of NCBI NO: 480109 NR Description: EPPT protein - hydromedusa (Podocoryne carnea)
  misc_feature (41)..(213): Homolog of NCBI NO: 480109 NR Description: EPPT protein - hydromedusa (Podocoryne carnea)
  misc_feature (41)..(213): Homolog of NCBI NO: 480109 NR Description: EPPT protein - hydromedusa (Podocoryne carnea)
  misc_feature (41)..(213): Homolog of NCBI NO: 480109 NR Description: EPPT protein - hydromedusa (Podocoryne carnea)
  misc_feature (41)..(213): Homolog of NCBI NO: 480109 NR Description: EPPT protein - hydromedusa (Podocoryne carnea)
  misc_feature (11)..(213): Homolog of NCBI NO: 15217879 NR Description: prolin-rich protein, putative; protein id:
  misc_feature (28)..(222): Homolog of NCBI NO: 15217879 NR Description: prolin-rich protein, putative; protein id:
  misc_feature (41)..(213): Homolog of NCBI NO: 480109 NR Description: EPPT protein - hydromedusa (Podocoryne carnea)
  misc_feature (41)..(213): Homolog of NCBI NO: 480109 NR Description: EPPT protein - hydromedusa (Podocoryne carnea)
  misc_feature (41)..(213): Homolog of NCBI NO: 480109 NR Description: EPPT protein - hydromedusa (Podocoryne carnea)
  misc_feature (41)..(213): Homolog of NCBI NO: 480109 NR Description: EPPT protein - hydromedusa (Podocoryne carnea)
  misc_feature (41)..(213): Homolog of NCBI NO: 480109 NR Description: EPPT protein - hydromedusa (Podocoryne carnea)
  misc_feature (41)..(213): Homolog of NCBI NO: 480109 NR Description: EPPT protein - hydromedusa (Podocoryne carnea)
  misc_feature (41)..(213): Homolog of NCBI NO: 480109 NR Description: EPPT protein - hydromedusa (Podocoryne carnea)
  misc_feature (41)..(213): Homolog of NCBI NO: 480109 NR Description: EPPT protein - hydromedusa (Podocoryne carnea)
  misc_feature (28)..(222): Homolog of NCBI NO: 15217879 NR Description: prolin-rich protein, putative; protein id:
  misc_feature (11)..(213): Homolog of NCBI NO: 15217879 NR Description: prolin-rich protein, putative; protein id:

SEQ ID NO: 49024 - protein, 213 aa, Arabidopsis thaliana; identical to SEQ ID NO: 31023
  peptide (1)..(213): Ceres Seq. ID no. 12601449
  misc_feature (32)..(207): Pfam Name: Formin Homology 2 Domain Pfam Description: Formin Homology 2 Domain
  misc_feature (32)..(207): Pfam Name: Formin Homology 2 Domain Pfam Description: Formin Homology 2 Domain
  misc_feature (31)..(203): Homolog of NCBI NO: 480109 NR Description: EPPT protein - hydromedusa (Podocoryne carnea)
  misc_feature (31)..(203): Homolog of NCBI NO: 480109 NR Description: EPPT protein - hydromedusa (Podocoryne carnea)
  misc_feature (31)..(203): Homolog of NCBI NO: 480109 NR Description: EPPT protein - hydromedusa (Podocoryne carnea)
  misc_feature (31)..(203): Homolog of NCBI NO: 480109 NR Description: EPPT protein - hydromedusa (Podocoryne carnea)
  misc_feature (31)..(203): Homolog of NCBI NO: 480109 NR Description: EPPT protein - hydromedusa (Podocoryne carnea)
  misc_feature (31)..(203): Homolog of NCBI NO: 480109 NR Description: EPPT protein - hydromedusa (Podocoryne carnea)
  misc_feature (31)..(203): Homolog of NCBI NO: 480109 NR Description: EPPT protein - hydromedusa (Podocoryne carnea)
  misc_feature (31)..(203): Homolog of NCBI NO: 480109 NR Description: EPPT protein - hydromedusa (Podocoryne carnea)
  misc_feature (1)..(203): Homolog of NCBI NO: 15217879 NR Description: prolin-rich protein, putative; protein id:
  misc_feature (18)..(212): Homolog of NCBI NO: 15217879 NR Description: prolin-rich protein, putative; protein id:
  misc_feature (31)..(203): Homolog of NCBI NO: 480109 NR Description: EPPT protein - hydromedusa (Podocoryne carnea)
  misc_feature (31)..(203): Homolog of NCBI NO: 480109 NR Description: EPPT protein - hydromedusa (Podocoryne carnea)
  misc_feature (31)..(203): Homolog of NCBI NO: 480109 NR Description: EPPT protein - hydromedusa (Podocoryne carnea)
  misc_feature (31)..(203): Homolog of NCBI NO: 480109 NR Description: EPPT protein - hydromedusa (Podocoryne carnea)
  misc_feature (31)..(203): Homolog of NCBI NO: 480109 NR Description: EPPT protein - hydromedusa (Podocoryne carnea)
  misc_feature (31)..(203): Homolog of NCBI NO: 480109 NR Description: EPPT protein - hydromedusa (Podocoryne carnea)
  misc_feature (31)..(203): Homolog of NCBI NO: 480109 NR Description: EPPT protein - hydromedusa (Podocoryne carnea)
  misc_feature (31)..(203): Homolog of NCBI NO: 480109 NR Description: EPPT protein - hydromedusa (Podocoryne carnea)
  misc_feature (18)..(212): Homolog of NCBI NO: 15217879 NR Description: prolin-rich protein, putative; protein id:
  misc_feature (1)..(203): Homolog of NCBI NO: 15217879 NR Description: prolin-rich protein, putative; protein id:

SEQ ID NO: 49025 - DNA, 1230 bp, Arabidopsis thaliana
  misc_feature (1)..(1230): Ceres Seq. ID no. 13600802
  misc_feature: MA Experiment ID: 20000495 Result: Down-regulated in Transcription
  misc_feature: MA Experiment 20000495 PARAMETER Experiment Name: At_Guard_Cells_P Parameter: Harvest Date Value: 8/2/2002
  misc_feature: MA Experiment 20000495 PARAMETER Experiment Name: At_Guard_Cells_P Parameter: Organism Value: A. thaliana
  misc_feature: MA Experiment 20000495 PARAMETER Experiment Name: At_Guard_Cells_P Parameter: Tissue Value: Guard Cells vs. Leaves
agacacgcatagagagattgattattgcatcgaatcaagcttggtttgttagtaatggcgggaatagctttagttttagatctactgaagaaatctcaatctaagaacactctccactcatcttccttctattccgcctccgccgccgctgtttctgctgccgcctctgctccttttgcgtctaggtttctcttcggttcttttgagcctagagttgcgtattgtgatgctgctgctgcaatagatgatgattaccttggtgctatacggaaaatgtctgcggatgttttgcagcgtcaaccccttgcgtatatttctaggtccaaggaatacaatatccagccaaaaccagttctctcggcctttgagttcagggcacttgcaatgactacagtgagatcccttttgatgttttatttgcctcttttggagcctaaaacggcttcagaggatgatgatgatttcctaaacaatgctgcagaagaaaaccgccacacagacttgattgttcctcttaaaaagtcagcaaagcaaattgcccgtgagaccacagttgtgaccactcggagagtccttgaaaggctggctctgagttatgtctcacagcgtatggcatggaaacttctaaaggatgtgcctcagtcggctttacgcaaggctcagagagggttgccgacacatgtatatatctttaaagtcagccaaacaactcttagaggtcacttcctgggaatcgcagcatcatgggtagttcaagtaggcattgaaatctacagatgtgtgttcccgaatgttaaacccgaggaagaagaagaagaggagaaagtcgagatatcacagcaagctaaggatctcggaaacaaagttgtgggtatcacagtacgatgtggcgcgtccttagtatttgctgccattggagccgggatatgttcttgccttatccgtccctccacgggccaatggatcggttgcgcgctgggagacttggctggtccgatggttgtttcggtttgcctgcagaagactcttcaagctgattattaagttcttgtgtggaaattgaattcttctacttgaatcttgatgatccaaatgaaatcatagagcttgttttttgtttctgaaatttcttattgtcttcactgaaccttaaaaacaatgatcaatagatttctcaaaatgtacctacttttgacaacagcacaataagtcaggtatttattttcctcg

SEQ ID NO: 49026 - protein, 329 aa, Arabidopsis thaliana
  peptide (1)..(329): Ceres Seq. ID no. 13600803
  misc_feature (1)..(77): Homolog of NCBI NO: 21592482 NR Description: unknown [Arabidopsis thaliana]
  misc_feature (1)..(77): Homolog of NCBI NO: 15215588 NR Description: AT5g55610/MDF20_5 [Arabidopsis thaliana]
  misc_feature (1)..(329): Homolog of NCBI NO: 15240548 NR Description: expressed protein [Arabidopsis thaliana]
MAGIALVLDLLKKSQSKNTLHSSSFYSASAAAVSAAASAPFASRFLFGSFEPRVAYCDAAAAIDDDYLGAIRKMSADVLQRQPLAYISRSKEYNIQPKPVLSAFEFRALAMTTVRSLLMFYLPLLEPKTASEDDDDFLNNAAEENRHTDLIVPLKKSAKQIARETTVVTTRRVLERLALSYVSQRMAWKLLKDVPQSALRKAQRGLPTHVYIFKVSQTTLRGHFLGIAASWVVQVGIEIYRCVFPNVKPEEEEEEEKVEISQQAKDLGNKVVGITVRCGASLVFAAIGAGICSCLIRPSTGQWIGCALGDLAGPMVVSVCLQKTLQADY

SEQ ID NO: 49027 - protein, 256 aa, Arabidopsis thaliana
  peptide (1)..(256): Ceres Seq. ID no. 13600804
  misc_feature (1)..(256): Homolog of NCBI NO: 15240548 NR Description: expressed protein [Arabidopsis thaliana]
MSADVLQRQPLAYISRSKEYNIQPKPVLSAFEFRALAMTTVRSLLMFYLPLLEPKTASEDDDDFLNNAAEENRHTDLIVPLKKSAKQIARETTVVTTRRVLERLALSYVSQRMAWKLLKDVPQSALRKAQRGLPTHVYIFKVSQTTLRGHFLGIAASWVVQVGIEIYRCVFPNVKPEEEEEEEKVEISQQAKDLGNKVVGITVRCGASLVFAAIGAGICSCLIRPSTGQWIGCALGDLAGPMVVSVCLQKTLQADY

SEQ ID NO: 49028 - protein, 219 aa, Arabidopsis thaliana
  peptide (1)..(219): Ceres Seq. ID no. 13600805
  misc_feature (1)..(219): Homolog of NCBI NO: 15240548 NR Description: expressed protein [Arabidopsis thaliana]
MTTVRSLLMFYLPLLEPKTASEDDDDFLNNAAEENRHTDLIVPLKKSAKQIARETTVVTTRRVLERLALSYVSQRMAWKLLKDVPQSALRKAQRGLPTHVYIFKVSQTTLRGHFLGIAASWVVQVGIEIYRCVFPNVKPEEEEEEEKVEISQQAKDLGNKVVGITVRCGASLVFAAIGAGICSCLIRPSTGQWIGCALGDLAGPMVVSVCLQKTLQADY

SEQ ID NO: 49029 - DNA, 1966 bp, Arabidopsis thaliana; identical to SEQ ID NO: 45864
  misc_feature (1)..(1966): Ceres Seq. ID no. 13591692
  misc_feature: MA Experiment ID: 20000179 Result: Up-regulated in Transcription
  misc_feature: MA Experiment 20000179 PARAMETER Experiment Name: At_Germinating_Seeds_P Parameter: Age (hr) Value: 6 vs. 0
  misc_feature: MA Experiment 20000179 PARAMETER Experiment Name: At_Germinating_Seeds_P Parameter: Tissue Value: Germinating Seeds
  misc_feature: MA Experiment ID: 20000180 Result: Up-regulated in Transcription
  misc_feature: MA Experiment 20000180 PARAMETER Experiment Name: At_Germinating_Seeds_P Parameter: Age (hr) Value: 24 vs. 0
  misc_feature: MA Experiment 20000180 PARAMETER Experiment Name: At_Germinating_Seeds_P Parameter: Tissue Value: Germinating Seeds
  misc_feature: MA Experiment ID: 20000214 Result: Up-regulated in Transcription
  misc_feature: MA Experiment 20000214 PARAMETER Experiment Name: At_4deg_Cold_P Parameter: Timepoint (hr) Value: 6
  misc_feature: MA Experiment ID: 20000794 Result: Up-regulated in Transcription
  misc_feature: MA Experiment 20000794 PARAMETER Experiment Name: At_Petals_P Parameter: Age (day) Value: 23-25 days
  misc_feature: MA Experiment 20000794 PARAMETER Experiment Name: At_Petals_P Parameter: Plant Line Value: WS
  misc_feature: MA Experiment 20000794 PARAMETER Experiment Name: At_Petals_P Parameter: Tissue Value: Petals vs. Whole plant
  misc_feature: MA Experiment ID: 20001248 Result: Down-regulated in Transcription
  misc_feature: MA Experiment 20001248 PARAMETER Experiment Name: At_Far-red-induction_P Parameter: Age (day) Value: 7
  misc_feature: MA Experiment 20001248 PARAMETER Experiment Name: At_Far-red-induction_P Parameter: Light Value: Far-red vs. White
  misc_feature: MA Experiment 20001248 PARAMETER Experiment Name: At_Far-red-induction_P Parameter: Organism Value: A. thaliana
  misc_feature: MA Experiment 20001248 PARAMETER Experiment Name: At_Far-red-induction_P Parameter: Plant Line Value: Columbia
  misc_feature: MA Experiment 20001248 PARAMETER Experiment Name: At_Far-red-induction_P Parameter: Timepoint (hr) Value: 4
  misc_feature: MA Experiment 20001248 PARAMETER Experiment Name: At_Far-red-induction_P Parameter: Tissue Value: Whole Plant
  misc_feature: MA Experiment ID: 20001557 Result: Up-regulated in Transcription
  misc_feature: MA Experiment 20001557 PARAMETER Experiment Name: At_Drought_Soil_Dry_P Parameter: Age (day) Value: 27
  misc_feature: MA Experiment 20001557 PARAMETER Experiment Name: At_Drought_Soil_Dry_P Parameter: Organism Value: A. thaliana
  misc_feature: MA Experiment 20001557 PARAMETER Experiment Name: At_Drought_Soil_Dry_P Parameter: Plant Line Value: WS
  misc_feature: MA Experiment 20001557 PARAMETER Experiment Name: At_Drought_Soil_Dry_P Parameter: Post Timepoint (hr) Value: 3
  misc_feature: MA Experiment 20001557 PARAMETER Experiment Name: At_Drought_Soil_Dry_P Parameter: Post-Treatment Value: Re-Water vs. No Drought
  misc_feature: MA Experiment 20001557 PARAMETER Experiment Name: At_Drought_Soil_Dry_P Parameter: Timepoint (day) Value: 13
  misc_feature: MA Experiment 20001557 PARAMETER Experiment Name: At_Drought_Soil_Dry_P Parameter: Treatment Value: Drought vs. No Drought
  misc_feature: MA Experiment ID: 20001559 Result: Down-regulated in Transcription
  misc_feature: MA Experiment 20001559 PARAMETER Experiment Name: At_Drought_Soil_Dry_P Parameter: Age (day) Value: 28
  misc_feature: MA Experiment 20001559 PARAMETER Experiment Name: At_Drought_Soil_Dry_P Parameter: Organism Value: A. thaliana
  misc_feature: MA Experiment 20001559 PARAMETER Experiment Name: At_Drought_Soil_Dry_P Parameter: Plant Line Value: WS
  misc_feature: MA Experiment 20001559 PARAMETER Experiment Name: At_Drought_Soil_Dry_P Parameter: Post Timepoint (hr) Value: 29
  misc_feature: MA Experiment 20001559 PARAMETER Experiment Name: At_Drought_Soil_Dry_P Parameter: Post-Treatment Value: Re-Water vs. No Drought
  misc_feature: MA Experiment 20001559 PARAMETER Experiment Name: At_Drought_Soil_Dry_P Parameter: Timepoint (day) Value: 14
  misc_feature: MA Experiment 20001559 PARAMETER Experiment Name: At_Drought_Soil_Dry_P Parameter: Treatment Value: Drought vs. No Drought

SEQ ID NO: 49030 - protein, 460 aa, Arabidopsis thaliana; identical to SEQ ID NO: 45865
  peptide (1)..(460): Ceres Seq. ID no. 13591693
  misc_feature (114)..(443): Pfam Name: NAD dependent epimerase/dehydratase family Pfam Description: NAD dependent epimerase/dehydratase family
  misc_feature (114)..(443): Pfam Name: NAD dependent epimerase/dehydratase family Pfam Description: NAD dependent epimerase/dehydratase family
  misc_feature (114)..(443): Pfam Name: NAD dependent epimerase/dehydratase family Pfam Description: NAD dependent epimerase/dehydratase family
  misc_feature (114)..(443): Pfam Name: NAD dependent epimerase/dehydratase family Pfam Description: NAD dependent epimerase/dehydratase family
  misc_feature (65)..(450): Homolog of NCBI NO: 15234745 NR Description: nucleotide sugar epimerase family [Arabidopsis
  misc_feature (25)..(443): Homolog of NCBI NO: 15293119 NR Description: putative nucleotide sugar epimerase [Arabidopsis
  misc_feature (25)..(443): Homolog of NCBI NO: 15234486 NR Description: nucleotide sugar epimerase family [Arabidopsis
  misc_feature (14)..(443): Homolog of NCBI NO: 15225451 NR Description: nucleotide sugar epimerase family [Arabidopsis
  misc_feature (1)..(443): Homolog of NCBI NO: 29647497 NR Description: OJ1191_A10.21 [Oryza sativa (japonica
  misc_feature (65)..(450): Homolog of NCBI NO: 15234745 NR Description: nucleotide sugar epimerase family [Arabidopsis
  misc_feature (25)..(443): Homolog of NCBI NO: 15234486 NR Description: nucleotide sugar epimerase family [Arabidopsis
  misc_feature (1)..(443): Homolog of NCBI NO: 29647497 NR Description: OJ1191_A10.21 [Oryza sativa (japonica
  misc_feature (14)..(443): Homolog of NCBI NO: 15225451 NR Description: nucleotide sugar epimerase family [Arabidopsis
  misc_feature (25)..(443): Homolog of NCBI NO: 15234486 NR Description: nucleotide sugar epimerase family [Arabidopsis
  misc_feature (25)..(443): Homolog of NCBI NO: 15293119 NR Description: putative nucleotide sugar epimerase [Arabidopsis
  misc_feature (65)..(450): Homolog of NCBI NO: 15234745 NR Description: nucleotide sugar epimerase family [Arabidopsis
  misc_feature (1)..(460): Homolog of NCBI NO: 15229524 NR Description: NAD-dependent epimerase/dehydratase family
  misc_feature (1)..(460): Homolog of NCBI NO: 24417280 NR Description: unknown [Arabidopsis thaliana]
  misc_feature (90)..(443): Homolog of NCBI NO: 15217591 NR Description: nucleotide sugar epimerase family [Arabidopsis
  misc_feature (90)..(443): Homolog of NCBI NO: 21536982 NR Description: nucleotide sugar epimerase, putative [Arabidopsis
  misc_feature (90)..(443): Homolog of NCBI NO: 15236712 NR Description: nucleotide sugar epimerase family [Arabidopsis
  misc_feature (1)..(460): Homolog of NCBI NO: 15229524 NR Description: NAD-dependent epimerase/dehydratase family
  misc_feature (1)..(460): Homolog of NCBI NO: 24417280 NR Description: unknown [Arabidopsis thaliana]
  misc_feature (90)..(443): Homolog of NCBI NO: 15217591 NR Description: nucleotide sugar epimerase family [Arabidopsis
  misc_feature (90)..(443): Homolog of NCBI NO: 21536982 NR Description: nucleotide sugar epimerase, putative [Arabidopsis
  misc_feature (90)..(443): Homolog of NCBI NO: 15236712 NR Description: nucleotide sugar epimerase family [Arabidopsis
  misc_feature (1)..(443): Homolog of NCBI NO: 29647497 NR Description: OJ1191_A10.21 [Oryza sativa (japonica
  misc_feature (14)..(443): Homolog of NCBI NO: 15225451 NR Description: nucleotide sugar epimerase family [Arabidopsis
  misc_feature (25)..(443): Homolog of NCBI NO: 15234486 NR Description: nucleotide sugar epimerase family [Arabidopsis
  misc_feature (25)..(443): Homolog of NCBI NO: 15293119 NR Description: putative nucleotide sugar epimerase [Arabidopsis
  misc_feature (65)..(450): Homolog of NCBI NO: 15234745 NR Description: nucleotide sugar epimerase family [Arabidopsis
  misc_feature (1)..(460): Homolog of NCBI NO: 15229524 NR Description: NAD-dependent epimerase/dehydratase family
  misc_feature (1)..(460): Homolog of NCBI NO: 24417280 NR Description: unknown [Arabidopsis thaliana]
  misc_feature (90)..(443): Homolog of NCBI NO: 15217591 NR Description: nucleotide sugar epimerase family [Arabidopsis
  misc_feature (90)..(443): Homolog of NCBI NO: 21536982 NR Description: nucleotide sugar epimerase, putative [Arabidopsis
  misc_feature (90)..(443): Homolog of NCBI NO: 15236712 NR Description: nucleotide sugar epimerase family [Arabidopsis
  misc_feature (1)..(443): Homolog of NCBI NO: 29647497 NR Description: OJ1191_A10.21 [Oryza sativa (japonica
  misc_feature (14)..(443): Homolog of NCBI NO: 15225451 NR Description: nucleotide sugar epimerase family [Arabidopsis
  misc_feature (25)..(443): Homolog of NCBI NO: 15293119 NR Description: putative nucleotide sugar epimerase [Arabidopsis
  misc_feature (90)..(443): Homolog of NCBI NO: 15236712 NR Description: nucleotide sugar epimerase family [Arabidopsis
  misc_feature (90)..(443): Homolog of NCBI NO: 21536982 NR Description: nucleotide sugar epimerase, putative [Arabidopsis
  misc_feature (90)..(443): Homolog of NCBI NO: 15217591 NR Description: nucleotide sugar epimerase family [Arabidopsis
  misc_feature (1)..(460): Homolog of NCBI NO: 24417280 NR Description: unknown [Arabidopsis thaliana]
  misc_feature (1)..(460): Homolog of NCBI NO: 15229524 NR Description: NAD-dependent epimerase/dehydratase family

SEQ ID NO: 49031 - protein, 258 aa, Arabidopsis thaliana; identical to SEQ ID NO: 45866
  peptide (1)..(258): Ceres Seq. ID no. 13591694
  misc_feature (1)..(241): Pfam Name: NAD dependent epimerase/dehydratase family Pfam Description: NAD dependent epimerase/dehydratase family
  misc_feature (1)..(241): Pfam Name: NAD dependent epimerase/dehydratase family Pfam Description: NAD dependent epimerase/dehydratase family
  misc_feature (1)..(241): Pfam Name: NAD dependent epimerase/dehydratase family Pfam Description: NAD dependent epimerase/dehydratase family
  misc_feature (1)..(241): Pfam Name: NAD dependent epimerase/dehydratase family Pfam Description: NAD dependent epimerase/dehydratase family
  misc_feature (1)..(248): Homolog of NCBI NO: 15234745 NR Description: nucleotide sugar epimerase family [Arabidopsis
  misc_feature (1)..(241): Homolog of NCBI NO: 15293119 NR Description: putative nucleotide sugar epimerase [Arabidopsis
  misc_feature (1)..(241): Homolog of NCBI NO: 15234486 NR Description: nucleotide sugar epimerase family [Arabidopsis
  misc_feature (1)..(241): Homolog of NCBI NO: 15225451 NR Description: nucleotide sugar epimerase family [Arabidopsis
  misc_feature (1)..(241): Homolog of NCBI NO: 29647497 NR Description: OJ1191_A10.21 [Oryza sativa (japonica
  misc_feature (1)..(248): Homolog of NCBI NO: 15234745 NR Description: nucleotide sugar epimerase family [Arabidopsis
  misc_feature (1)..(241): Homolog of NCBI NO: 15234486 NR Description: nucleotide sugar epimerase family [Arabidopsis
  misc_feature (1)..(241): Homolog of NCBI NO: 29647497 NR Description: OJ1191_A10.21 [Oryza sativa (japonica
  misc_feature (1)..(241): Homolog of NCBI NO: 15225451 NR Description: nucleotide sugar epimerase family [Arabidopsis
  misc_feature (1)..(241): Homolog of NCBI NO: 15234486 NR Description: nucleotide sugar epimerase family [Arabidopsis
  misc_feature (1)..(241): Homolog of NCBI NO: 15293119 NR Description: putative nucleotide sugar epimerase [Arabidopsis
  misc_feature (1)..(248): Homolog of NCBI NO: 15234745 NR Description: nucleotide sugar epimerase family [Arabidopsis
  misc_feature (1)..(258): Homolog of NCBI NO: 15229524 NR Description: NAD-dependent epimerase/dehydratase family
  misc_feature (1)..(258): Homolog of NCBI NO: 24417280 NR Description: unknown [Arabidopsis thaliana]
  misc_feature (1)..(241): Homolog of NCBI NO: 15217591 NR Description: nucleotide sugar epimerase family [Arabidopsis
  misc_feature (1)..(241): Homolog of NCBI NO: 21536982 NR Description: nucleotide sugar epimerase, putative [Arabidopsis
  misc_feature (1)..(241): Homolog of NCBI NO: 15236712 NR Description: nucleotide sugar epimerase family [Arabidopsis
  misc_feature (1)..(258): Homolog of NCBI NO: 15229524 NR Description: NAD-dependent epimerase/dehydratase family
  misc_feature (1)..(258): Homolog of NCBI NO: 24417280 NR Description: unknown [Arabidopsis thaliana]
  misc_feature (1)..(241): Homolog of NCBI NO: 15217591 NR Description: nucleotide sugar epimerase family [Arabidopsis
  misc_feature (1)..(241): Homolog of NCBI NO: 21536982 NR Description: nucleotide sugar epimerase, putative [Arabidopsis
  misc_feature (1)..(241): Homolog of NCBI NO: 15236712 NR Description: nucleotide sugar epimerase family [Arabidopsis
  misc_feature (1)..(241): Homolog of NCBI NO: 29647497 NR Description: OJ1191_A10.21 [Oryza sativa (japonica
  misc_feature (1)..(241): Homolog of NCBI NO: 15225451 NR Description: nucleotide sugar epimerase family [Arabidopsis
  misc_feature (1)..(241): Homolog of NCBI NO: 15234486 NR Description: nucleotide sugar epimerase family [Arabidopsis
  misc_feature (1)..(241): Homolog of NCBI NO: 15293119 NR Description: putative nucleotide sugar epimerase [Arabidopsis
  misc_feature (1)..(248): Homolog of NCBI NO: 15234745 NR Description: nucleotide sugar epimerase family [Arabidopsis
  misc_feature (1)..(258): Homolog of NCBI NO: 15229524 NR Description: NAD-dependent epimerase/dehydratase family
  misc_feature (1)..(258): Homolog of NCBI NO: 24417280 NR Description: unknown [Arabidopsis thaliana]
  misc_feature (1)..(241): Homolog of NCBI NO: 15217591 NR Description: nucleotide sugar epimerase family [Arabidopsis
  misc_feature (1)..(241): Homolog of NCBI NO: 21536982 NR Description: nucleotide sugar epimerase, putative [Arabidopsis
  misc_feature (1)..(241): Homolog of NCBI NO: 15236712 NR Description: nucleotide sugar epimerase family [Arabidopsis
  misc_feature (1)..(241): Homolog of NCBI NO: 29647497 NR Description: OJ1191_A10.21 [Oryza sativa (japonica
  misc_feature (1)..(241): Homolog of NCBI NO: 15225451 NR Description: nucleotide sugar epimerase family [Arabidopsis
  misc_feature (1)..(241): Homolog of NCBI NO: 15293119 NR Description: putative nucleotide sugar epimerase [Arabidopsis
  misc_feature (1)..(241): Homolog of NCBI NO: 15236712 NR Description: nucleotide sugar epimerase family [Arabidopsis
  misc_feature (1)..(241): Homolog of NCBI NO: 21536982 NR Description: nucleotide sugar epimerase, putative [Arabidopsis
  misc_feature (1)..(241): Homolog of NCBI NO: 15217591 NR Description: nucleotide sugar epimerase family [Arabidopsis
  misc_feature (1)..(258): Homolog of NCBI NO: 24417280 NR Description: unknown [Arabidopsis thaliana]
  misc_feature (1)..(258): Homolog of NCBI NO: 15229524 NR Description: NAD-dependent epimerase/dehydratase family

SEQ ID NO: 49032 - DNA, 414 bp, Arabidopsis thaliana
  misc_feature (1)..(414): Ceres Seq. ID no. 13592077
ggtgattaaaaaagaaagcaaaactctgtaatcgaaactgaagaaagccctaagaataaaaagcctgttgtgggaatggaacaagctgcagagaggagttcaaccattgttgcatccacctctgaagggtcggattttgatccgatatctcgattgaggaagctcttgttccgccaaatgcttgtgggaatcaaagacggcagattcttccttggaaatttccattgcattgacaaacaaggaaacatcattctccaagacactgtggagtatcgtagcatacgaagatcatctccttcgcctactgaacagcgttgtcttggtatgatcctaatcccttcctcttgcaggacatcttgccatgttgattgctctatcgatgaacagctttcgttgattcagctgaaagagtag

SEQ ID NO: 49033 - protein, 112 aa, Arabidopsis thaliana
  peptide (1)..(112): Ceres Seq. ID no. 13592078
  misc_feature (35)..(112): Homolog of NCBI NO: 38566550 NR Description: At4g18372 [Arabidopsis thaliana]
  misc_feature (1)..(112): Homolog of NCBI NO: 22328770 NR Description: expressed protein [Arabidopsis thaliana]
MEQAAERSSTIVASTSEGSDFDPISRLRKLLFRQMLVGIKDGRFFLGNFHCIDKQGNIILQDTVEYRSIRRSSPSPTEQRCLGMILIPSSCRTSCHVDCSIDEQLSLIQLKE

SEQ ID NO: 49034 - protein, 78 aa, Arabidopsis thaliana
  peptide (1)..(78): Ceres Seq. ID no. 13592079
  misc_feature (1)..(78): Homolog of NCBI NO: 38566550 NR Description: At4g18372 [Arabidopsis thaliana]
  misc_feature (1)..(78): Homolog of NCBI NO: 22328770 NR Description: expressed protein [Arabidopsis thaliana]
MLVGIKDGRFFLGNFHCIDKQGNIILQDTVEYRSIRRSSPSPTEQRCLGMILIPSSCRTSCHVDCSIDEQLSLIQLKE

SEQ ID NO: 49035 - DNA, 1119 bp, Arabidopsis thaliana
  misc_feature (1)..(1119): Ceres Seq. ID no. 12578086
  misc_feature: MA Experiment ID: 108579 Result: Down-regulated in Transcription
  misc_feature: MA Experiment 108579 PARAMETER Experiment Name: At_4deg_Cold_cDNA_P Parameter: Temperature (deg C) Value: 4 vs. 22
  misc_feature: MA Experiment 108579 PARAMETER Experiment Name: At_4deg_Cold_cDNA_P Parameter: Timepoint (hr) Value: 6
  misc_feature: MA Experiment 108579 PARAMETER Experiment Name: At_4deg_Cold_cDNA_P Parameter: Tissue Value: Aerial
  misc_feature: MA Experiment ID: 20000069 Result: Up-regulated in Transcription
  misc_feature: MA Experiment 20000069 PARAMETER Experiment Name: At_100uM_ABA_Mutants_cDNA_P Parameter: Plant Line Value: CS23
  misc_feature: MA Experiment 20000069 PARAMETER Experiment Name: At_100uM_ABA_Mutants_cDNA_P Parameter: Timepoint (hr) Value: 6
  misc_feature: MA Experiment 20000069 PARAMETER Experiment Name: At_100uM_ABA_Mutants_cDNA_P Parameter: Tissue Value: Aerial
  misc_feature: MA Experiment 20000069 PARAMETER Experiment Name: At_100uM_ABA_Mutants_cDNA_P Parameter: Treatment Value: 100uM ABA vs. No Treatment
  misc_feature: MA Experiment ID: 20000184 Result: Down-regulated in Transcription
  misc_feature: MA Experiment 20000184 PARAMETER Experiment Name: At_Shoots__P Parameter: Age (day) Value: 7
  misc_feature: MA Experiment 20000184 PARAMETER Experiment Name: At_Shoots__P Parameter: Tissue Value: Shoots vs. Whole Plant
  misc_feature: MA Experiment ID: 20000224 Result: Up-regulated in Transcription
  misc_feature: MA Experiment ID: 20000437 Result: Up-regulated in Transcription
  misc_feature: MA Experiment 20000437 PARAMETER Experiment Name: At_Drought_P Parameter: Age (day) Value: 8
  misc_feature: MA Experiment 20000437 PARAMETER Experiment Name: At_Drought_P Parameter: Organism Value: A. thaliana
  misc_feature: MA Experiment 20000437 PARAMETER Experiment Name: At_Drought_P Parameter: Plant Line Value: WS
  misc_feature: MA Experiment 20000437 PARAMETER Experiment Name: At_Drought_P Parameter: Timepoint (hr) Value: 24
  misc_feature: MA Experiment 20000437 PARAMETER Experiment Name: At_Drought_P Parameter: Tissue Value: Whole Plant
  misc_feature: MA Experiment 20000437 PARAMETER Experiment Name: At_Drought_P Parameter: Treatment Value: Drought vs. No Drought
  misc_feature: MA Experiment ID: 20000495 Result: Up-regulated in Transcription
  misc_feature: MA Experiment 20000495 PARAMETER Experiment Name: At_Guard_Cells_P Parameter: Harvest Date Value: 8/2/2002
  misc_feature: MA Experiment 20000495 PARAMETER Experiment Name: At_Guard_Cells_P Parameter: Organism Value: A. thaliana
  misc_feature: MA Experiment 20000495 PARAMETER Experiment Name: At_Guard_Cells_P Parameter: Tissue Value: Guard Cells vs. Leaves
  misc_feature: MA Experiment ID: 20000794 Result: Up-regulated in Transcription
  misc_feature: MA Experiment 20000794 PARAMETER Experiment Name: At_Petals_P Parameter: Age (day) Value: 23-25 days
  misc_feature: MA Experiment 20000794 PARAMETER Experiment Name: At_Petals_P Parameter: Plant Line Value: WS
  misc_feature: MA Experiment 20000794 PARAMETER Experiment Name: At_Petals_P Parameter: Tissue Value: Petals vs. Whole plant
  misc_feature: MA Experiment ID: 20001558 Result: Down-regulated in Transcription
  misc_feature: MA Experiment 20001558 PARAMETER Experiment Name: At_Drought_Soil_Dry_P Parameter: Age (day) Value: 27
  misc_feature: MA Experiment 20001558 PARAMETER Experiment Name: At_Drought_Soil_Dry_P Parameter: Organism Value: A. thaliana
  misc_feature: MA Experiment 20001558 PARAMETER Experiment Name: At_Drought_Soil_Dry_P Parameter: Plant Line Value: WS
  misc_feature: MA Experiment 20001558 PARAMETER Experiment Name: At_Drought_Soil_Dry_P Parameter: Post Timepoint (hr) Value: 6
  misc_feature: MA Experiment 20001558 PARAMETER Experiment Name: At_Drought_Soil_Dry_P Parameter: Post-Treatment Value: Re-Water vs. No Drought
  misc_feature: MA Experiment 20001558 PARAMETER Experiment Name: At_Drought_Soil_Dry_P Parameter: Timepoint (day) Value: 13
  misc_feature: MA Experiment 20001558 PARAMETER Experiment Name: At_Drought_Soil_Dry_P Parameter: Treatment Value: Drought vs. No Drought
  misc_feature: MA Experiment ID: 20001911 Result: Up-regulated in Transcription
  misc_feature: MA Experiment 20001911 PARAMETER Experiment Name: At_Drought_Reproduction_P Parameter: Age (day) Value: 40
  misc_feature: MA Experiment 20001911 PARAMETER Experiment Name: At_Drought_Reproduction_P Parameter: Organism Value: A. thaliana
  misc_feature: MA Experiment 20001911 PARAMETER Experiment Name: At_Drought_Reproduction_P Parameter: Plant Line Value: WS
  misc_feature: MA Experiment 20001911 PARAMETER Experiment Name: At_Drought_Reproduction_P Parameter: Timepoint (day) Value: 10
  misc_feature: MA Experiment 20001911 PARAMETER Experiment Name: At_Drought_Reproduction_P Parameter: Tissue Value: Flowers
  misc_feature: MA Experiment 20001911 PARAMETER Experiment Name: At_Drought_Reproduction_P Parameter: Treatment Value: Drought vs. No Drought
atcttgttgatatgtctttatctttttcttctcctgttaaagcatggcttctggaacctagatgaagatcgaaaggctctacgagttctccagccggatttggtgctcttcacaggcagcttctctgttactgacgtcaaattgatttccttttttttttgaatttctccatttctcttcacactacctctaatgattttgattaaagttagaacatttgaatccaattccaaattctgtcaggtgattttggtgaagaaaacgtcccactggttcaaagtgttgccgctcttactttccctaaagcagtcatattggggaatcatgatgcctggttcacccaagattttccaaggaaagaaaaacaaaaacaaaacggtgttcaaatgcaactcgatatccttggtgacgagcacataggatatcaacgcatggacttcccatcttttaagctcagtattgttggtggtcgacccttttcacatggtggggatcgattgtttcggaaaaatctgcttgtccagaggtatggagttcatgatatggaagccagtgctgggagtatttgtcgagctgcacatggaacaccggaagatcacgtggctataattctcgctcacaatgggccaacaggtcttggttggcaagcagaggatatatgtggaaaagactggggggctgaaggcggtgaccatggtgatccagatctagagcaggcgatacgacagttgaaggagacgactaagttgtcgattcctttagttgtgtttgggcacatgcataaggagctgcaacgggggaaaggaaatcggaaaatggtagtgcaagatagtgacaaccagactgtgtatgtgaacggtgcaatagttccaagggttaaagaggcaaagaaaagaggagcagcagagtctgagagtggtggcacaacaagagctttcacattggtggagattttagatgggaaaatcaagaaaatagcagaaatttgggtacatgtaaatggaagtatggctaagattgtggaggaaaatactttgtttgaagatgtaacctgatttgaaatttaaacaattaattcgggacaagactgtaataactaattatacatttgtcttggcg

SEQ ID NO: 49036 - protein, 222 aa, Arabidopsis thaliana; identical to SEQ ID NO: 22352
  peptide (1)..(222): Ceres Seq. ID no. 12578087
  misc_feature (1)..(132): Pfam Name: Calcineurin-like phosphoesterase Pfam Description: Calcineurin-like phosphoesterase
  misc_feature (1)..(220): Homolog of NCBI NO: 33861236 NR Description: putative transcripton factor
  misc_feature (1)..(163): Homolog of NCBI NO: 33865849 NR Description: putative transcripton factor [Synechococcus sp.
  misc_feature (1)..(209): Homolog of NCBI NO: 33240462 NR Description: Predicted phosphoesterase
  misc_feature (1)..(218): Homolog of NCBI NO: 23042127 NR Description: hypothetical protein [Trichodesmium erythraeum
  misc_feature (1)..(222): Homolog of NCBI NO: 17232166 NR Description: putative transcripton factor for heterocyst
  misc_feature (1)..(219): Homolog of NCBI NO: 23124236 NR Description: hypothetical protein [Nostoc punctiforme]
  misc_feature (1)..(218): Homolog of NCBI NO: 16331583 NR Description: hypothetical protein [Synechocystis sp. PCC 6803]
  misc_feature (16)..(222): Homolog of NCBI NO: 8777321 NR Description: contains similarity to
  misc_feature (1)..(222): Homolog of NCBI NO: 30697022 NR Description: contains similarity to phosphoesterase

SEQ ID NO: 49037 - protein, 207 aa, Arabidopsis thaliana
  peptide (1)..(207): Ceres Seq. ID no. 12578088
  misc_feature (1)..(117): Pfam Name: Calcineurin-like phosphoesterase Pfam Description: Calcineurin-like phosphoesterase
  misc_feature (1)..(205): Homolog of NCBI NO: 33861236 NR Description: putative transcripton factor
  misc_feature (1)..(148): Homolog of NCBI NO: 33865849 NR Description: putative transcripton factor [Synechococcus sp.
  misc_feature (1)..(194): Homolog of NCBI NO: 33240462 NR Description: Predicted phosphoesterase
  misc_feature (1)..(203): Homolog of NCBI NO: 23042127 NR Description: hypothetical protein [Trichodesmium erythraeum
  misc_feature (1)..(207): Homolog of NCBI NO: 17232166 NR Description: putative transcripton factor for heterocyst
  misc_feature (1)..(204): Homolog of NCBI NO: 23124236 NR Description: hypothetical protein [Nostoc punctiforme]
  misc_feature (1)..(203): Homolog of NCBI NO: 16331583 NR Description: hypothetical protein [Synechocystis sp. PCC 6803]
  misc_feature (1)..(207): Homolog of NCBI NO: 8777321 NR Description: contains similarity to
  misc_feature (1)..(207): Homolog of NCBI NO: 30697022 NR Description: contains similarity to phosphoesterase
MDFPSFKLSIVGGRPFSHGGDRLFRKNLLVQRYGVHDMEASAGSICRAAHGTPEDHVAIILAHNGPTGLGWQAEDICGKDWGAEGGDHGDPDLEQAIRQLKETTKLSIPLVVFGHMHKELQRGKGNRKMVVQDSDNQTVYVNGAIVPRVKEAKKRGAAESESGGTTRAFTLVEILDGKIKKIAEIWVHVNGSMAKIVEENTLFEDVT

SEQ ID NO: 49038 - protein, 170 aa, Arabidopsis thaliana
  peptide (1)..(170): Ceres Seq. ID no. 12578089
  misc_feature (1)..(80): Pfam Name: Calcineurin-like phosphoesterase Pfam Description: Calcineurin-like phosphoesterase
  misc_feature (1)..(168): Homolog of NCBI NO: 33861236 NR Description: putative transcripton factor
  misc_feature (1)..(111): Homolog of NCBI NO: 33865849 NR Description: putative transcripton factor [Synechococcus sp.
  misc_feature (1)..(157): Homolog of NCBI NO: 33240462 NR Description: Predicted phosphoesterase
  misc_feature (1)..(166): Homolog of NCBI NO: 23042127 NR Description: hypothetical protein [Trichodesmium erythraeum
  misc_feature (1)..(170): Homolog of NCBI NO: 17232166 NR Description: putative transcripton factor for heterocyst
  misc_feature (1)..(167): Homolog of NCBI NO: 23124236 NR Description: hypothetical protein [Nostoc punctiforme]
  misc_feature (1)..(166): Homolog of NCBI NO: 16331583 NR Description: hypothetical protein [Synechocystis sp. PCC 6803]
  misc_feature (1)..(170): Homolog of NCBI NO: 8777321 NR Description: contains similarity to
  misc_feature (1)..(170): Homolog of NCBI NO: 30697022 NR Description: contains similarity to phosphoesterase
MEASAGSICRAAHGTPEDHVAIILAHNGPTGLGWQAEDICGKDWGAEGGDHGDPDLEQAIRQLKETTKLSIPLVVFGHMHKELQRGKGNRKMVVQDSDNQTVYVNGAIVPRVKEAKKRGAAESESGGTTRAFTLVEILDGKIKKIAEIWVHVNGSMAKIVEENTLFEDVT

SEQ ID NO: 49039 - DNA, 2323 bp, Arabidopsis thaliana
  misc_feature (1)..(2323): Ceres Seq. ID no. 13592080
  misc_feature: MA Experiment ID: 20000182 Result: Down-regulated in Transcription
  misc_feature: MA Experiment 20000182 PARAMETER Experiment Name: At_2mM_SA_P Parameter: Age (day) Value: 14
  misc_feature: MA Experiment 20000182 PARAMETER Experiment Name: At_2mM_SA_P Parameter: Organism Value: A. thaliana
  misc_feature: MA Experiment 20000182 PARAMETER Experiment Name: At_2mM_SA_P Parameter: Plant Line Value: WS
  misc_feature: MA Experiment 20000182 PARAMETER Experiment Name: At_2mM_SA_P Parameter: Timepoint (hr) Value: 6
  misc_feature: MA Experiment 20000182 PARAMETER Experiment Name: At_2mM_SA_P Parameter: Tissue Value: Aerial
  misc_feature: MA Experiment 20000182 PARAMETER Experiment Name: At_2mM_SA_P Parameter: Treatment Value: 2mM SA vs. No Treatment
  misc_feature: MA Experiment ID: 20000234 Result: Up-regulated in Transcription
  misc_feature: MA Experiment 20000234 PARAMETER Experiment Name: At_Siliques_P Parameter: Age (day) Value: 21
  misc_feature: MA Experiment 20000234 PARAMETER Experiment Name: At_Siliques_P Parameter: Organism Value: A. thaliana
  misc_feature: MA Experiment 20000234 PARAMETER Experiment Name: At_Siliques_P Parameter: Plant Line Value: WS
  misc_feature: MA Experiment 20000234 PARAMETER Experiment Name: At_Siliques_P Parameter: Tissue Value: Less Than 5mm Siliques vs. Whole Plant
  misc_feature: MA Experiment ID: 20000437 Result: Down-regulated in Transcription
  misc_feature: MA Experiment 20000437 PARAMETER Experiment Name: At_Drought_P Parameter: Age (day) Value: 8
  misc_feature: MA Experiment 20000437 PARAMETER Experiment Name: At_Drought_P Parameter: Organism Value: A. thaliana
  misc_feature: MA Experiment 20000437 PARAMETER Experiment Name: At_Drought_P Parameter: Plant Line Value: WS
  misc_feature: MA Experiment 20000437 PARAMETER Experiment Name: At_Drought_P Parameter: Timepoint (hr) Value: 24
  misc_feature: MA Experiment 20000437 PARAMETER Experiment Name: At_Drought_P Parameter: Tissue Value: Whole Plant
  misc_feature: MA Experiment 20000437 PARAMETER Experiment Name: At_Drought_P Parameter: Treatment Value: Drought vs. No Drought
  misc_feature: MA Experiment ID: 20001451 Result: Down-regulated in Transcription
  misc_feature: MA Experiment 20001451 PARAMETER Experiment Name: At_Far-red-induction_P Parameter: Age (day) Value: 7
  misc_feature: MA Experiment 20001451 PARAMETER Experiment Name: At_Far-red-induction_P Parameter: Light Value: Far-red vs. White
  misc_feature: MA Experiment 20001451 PARAMETER Experiment Name: At_Far-red-induction_P Parameter: Organism Value: A. thaliana
  misc_feature: MA Experiment 20001451 PARAMETER Experiment Name: At_Far-red-induction_P Parameter: Plant Line Value: Columbia
  misc_feature: MA Experiment 20001451 PARAMETER Experiment Name: At_Far-red-induction_P Parameter: Timepoint (hr) Value: 24
  misc_feature: MA Experiment 20001451 PARAMETER Experiment Name: At_Far-red-induction_P Parameter: Tissue Value: Whole Plant
gaatttagttaaggatgaggaagatgaagatgatgatgattcgaaaatgaaggtggtggatactgcaaatggctgctgagtgctgagacactctcgaaccccacaaaccctaaggatctcctccgaagatttccactattactggaagtgatatagatacgttgcaacaaagaagaccacacaaaaacgttattgagcagccgtgaaatcgatttaccaattgaagcttccccccatgatttgactttccctgatgctcgtttgtgggaaagggtttctaaagtgcagagcacctggagttccattcttttgtgacaaaagaaaatccttcttcactaaaactaagaggggctttcacagtttacctttgggcactggggtccgtgtttatttcaacaacaatcttaggtactcaagcaattcaatagaagttgtggagaaagctgccattaatatgggttcaaaggaagacaaggcagataatccagctttatcttcatatgatgatgccatggaagctctgtcgactcttatttctcgtcgaaaccgtggggatcgcacacctactaaaggaaatcgtgacaagcttgaacaagtcgtcacatatctcaagattttggacctggaagacaaaataaaagaactaaaagttattcatgtcgcaggaacaaaaggaaagggttcaacatgtgtcttcagtgaggcaattttacgtaattgtgggtttcgaaccggaatgtttacatctcctcacttgattgatgtgagggaaagattccgaatagatggcttggatatatctgaggaaaagtttctacagtacttctgggaatgttggaagttattgaaggagaaagctgtagatggtcttaccatgcctcctctttttcagtttctcacagtattggcatttaagatttttgtttgtgaaaaggttgatgttgctgtcattgaagttggacttgggggaaaacttgactcgacaaatgtgattcaaaaacctgttgtctgtggcattgcttctcttgggatggatcatatggacatattgggaaatacgctagctgatattgcctttcataaggctgggattttcaagcctcaaatccccgccttcacagtaccacaactctctgaagcaatggatgttcttcagaaaacagctaataatctcgaggttcctctagaagtagtagcgcctcttgaacctaaaaagttggacggagttacgcttggcttgtctggggatcatcagctagtaaatgcaggtcttgctgtttctctttcaagatgctggcttcaaagaaccgggaattggaagaagatatttccaaatgaaagcaaggaaactgagattcccgtggcattttgtcgtggtcttgcaacggcacgtcttcatgggagagctcaagttgttcatgatgtagtttcagatccgcaggactcatcagactcgatggaaactccatgcggtgatctgatcttttacttggatggtgctcacagtccagagagcatggaggcttgtggtcgatggttctcttctgcagtcagaggagacaaaagcttatccactgctgtcaatggttacatgagacatggggagtatggtacagacttaaacagagtctccaaacagattcttctgttcaactgcatggaagtgagagaccctcaagtcttacttccaaagctggtcaccacttgcgcttcctcaggcactcatttctcaagagcgctttttgtcccgagcatgtctacttacaacaaagtcatttcgggtgcatcagcgattccttcagatacacgtagaaaggatttgacttggcaattcagactacaaagactatgggagaaatcaatccaagggactgatgcggggcttgaccatacactgaaacccgatggaataaccgccttaccacctcatgatttcctgtgcggagatgcacctcaatgtggtggacctgcagggacaccggtcacttccagtgccgtaatgccttcacttccattgactataaactggctaagagactgcgtacgccgaaacccttcactgaaactagaggttctggtcacaggatcgctacatcttgttggagatgtgctcaggttgctaaagagatgattttatttttcaccaacaaatcttcaaaaagactccttaagagtaatcttacagagcttcaattgttctttacttcactgtttttttctcatagttactatttgattctttggtccattttatctaacatgagaagtgagaaccctccacttaagctgtatttttctgctaaattttaatttatatttcctc

SEQ ID NO: 49040 - protein, 625 aa, Arabidopsis thaliana
  peptide (1)..(625): Ceres Seq. ID no. 13592081
  misc_feature (408)..(539): Homolog of NCBI NO: 30694288 NR Description: folylpolyglutamate-dihydrofolate synthase
  misc_feature (76)..(390): Homolog of NCBI NO: 30694288 NR Description: folylpolyglutamate-dihydrofolate synthase
  misc_feature (578)..(624): Homolog of NCBI NO: 37535812 NR Description: putative folylpolyglutamate synthetase
  misc_feature (368)..(545): Homolog of NCBI NO: 37535812 NR Description: putative folylpolyglutamate synthetase
  misc_feature (81)..(344): Homolog of NCBI NO: 37535812 NR Description: putative folylpolyglutamate synthetase
  misc_feature (579)..(625): Homolog of NCBI NO: 17976705 NR Description: dihydrofolate synthetase /folylpolyglutamate
  misc_feature (82)..(557): Homolog of NCBI NO: 17976705 NR Description: dihydrofolate synthetase /folylpolyglutamate
  misc_feature (579)..(625): Homolog of NCBI NO: 30681208 NR Description: folylpolyglutamate synthase (fpgs2) [Arabidopsis
  misc_feature (82)..(557): Homolog of NCBI NO: 30681208 NR Description: folylpolyglutamate synthase (fpgs2) [Arabidopsis
  misc_feature (162)..(443): Homolog of NCBI NO: 15228213 NR Description: dihydrofolate synthetase (dhfs) [Arabidopsis
MLVCGKGFLKCRAPGVPFFCDKRKSFFTKTKRGFHSLPLGTGVRVYFNNNLRYSSNSIEVVEKAAINMGSKEDKADNPALSSYDDAMEALSTLISRRNRGDRTPTKGNRDKLEQVVTYLKILDLEDKIKELKVIHVAGTKGKGSTCVFSEAILRNCGFRTGMFTSPHLIDVRERFRIDGLDISEEKFLQYFWECWKLLKEKAVDGLTMPPLFQFLTVLAFKIFVCEKVDVAVIEVGLGGKLDSTNVIQKPVVCGIASLGMDHMDILGNTLADIAFHKAGIFKPQIPAFTVPQLSEAMDVLQKTANNLEVPLEVVAPLEPKKLDGVTLGLSGDHQLVNAGLAVSLSRCWLQRTGNWKKIFPNESKETEIPVAFCRGLATARLHGRAQVVHDVVSDPQDSSDSMETPCGDLIFYLDGAHSPESMEACGRWFSSAVRGDKSLSTAVNGYMRHGEYGTDLNRVSKQILLFNCMEVRDPQVLLPKLVTTCASSGTHFSRALFVPSMSTYNKVISGASAIPSDTRRKDLTWQFRLQRLWEKSIQGTDAGLDHTLKPDGITALPPHDFLCGDAPQCGGPAGTPVTSSAVMPSLPLTINWLRDCVRRNPSLKLEVLVTGSLHLVGDVLRLLKR

SEQ ID NO: 49041 - protein, 558 aa, Arabidopsis thaliana
  peptide (1)..(558): Ceres Seq. ID no. 13592082
  misc_feature (341)..(472): Homolog of NCBI NO: 30694288 NR Description: folylpolyglutamate-dihydrofolate synthase
  misc_feature (9)..(323): Homolog of NCBI NO: 30694288 NR Description: folylpolyglutamate-dihydrofolate synthase
  misc_feature (511)..(557): Homolog of NCBI NO: 37535812 NR Description: putative folylpolyglutamate synthetase
  misc_feature (301)..(478): Homolog of NCBI NO: 37535812 NR Description: putative folylpolyglutamate synthetase
  misc_feature (14)..(277): Homolog of NCBI NO: 37535812 NR Description: putative folylpolyglutamate synthetase
  misc_feature (512)..(558): Homolog of NCBI NO: 17976705 NR Description: dihydrofolate synthetase /folylpolyglutamate
  misc_feature (15)..(490): Homolog of NCBI NO: 17976705 NR Description: dihydrofolate synthetase /folylpolyglutamate
  misc_feature (512)..(558): Homolog of NCBI NO: 30681208 NR Description: folylpolyglutamate synthase (fpgs2) [Arabidopsis
  misc_feature (15)..(490): Homolog of NCBI NO: 30681208 NR Description: folylpolyglutamate synthase (fpgs2) [Arabidopsis
  misc_feature (95)..(376): Homolog of NCBI NO: 15228213 NR Description: dihydrofolate synthetase (dhfs) [Arabidopsis
MGSKEDKADNPALSSYDDAMEALSTLISRRNRGDRTPTKGNRDKLEQVVTYLKILDLEDKIKELKVIHVAGTKGKGSTCVFSEAILRNCGFRTGMFTSPHLIDVRERFRIDGLDISEEKFLQYFWECWKLLKEKAVDGLTMPPLFQFLTVLAFKIFVCEKVDVAVIEVGLGGKLDSTNVIQKPVVCGIASLGMDHMDILGNTLADIAFHKAGIFKPQIPAFTVPQLSEAMDVLQKTANNLEVPLEVVAPLEPKKLDGVTLGLSGDHQLVNAGLAVSLSRCWLQRTGNWKKIFPNESKETEIPVAFCRGLATARLHGRAQVVHDVVSDPQDSSDSMETPCGDLIFYLDGAHSPESMEACGRWFSSAVRGDKSLSTAVNGYMRHGEYGTDLNRVSKQILLFNCMEVRDPQVLLPKLVTTCASSGTHFSRALFVPSMSTYNKVISGASAIPSDTRRKDLTWQFRLQRLWEKSIQGTDAGLDHTLKPDGITALPPHDFLCGDAPQCGGPAGTPVTSSAVMPSLPLTINWLRDCVRRNPSLKLEVLVTGSLHLVGDVLRLLKR

SEQ ID NO: 49042 - protein, 539 aa, Arabidopsis thaliana
  peptide (1)..(539): Ceres Seq. ID no. 13592083
  misc_feature (322)..(453): Homolog of NCBI NO: 30694288 NR Description: folylpolyglutamate-dihydrofolate synthase
  misc_feature (1)..(304): Homolog of NCBI NO: 30694288 NR Description: folylpolyglutamate-dihydrofolate synthase
  misc_feature (492)..(538): Homolog of NCBI NO: 37535812 NR Description: putative folylpolyglutamate synthetase
  misc_feature (282)..(459): Homolog of NCBI NO: 37535812 NR Description: putative folylpolyglutamate synthetase
  misc_feature (1)..(258): Homolog of NCBI NO: 37535812 NR Description: putative folylpolyglutamate synthetase
  misc_feature (493)..(539): Homolog of NCBI NO: 17976705 NR Description: dihydrofolate synthetase /folylpolyglutamate
  misc_feature (1)..(471): Homolog of NCBI NO: 17976705 NR Description: dihydrofolate synthetase /folylpolyglutamate
  misc_feature (493)..(539): Homolog of NCBI NO: 30681208 NR Description: folylpolyglutamate synthase (fpgs2) [Arabidopsis
  misc_feature (1)..(471): Homolog of NCBI NO: 30681208 NR Description: folylpolyglutamate synthase (fpgs2) [Arabidopsis
  misc_feature (76)..(357): Homolog of NCBI NO: 15228213 NR Description: dihydrofolate synthetase (dhfs) [Arabidopsis
MEALSTLISRRNRGDRTPTKGNRDKLEQVVTYLKILDLEDKIKELKVIHVAGTKGKGSTCVFSEAILRNCGFRTGMFTSPHLIDVRERFRIDGLDISEEKFLQYFWECWKLLKEKAVDGLTMPPLFQFLTVLAFKIFVCEKVDVAVIEVGLGGKLDSTNVIQKPVVCGIASLGMDHMDILGNTLADIAFHKAGIFKPQIPAFTVPQLSEAMDVLQKTANNLEVPLEVVAPLEPKKLDGVTLGLSGDHQLVNAGLAVSLSRCWLQRTGNWKKIFPNESKETEIPVAFCRGLATARLHGRAQVVHDVVSDPQDSSDSMETPCGDLIFYLDGAHSPESMEACGRWFSSAVRGDKSLSTAVNGYMRHGEYGTDLNRVSKQILLFNCMEVRDPQVLLPKLVTTCASSGTHFSRALFVPSMSTYNKVISGASAIPSDTRRKDLTWQFRLQRLWEKSIQGTDAGLDHTLKPDGITALPPHDFLCGDAPQCGGPAGTPVTSSAVMPSLPLTINWLRDCVRRNPSLKLEVLVTGSLHLVGDVLRLLKR

SEQ ID NO: 49043 - DNA, 1706 bp, Arabidopsis thaliana; identical to SEQ ID NO: 46320
  misc_feature (1)..(1706): Ceres Seq. ID no. 13591923
  misc_feature: MA Experiment ID: 108576 Result: Down-regulated in Transcription
  misc_feature: MA Experiment 108576 PARAMETER Experiment Name: At_42deg_Heat_cDNA_P Parameter: Temperature (deg C) Value: 42 vs. 22
  misc_feature: MA Experiment 108576 PARAMETER Experiment Name: At_42deg_Heat_cDNA_P Parameter: Timepoint (hr) Value: 1
  misc_feature: MA Experiment 108576 PARAMETER Experiment Name: At_42deg_Heat_cDNA_P Parameter: Tissue Value: Aerial
  misc_feature: MA Experiment ID: 20000306 Result: Up-regulated in Transcription
  misc_feature: MA Experiment 20000306 PARAMETER Experiment Name: At_Germinating_Seeds_Sub_P Parameter: Age (hr) Value: 6 vs. 0
  misc_feature: MA Experiment 20000306 PARAMETER Experiment Name: At_Germinating_Seeds_Sub_P Parameter: Organism Value: A. thaliana
  misc_feature: MA Experiment 20000306 PARAMETER Experiment Name: At_Germinating_Seeds_Sub_P Parameter: Plant Line Value: WS
  misc_feature: MA Experiment 20000306 PARAMETER Experiment Name: At_Germinating_Seeds_Sub_P Parameter: Tissue Value: Germinating Seeds
  misc_feature: MA Experiment ID: 20000307 Result: Up-regulated in Transcription
  misc_feature: MA Experiment 20000307 PARAMETER Experiment Name: At_Germinating_Seeds_Sub_P Parameter: Age (hr) Value: 24 vs. 0
  misc_feature: MA Experiment 20000307 PARAMETER Experiment Name: At_Germinating_Seeds_Sub_P Parameter: Organism Value: A. thaliana
  misc_feature: MA Experiment 20000307 PARAMETER Experiment Name: At_Germinating_Seeds_Sub_P Parameter: Plant Line Value: WS
  misc_feature: MA Experiment 20000307 PARAMETER Experiment Name: At_Germinating_Seeds_Sub_P Parameter: Tissue Value: Germinating Seeds

SEQ ID NO: 49044 - protein, 495 aa, Arabidopsis thaliana; identical to SEQ ID NO: 46321
  peptide (1)..(495): Ceres Seq. ID no. 13591924
  misc_feature (94)..(291): Pfam Name: Tubulin/FtsZ family, GTPase domain Pfam Description: Tubulin/FtsZ family, GTPase domain
  misc_feature (94)..(291): Pfam Name: Tubulin/FtsZ family, GTPase domain Pfam Description: Tubulin/FtsZ family, GTPase domain
  misc_feature (94)..(291): Pfam Name: Tubulin/FtsZ family, GTPase domain Pfam Description: Tubulin/FtsZ family, GTPase domain
  misc_feature (46)..(495): Homolog of NCBI NO: 8928422 NR Description: Tubulin alpha-2 chain
  misc_feature (46)..(495): Homolog of NCBI NO: 17402469 NR Description: alpha-tubulin [Nicotiana tabacum]
  misc_feature (46)..(495): Homolog of NCBI NO: 8928432 NR Description: Tubulin alpha-3 chain
  misc_feature (46)..(495): Homolog of NCBI NO: 15029368 NR Description: alpha tubulin subunit [Rosa hybrid cultivar]
  misc_feature (46)..(495): Homolog of NCBI NO: 29124983 NR Description: alpha-tubulin 1 [Populus tremuloides]
  misc_feature (46)..(495): Homolog of NCBI NO: 8928422 NR Description: Tubulin alpha-2 chain
  misc_feature (46)..(495): Homolog of NCBI NO: 8928432 NR Description: Tubulin alpha-3 chain
  misc_feature (46)..(495): Homolog of NCBI NO: 29124983 NR Description: alpha-tubulin 1 [Populus tremuloides]
  misc_feature (46)..(495): Homolog of NCBI NO: 15029368 NR Description: alpha tubulin subunit [Rosa hybrid cultivar]
  misc_feature (46)..(495): Homolog of NCBI NO: 8928432 NR Description: Tubulin alpha-3 chain
  misc_feature (46)..(495): Homolog of NCBI NO: 17402469 NR Description: alpha-tubulin [Nicotiana tabacum]
  misc_feature (46)..(495): Homolog of NCBI NO: 8928422 NR Description: Tubulin alpha-2 chain
  misc_feature (46)..(495): Homolog of NCBI NO: 15233627 NR Description: tubulin alpha-6 chain (TUA6) [Arabidopsis
  misc_feature (46)..(495): Homolog of NCBI NO: 15220329 NR Description: tubulin alpha-2/alpha-4 chain (TUA4) [Arabidopsis
  misc_feature (46)..(495): Homolog of NCBI NO: 16226462 NR Description: AT4g14960/dl3520c [Arabidopsis thaliana]
  misc_feature (46)..(495): Homolog of NCBI NO: 464849 NR Description: TUBULIN ALPHA CHAIN
  misc_feature (46)..(494): Homolog of NCBI NO: 1174592 NR Description: TUBULIN ALPHA-1 CHAIN
  misc_feature (46)..(495): Homolog of NCBI NO: 15233627 NR Description: tubulin alpha-6 chain (TUA6) [Arabidopsis
  misc_feature (46)..(495): Homolog of NCBI NO: 15220329 NR Description: tubulin alpha-2/alpha-4 chain (TUA4) [Arabidopsis
  misc_feature (46)..(495): Homolog of NCBI NO: 16226462 NR Description: AT4g14960/dl3520c [Arabidopsis thaliana]
  misc_feature (46)..(495): Homolog of NCBI NO: 464849 NR Description: TUBULIN ALPHA CHAIN
  misc_feature (46)..(494): Homolog of NCBI NO: 1174592 NR Description: TUBULIN ALPHA-1 CHAIN
  misc_feature (46)..(495): Homolog of NCBI NO: 29124983 NR Description: alpha-tubulin 1 [Populus tremuloides]
  misc_feature (46)..(495): Homolog of NCBI NO: 15029368 NR Description: alpha tubulin subunit [Rosa hybrid cultivar]
  misc_feature (46)..(495): Homolog of NCBI NO: 17402469 NR Description: alpha-tubulin [Nicotiana tabacum]
  misc_feature (46)..(494): Homolog of NCBI NO: 1174592 NR Description: TUBULIN ALPHA-1 CHAIN
  misc_feature (46)..(495): Homolog of NCBI NO: 464849 NR Description: TUBULIN ALPHA CHAIN
  misc_feature (46)..(495): Homolog of NCBI NO: 16226462 NR Description: AT4g14960/dl3520c [Arabidopsis thaliana]
  misc_feature (46)..(495): Homolog of NCBI NO: 15220329 NR Description: tubulin alpha-2/alpha-4 chain (TUA4) [Arabidopsis
  misc_feature (46)..(495): Homolog of NCBI NO: 15233627 NR Description: tubulin alpha-6 chain (TUA6) [Arabidopsis

SEQ ID NO: 49045 - protein, 450 aa, Arabidopsis thaliana; identical to SEQ ID NO: 46322
  peptide (1)..(450): Ceres Seq. ID no. 13591925
  misc_feature (49)..(246): Pfam Name: Tubulin/FtsZ family, GTPase domain Pfam Description: Tubulin/FtsZ family, GTPase domain
  misc_feature (49)..(246): Pfam Name: Tubulin/FtsZ family, GTPase domain Pfam Description: Tubulin/FtsZ family, GTPase domain
  misc_feature (49)..(246): Pfam Name: Tubulin/FtsZ family, GTPase domain Pfam Description: Tubulin/FtsZ family, GTPase domain
  misc_feature (1)..(450): Homolog of NCBI NO: 8928422 NR Description: Tubulin alpha-2 chain
  misc_feature (1)..(450): Homolog of NCBI NO: 17402469 NR Description: alpha-tubulin [Nicotiana tabacum]
  misc_feature (1)..(450): Homolog of NCBI NO: 8928432 NR Description: Tubulin alpha-3 chain
  misc_feature (1)..(450): Homolog of NCBI NO: 15029368 NR Description: alpha tubulin subunit [Rosa hybrid cultivar]
  misc_feature (1)..(450): Homolog of NCBI NO: 29124983 NR Description: alpha-tubulin 1 [Populus tremuloides]
  misc_feature (1)..(450): Homolog of NCBI NO: 8928422 NR Description: Tubulin alpha-2 chain
  misc_feature (1)..(450): Homolog of NCBI NO: 8928432 NR Description: Tubulin alpha-3 chain
  misc_feature (1)..(450): Homolog of NCBI NO: 29124983 NR Description: alpha-tubulin 1 [Populus tremuloides]
  misc_feature (1)..(450): Homolog of NCBI NO: 15029368 NR Description: alpha tubulin subunit [Rosa hybrid cultivar]
  misc_feature (1)..(450): Homolog of NCBI NO: 8928432 NR Description: Tubulin alpha-3 chain
  misc_feature (1)..(450): Homolog of NCBI NO: 17402469 NR Description: alpha-tubulin [Nicotiana tabacum]
  misc_feature (1)..(450): Homolog of NCBI NO: 8928422 NR Description: Tubulin alpha-2 chain
  misc_feature (1)..(450): Homolog of NCBI NO: 15233627 NR Description: tubulin alpha-6 chain (TUA6) [Arabidopsis
  misc_feature (1)..(450): Homolog of NCBI NO: 15220329 NR Description: tubulin alpha-2/alpha-4 chain (TUA4) [Arabidopsis
  misc_feature (1)..(450): Homolog of NCBI NO: 16226462 NR Description: AT4g14960/dl3520c [Arabidopsis thaliana]
  misc_feature (1)..(450): Homolog of NCBI NO: 464849 NR Description: TUBULIN ALPHA CHAIN
  misc_feature (1)..(449): Homolog of NCBI NO: 1174592 NR Description: TUBULIN ALPHA-1 CHAIN
  misc_feature (1)..(450): Homolog of NCBI NO: 15233627 NR Description: tubulin alpha-6 chain (TUA6) [Arabidopsis
  misc_feature (1)..(450): Homolog of NCBI NO: 15220329 NR Description: tubulin alpha-2/alpha-4 chain (TUA4) [Arabidopsis
  misc_feature (1)..(450): Homolog of NCBI NO: 16226462 NR Description: AT4g14960/dl3520c [Arabidopsis thaliana]
  misc_feature (1)..(450): Homolog of NCBI NO: 464849 NR Description: TUBULIN ALPHA CHAIN
  misc_feature (1)..(449): Homolog of NCBI NO: 1174592 NR Description: TUBULIN ALPHA-1 CHAIN
  misc_feature (1)..(450): Homolog of NCBI NO: 29124983 NR Description: alpha-tubulin 1 [Populus tremuloides]
  misc_feature (1)..(450): Homolog of NCBI NO: 15029368 NR Description: alpha tubulin subunit [Rosa hybrid cultivar]
  misc_feature (1)..(450): Homolog of NCBI NO: 17402469 NR Description: alpha-tubulin [Nicotiana tabacum]
  misc_feature (1)..(449): Homolog of NCBI NO: 1174592 NR Description: TUBULIN ALPHA-1 CHAIN
  misc_feature (1)..(450): Homolog of NCBI NO: 464849 NR Description: TUBULIN ALPHA CHAIN
  misc_feature (1)..(450): Homolog of NCBI NO: 16226462 NR Description: AT4g14960/dl3520c [Arabidopsis thaliana]
  misc_feature (1)..(450): Homolog of NCBI NO: 15220329 NR Description: tubulin alpha-2/alpha-4 chain (TUA4) [Arabidopsis
  misc_feature (1)..(450): Homolog of NCBI NO: 15233627 NR Description: tubulin alpha-6 chain (TUA6) [Arabidopsis

SEQ ID NO: 49046 - protein, 415 aa, Arabidopsis thaliana; identical to SEQ ID NO: 46323
  peptide (1)..(415): Ceres Seq. ID no. 13591926
  misc_feature (14)..(211): Pfam Name: Tubulin/FtsZ family, GTPase domain Pfam Description: Tubulin/FtsZ family, GTPase domain
  misc_feature (14)..(211): Pfam Name: Tubulin/FtsZ family, GTPase domain Pfam Description: Tubulin/FtsZ family, GTPase domain
  misc_feature (14)..(211): Pfam Name: Tubulin/FtsZ family, GTPase domain Pfam Description: Tubulin/FtsZ family, GTPase domain
  misc_feature (1)..(415): Homolog of NCBI NO: 8928422 NR Description: Tubulin alpha-2 chain
  misc_feature (1)..(415): Homolog of NCBI NO: 17402469 NR Description: alpha-tubulin [Nicotiana tabacum]
  misc_feature (1)..(415): Homolog of NCBI NO: 8928432 NR Description: Tubulin alpha-3 chain
  misc_feature (1)..(415): Homolog of NCBI NO: 15029368 NR Description: alpha tubulin subunit [Rosa hybrid cultivar]
  misc_feature (1)..(415): Homolog of NCBI NO: 29124983 NR Description: alpha-tubulin 1 [Populus tremuloides]
  misc_feature (1)..(415): Homolog of NCBI NO: 8928422 NR Description: Tubulin alpha-2 chain
  misc_feature (1)..(415): Homolog of NCBI NO: 8928432 NR Description: Tubulin alpha-3 chain
  misc_feature (1)..(415): Homolog of NCBI NO: 29124983 NR Description: alpha-tubulin 1 [Populus tremuloides]
  misc_feature (1)..(415): Homolog of NCBI NO: 15029368 NR Description: alpha tubulin subunit [Rosa hybrid cultivar]
  misc_feature (1)..(415): Homolog of NCBI NO: 8928432 NR Description: Tubulin alpha-3 chain
  misc_feature (1)..(415): Homolog of NCBI NO: 17402469 NR Description: alpha-tubulin [Nicotiana tabacum]
  misc_feature (1)..(415): Homolog of NCBI NO: 8928422 NR Description: Tubulin alpha-2 chain
  misc_feature (1)..(415): Homolog of NCBI NO: 15233627 NR Description: tubulin alpha-6 chain (TUA6) [Arabidopsis
  misc_feature (1)..(415): Homolog of NCBI NO: 15220329 NR Description: tubulin alpha-2/alpha-4 chain (TUA4) [Arabidopsis
  misc_feature (1)..(415): Homolog of NCBI NO: 16226462 NR Description: AT4g14960/dl3520c [Arabidopsis thaliana]
  misc_feature (1)..(415): Homolog of NCBI NO: 464849 NR Description: TUBULIN ALPHA CHAIN
  misc_feature (1)..(414): Homolog of NCBI NO: 1174592 NR Description: TUBULIN ALPHA-1 CHAIN
  misc_feature (1)..(415): Homolog of NCBI NO: 15233627 NR Description: tubulin alpha-6 chain (TUA6) [Arabidopsis
  misc_feature (1)..(415): Homolog of NCBI NO: 15220329 NR Description: tubulin alpha-2/alpha-4 chain (TUA4) [Arabidopsis
  misc_feature (1)..(415): Homolog of NCBI NO: 16226462 NR Description: AT4g14960/dl3520c [Arabidopsis thaliana]
  misc_feature (1)..(415): Homolog of NCBI NO: 464849 NR Description: TUBULIN ALPHA CHAIN
  misc_feature (1)..(414): Homolog of NCBI NO: 1174592 NR Description: TUBULIN ALPHA-1 CHAIN
  misc_feature (1)..(415): Homolog of NCBI NO: 29124983 NR Description: alpha-tubulin 1 [Populus tremuloides]
  misc_feature (1)..(415): Homolog of NCBI NO: 15029368 NR Description: alpha tubulin subunit [Rosa hybrid cultivar]
  misc_feature (1)..(415): Homolog of NCBI NO: 17402469 NR Description: alpha-tubulin [Nicotiana tabacum]
  misc_feature (1)..(414): Homolog of NCBI NO: 1174592 NR Description: TUBULIN ALPHA-1 CHAIN
  misc_feature (1)..(415): Homolog of NCBI NO: 464849 NR Description: TUBULIN ALPHA CHAIN
  misc_feature (1)..(415): Homolog of NCBI NO: 16226462 NR Description: AT4g14960/dl3520c [Arabidopsis thaliana]
  misc_feature (1)..(415): Homolog of NCBI NO: 15220329 NR Description: tubulin alpha-2/alpha-4 chain (TUA4) [Arabidopsis
  misc_feature (1)..(415): Homolog of NCBI NO: 15233627 NR Description: tubulin alpha-6 chain (TUA6) [Arabidopsis

SEQ ID NO: 49047 - DNA, 1620 bp, Arabidopsis thaliana
  misc_feature (1)..(1620): Ceres Seq. ID no. 13579870
  misc_feature: MA Experiment ID: 108462 Result: Up-regulated in Transcription
  misc_feature: MA Experiment 108462 PARAMETER Experiment Name: At_Germinating_Seeds_cDNA_P Parameter: Age (day) Value: 2 vs. 0
  misc_feature: MA Experiment 108462 PARAMETER Experiment Name: At_Germinating_Seeds_cDNA_P Parameter: Tissue Value: Germinating Seeds
  misc_feature: MA Experiment ID: 108463 Result: Up-regulated in Transcription
  misc_feature: MA Experiment 108463 PARAMETER Experiment Name: At_Germinating_Seeds_cDNA_P Parameter: Age (day) Value: 3 vs. 0
  misc_feature: MA Experiment 108463 PARAMETER Experiment Name: At_Germinating_Seeds_cDNA_P Parameter: Tissue Value: Germinating Seeds
  misc_feature: MA Experiment ID: 108464 Result: Up-regulated in Transcription
  misc_feature: MA Experiment 108464 PARAMETER Experiment Name: At_Germinating_Seeds_cDNA_P Parameter: Age (day) Value: 4 vs. 0
  misc_feature: MA Experiment 108464 PARAMETER Experiment Name: At_Germinating_Seeds_cDNA_P Parameter: Tissue Value: Germinating Seeds
  misc_feature: MA Experiment ID: 108579 Result: Down-regulated in Transcription
  misc_feature: MA Experiment 108579 PARAMETER Experiment Name: At_4deg_Cold_cDNA_P Parameter: Temperature (deg C) Value: 4 vs. 22
  misc_feature: MA Experiment 108579 PARAMETER Experiment Name: At_4deg_Cold_cDNA_P Parameter: Timepoint (hr) Value: 6
  misc_feature: MA Experiment 108579 PARAMETER Experiment Name: At_4deg_Cold_cDNA_P Parameter: Tissue Value: Aerial
  misc_feature: MA Experiment ID: 108595 Result: Down-regulated in Transcription
  misc_feature: MA Experiment 108595 PARAMETER Experiment Name: At_Ler-pi_Ovule_cDNA_P Parameter: Plant Line Value: null
  misc_feature: MA Experiment ID: 20000089 Result: Down-regulated in Transcription
  misc_feature: MA Experiment ID: 20000090 Result: Down-regulated in Transcription
  misc_feature: MA Experiment ID: 20000224 Result: Up-regulated in Transcription
  misc_feature: MA Experiment ID: 20000314 Result: Down-regulated in Transcription
  misc_feature: MA Experiment 20000314 PARAMETER Experiment Name: At_14day_Shoots-Roots_Sub_P Parameter: Age (day) Value: 14
  misc_feature: MA Experiment 20000314 PARAMETER Experiment Name: At_14day_Shoots-Roots_Sub_P Parameter: Organism Value: A. thaliana
  misc_feature: MA Experiment 20000314 PARAMETER Experiment Name: At_14day_Shoots-Roots_Sub_P Parameter: Plant Line Value: WS
  misc_feature: MA Experiment 20000314 PARAMETER Experiment Name: At_14day_Shoots-Roots_Sub_P Parameter: Tissue Value: Roots vs. Whole Plant
  misc_feature: MA Experiment ID: 20000355 Result: Down-regulated in Transcription
  misc_feature: MA Experiment 20000355 PARAMETER Experiment Name: At_Siliques_Sub_P Parameter: Age (day) Value: 21
  misc_feature: MA Experiment 20000355 PARAMETER Experiment Name: At_Siliques_Sub_P Parameter: Organism Value: A. thaliana
  misc_feature: MA Experiment 20000355 PARAMETER Experiment Name: At_Siliques_Sub_P Parameter: Plant Line Value: WS
  misc_feature: MA Experiment 20000355 PARAMETER Experiment Name: At_Siliques_Sub_P Parameter: Tissue Value: Less Than 5mm Siliques vs. Whole Plant
aatacaagaggggaaaacaaaaaacaaaaatatattaacatagaacgtgtgagtagagagagaatataaattaccgtacttattgggttcggtttgatggctccagcaagtccacgagtggtggtgaaggtggatttgaagaagaggccatggcagcagactcagccactgcacaatagatggcatcctgagataccatcagttgcagaggtcaagactggtgagttgtttagggtggaaatggttgactggacgggaggtgcagtcaaagaagatggctctgctggcgatattaagagcatagacctctctactgttcattacctgagtgggccgatcaaagttgtggatgaggatggtgttgcagctaggccaggtgatcttcttgctgttgagatatgcaacttgggtcctcttccaggagatgaatggggattcactgcttcatttgatagagagaatggcggtggtttcttgactgaccatttcccttgtgcgaccaaagctatttggtactttgaagggatttatgcctactctcctcaaattcctggagtacgatttccagggttgacacatccaggaatcattggcactgcaccatcaaaagaactcttgagaatatggaatgaaagggaaagacaattagaagaaaaaggtgttgagtccctaacactatgtgaggttgtgcatcagcggccattagcaagcctaccaacaactaaaggatgtctactaggaaatattgaagagaggacatcagaatgggaaagaattgcaaaggaggctgctaggacaataccaggaagggaaaatggaggaaactgtgacataaaaaacctaagcagtggctctaaaatatatcttccagtgtttgtagaaggagctaatctaagcaccggtgacatgcatttctcacagggtgatggcgagatctcattctgtggagccatagagatgagtggatttctagaactcaagtgtgaaatcattagaaacgggatgcaggagtaccttacaccaatgggaccaaccactctccacgtaaacccgatctttgagatagggccagtggaaccaagattctcagagtggcttgtcttcgagggtatcagtgtcgatgagagcggaagacaacattacctagatgcaacagttgcatacaaacgagcagttctcaacgctatagactatctcttcaaattcggttactcaaaagaacaggtatatctcttactctcatgctgtccatgcgaaggaagaatatccggtatagtcgattctccaaatgccgttgctacacttgcaatacccactgccatctttgatcaggatattcgtccaaagacccgaaaagttccaacaggagctcggatagtgaagaagccagacgttatgaagagcacatatgatggaaaacttccaattacaaagaattcaagttcttcctcttagcttctacaaaaacaaaagaagatttagaagctaactaccaagactgtgtaatctagcatatgttccaataagaaagcaataactcggtgtcttgttagttgcagattccatataaaacaactcgagaaacgagaaggcaagcaaaaggcacatactttttctctc

SEQ ID NO: 49048 - protein, 452 aa, Arabidopsis thaliana
  peptide (1)..(452): Ceres Seq. ID no. 13579871
  misc_feature (8)..(202): Pfam Name: Acetamidase/Formamidase family Pfam Description: Acetamidase/Formamidase family
  misc_feature (12)..(416): Homolog of NCBI NO: 33592607 NR Description: formamidase [Bordetella pertussis]
  misc_feature (12)..(416): Homolog of NCBI NO: 33600391 NR Description: formamidase [Bordetella bronchiseptica]
  misc_feature (5)..(425): Homolog of NCBI NO: 19115927 NR Description: formamidase-like protein [Schizosaccharomyces
  misc_feature (1)..(451): Homolog of NCBI NO: 34909818 NR Description: putative formamidase [Oryza sativa (japonica
  misc_feature (1)..(202): Homolog of NCBI NO: 7488106 NR Description: probable formamidase (EC 3.5.1.49) F19F18.40 -
  misc_feature (214)..(452): Homolog of NCBI NO: 7488106 NR Description: probable formamidase (EC 3.5.1.49) F19F18.40 -
  misc_feature (1)..(452): Homolog of NCBI NO: 21592429 NR Description: formamidase-like protein [Arabidopsis thaliana]
  misc_feature (1)..(452): Homolog of NCBI NO: 18420069 NR Description: formamidase - like protein [Arabidopsis thaliana]
  misc_feature (1)..(452): Homolog of NCBI NO: 14334654 NR Description: putative formamidase [Arabidopsis thaliana]
  misc_feature (1)..(452): Homolog of NCBI NO: 18420071 NR Description: formamidase - like protein [Arabidopsis thaliana]
MAPASPRVVVKVDLKKRPWQQTQPLHNRWHPEIPSVAEVKTGELFRVEMVDWTGGAVKEDGSAGDIKSIDLSTVHYLSGPIKVVDEDGVAARPGDLLAVEICNLGPLPGDEWGFTASFDRENGGGFLTDHFPCATKAIWYFEGIYAYSPQIPGVRFPGLTHPGIIGTAPSKELLRIWNERERQLEEKGVESLTLCEVVHQRPLASLPTTKGCLLGNIEERTSEWERIAKEAARTIPGRENGGNCDIKNLSSGSKIYLPVFVEGANLSTGDMHFSQGDGEISFCGAIEMSGFLELKCEIIRNGMQEYLTPMGPTTLHVNPIFEIGPVEPRFSEWLVFEGISVDESGRQHYLDATVAYKRAVLNAIDYLFKFGYSKEQVYLLLSCCPCEGRISGIVDSPNAVATLAIPTAIFDQDIRPKTRKVPTGARIVKKPDVMKSTYDGKLPITKNSSSSS

SEQ ID NO: 49049 - protein, 404 aa, Arabidopsis thaliana
  peptide (1)..(404): Ceres Seq. ID no. 13579872
  misc_feature (1)..(154): Pfam Name: Acetamidase/Formamidase family Pfam Description: Acetamidase/Formamidase family
  misc_feature (1)..(368): Homolog of NCBI NO: 33592607 NR Description: formamidase [Bordetella pertussis]
  misc_feature (1)..(368): Homolog of NCBI NO: 33600391 NR Description: formamidase [Bordetella bronchiseptica]
  misc_feature (1)..(377): Homolog of NCBI NO: 19115927 NR Description: formamidase-like protein [Schizosaccharomyces
  misc_feature (1)..(403): Homolog of NCBI NO: 34909818 NR Description: putative formamidase [Oryza sativa (japonica
  misc_feature (1)..(154): Homolog of NCBI NO: 7488106 NR Description: probable formamidase (EC 3.5.1.49) F19F18.40 -
  misc_feature (166)..(404): Homolog of NCBI NO: 7488106 NR Description: probable formamidase (EC 3.5.1.49) F19F18.40 -
  misc_feature (1)..(404): Homolog of NCBI NO: 21592429 NR Description: formamidase-like protein [Arabidopsis thaliana]
  misc_feature (1)..(404): Homolog of NCBI NO: 18420069 NR Description: formamidase - like protein [Arabidopsis thaliana]
  misc_feature (1)..(404): Homolog of NCBI NO: 14334654 NR Description: putative formamidase [Arabidopsis thaliana]
  misc_feature (1)..(404): Homolog of NCBI NO: 18420071 NR Description: formamidase - like protein [Arabidopsis thaliana]
MVDWTGGAVKEDGSAGDIKSIDLSTVHYLSGPIKVVDEDGVAARPGDLLAVEICNLGPLPGDEWGFTASFDRENGGGFLTDHFPCATKAIWYFEGIYAYSPQIPGVRFPGLTHPGIIGTAPSKELLRIWNERERQLEEKGVESLTLCEVVHQRPLASLPTTKGCLLGNIEERTSEWERIAKEAARTIPGRENGGNCDIKNLSSGSKIYLPVFVEGANLSTGDMHFSQGDGEISFCGAIEMSGFLELKCEIIRNGMQEYLTPMGPTTLHVNPIFEIGPVEPRFSEWLVFEGISVDESGRQHYLDATVAYKRAVLNAIDYLFKFGYSKEQVYLLLSCCPCEGRISGIVDSPNAVATLAIPTAIFDQDIRPKTRKVPTGARIVKKPDVMKSTYDGKLPITKNSSSSS

SEQ ID NO: 49050 - DNA, 2062 bp, Arabidopsis thaliana; identical to SEQ ID NO: 45387
  misc_feature (1)..(2062): Ceres Seq. ID no. 12600320

SEQ ID NO: 49051 - protein, 498 aa, Arabidopsis thaliana; identical to SEQ ID NO: 45388
  peptide (1)..(498): Ceres Seq. ID no. 12600321
  misc_feature (109)..(446): Pfam Name: Protein kinase domain Pfam Description: Protein kinase domain
  misc_feature (109)..(446): Pfam Name: Protein kinase domain Pfam Description: Protein kinase domain
  misc_feature (10)..(498): Homolog of NCBI NO: 7488270 NR Description: protein kinase homolog T13E15.16 - Arabidopsis
  misc_feature (82)..(498): Homolog of NCBI NO: 320622 NR Description: probable protein kinase - maize (fragment)
  misc_feature (6)..(498): Homolog of NCBI NO: 125568 NR Description: Protein kinase PVPK-1
  misc_feature (12)..(498): Homolog of NCBI NO: 7446383 NR Description: probable protein kinase PK1 - potato
  misc_feature (48)..(493): Homolog of NCBI NO: 1346057 NR Description: Protein kinase G11A
  misc_feature (10)..(498): Homolog of NCBI NO: 7488270 NR Description: protein kinase homolog T13E15.16 - Arabidopsis
  misc_feature (6)..(498): Homolog of NCBI NO: 125568 NR Description: Protein kinase PVPK-1
  misc_feature (48)..(493): Homolog of NCBI NO: 1346057 NR Description: Protein kinase G11A
  misc_feature (1)..(498): Homolog of NCBI NO: 15241076 NR Description: serine threonine-specific protein kinase ATPK64
  misc_feature (1)..(498): Homolog of NCBI NO: 99749 NR Description: probable serine/threonine-specific protein kinase
  misc_feature (5)..(498): Homolog of NCBI NO: 15236802 NR Description: putative protein kinase
  misc_feature (28)..(498): Homolog of NCBI NO: 15238798 NR Description: protein kinase (EC 2.7.1.37) 5 (pir||JN0505)
  misc_feature (28)..(498): Homolog of NCBI NO: 17064850 NR Description: protein kinase 5 [Arabidopsis thaliana]
  misc_feature (12)..(498): Homolog of NCBI NO: 7446383 NR Description: probable protein kinase PK1 - potato
  misc_feature (82)..(498): Homolog of NCBI NO: 320622 NR Description: probable protein kinase - maize (fragment)
  misc_feature (28)..(498): Homolog of NCBI NO: 17064850 NR Description: protein kinase 5 [Arabidopsis thaliana]
  misc_feature (28)..(498): Homolog of NCBI NO: 15238798 NR Description: protein kinase (EC 2.7.1.37) 5 (pir||JN0505)
  misc_feature (5)..(498): Homolog of NCBI NO: 15236802 NR Description: putative protein kinase
  misc_feature (1)..(498): Homolog of NCBI NO: 99749 NR Description: probable serine/threonine-specific protein kinase
  misc_feature (1)..(498): Homolog of NCBI NO: 15241076 NR Description: serine threonine-specific protein kinase ATPK64

SEQ ID NO: 49052 - protein, 497 aa, Arabidopsis thaliana; identical to SEQ ID NO: 45389
  peptide (1)..(497): Ceres Seq. ID no. 12600322
  misc_feature (108)..(445): Pfam Name: Protein kinase domain Pfam Description: Protein kinase domain
  misc_feature (108)..(445): Pfam Name: Protein kinase domain Pfam Description: Protein kinase domain
  misc_feature (9)..(497): Homolog of NCBI NO: 7488270 NR Description: protein kinase homolog T13E15.16 - Arabidopsis
  misc_feature (81)..(497): Homolog of NCBI NO: 320622 NR Description: probable protein kinase - maize (fragment)
  misc_feature (5)..(497): Homolog of NCBI NO: 125568 NR Description: Protein kinase PVPK-1
  misc_feature (11)..(497): Homolog of NCBI NO: 7446383 NR Description: probable protein kinase PK1 - potato
  misc_feature (47)..(492): Homolog of NCBI NO: 1346057 NR Description: Protein kinase G11A
  misc_feature (9)..(497): Homolog of NCBI NO: 7488270 NR Description: protein kinase homolog T13E15.16 - Arabidopsis
  misc_feature (5)..(497): Homolog of NCBI NO: 125568 NR Description: Protein kinase PVPK-1
  misc_feature (47)..(492): Homolog of NCBI NO: 1346057 NR Description: Protein kinase G11A
  misc_feature (1)..(497): Homolog of NCBI NO: 15241076 NR Description: serine threonine-specific protein kinase ATPK64
  misc_feature (1)..(497): Homolog of NCBI NO: 99749 NR Description: probable serine/threonine-specific protein kinase
  misc_feature (4)..(497): Homolog of NCBI NO: 15236802 NR Description: putative protein kinase
  misc_feature (27)..(497): Homolog of NCBI NO: 15238798 NR Description: protein kinase (EC 2.7.1.37) 5 (pir||JN0505)
  misc_feature (27)..(497): Homolog of NCBI NO: 17064850 NR Description: protein kinase 5 [Arabidopsis thaliana]
  misc_feature (11)..(497): Homolog of NCBI NO: 7446383 NR Description: probable protein kinase PK1 - potato
  misc_feature (81)..(497): Homolog of NCBI NO: 320622 NR Description: probable protein kinase - maize (fragment)
  misc_feature (27)..(497): Homolog of NCBI NO: 17064850 NR Description: protein kinase 5 [Arabidopsis thaliana]
  misc_feature (27)..(497): Homolog of NCBI NO: 15238798 NR Description: protein kinase (EC 2.7.1.37) 5 (pir||JN0505)
  misc_feature (4)..(497): Homolog of NCBI NO: 15236802 NR Description: putative protein kinase
  misc_feature (1)..(497): Homolog of NCBI NO: 99749 NR Description: probable serine/threonine-specific protein kinase
  misc_feature (1)..(497): Homolog of NCBI NO: 15241076 NR Description: serine threonine-specific protein kinase ATPK64

SEQ ID NO: 49053 - protein, 481 aa, Arabidopsis thaliana; identical to SEQ ID NO: 45390
  peptide (1)..(481): Ceres Seq. ID no. 12600323
  misc_feature (92)..(429): Pfam Name: Protein kinase domain Pfam Description: Protein kinase domain
  misc_feature (92)..(429): Pfam Name: Protein kinase domain Pfam Description: Protein kinase domain
  misc_feature (1)..(481): Homolog of NCBI NO: 7488270 NR Description: protein kinase homolog T13E15.16 - Arabidopsis
  misc_feature (65)..(481): Homolog of NCBI NO: 320622 NR Description: probable protein kinase - maize (fragment)
  misc_feature (1)..(481): Homolog of NCBI NO: 125568 NR Description: Protein kinase PVPK-1
  misc_feature (1)..(481): Homolog of NCBI NO: 7446383 NR Description: probable protein kinase PK1 - potato
  misc_feature (31)..(476): Homolog of NCBI NO: 1346057 NR Description: Protein kinase G11A
  misc_feature (1)..(481): Homolog of NCBI NO: 7488270 NR Description: protein kinase homolog T13E15.16 - Arabidopsis
  misc_feature (1)..(481): Homolog of NCBI NO: 125568 NR Description: Protein kinase PVPK-1
  misc_feature (31)..(476): Homolog of NCBI NO: 1346057 NR Description: Protein kinase G11A
  misc_feature (1)..(481): Homolog of NCBI NO: 15241076 NR Description: serine threonine-specific protein kinase ATPK64
  misc_feature (1)..(481): Homolog of NCBI NO: 99749 NR Description: probable serine/threonine-specific protein kinase
  misc_feature (1)..(481): Homolog of NCBI NO: 15236802 NR Description: putative protein kinase
  misc_feature (11)..(481): Homolog of NCBI NO: 15238798 NR Description: protein kinase (EC 2.7.1.37) 5 (pir||JN0505)
  misc_feature (11)..(481): Homolog of NCBI NO: 17064850 NR Description: protein kinase 5 [Arabidopsis thaliana]
  misc_feature (1)..(481): Homolog of NCBI NO: 7446383 NR Description: probable protein kinase PK1 - potato
  misc_feature (65)..(481): Homolog of NCBI NO: 320622 NR Description: probable protein kinase - maize (fragment)
  misc_feature (11)..(481): Homolog of NCBI NO: 17064850 NR Description: protein kinase 5 [Arabidopsis thaliana]
  misc_feature (11)..(481): Homolog of NCBI NO: 15238798 NR Description: protein kinase (EC 2.7.1.37) 5 (pir||JN0505)
  misc_feature (1)..(481): Homolog of NCBI NO: 15236802 NR Description: putative protein kinase
  misc_feature (1)..(481): Homolog of NCBI NO: 99749 NR Description: probable serine/threonine-specific protein kinase
  misc_feature (1)..(481): Homolog of NCBI NO: 15241076 NR Description: serine threonine-specific protein kinase ATPK64

SEQ ID NO: 49054 - DNA, 1037 bp, Arabidopsis thaliana; identical to SEQ ID NO: 41917
  misc_feature (1)..(1037): Ceres Seq. ID no. 13501430
  misc_feature: MA Experiment ID: 108607 Result: Up-regulated in Transcription
  misc_feature: MA Experiment 108607 PARAMETER Experiment Name: At_100uM_ABA_cDNA_P Parameter: Timepoint (hr) Value: 4
  misc_feature: MA Experiment 108607 PARAMETER Experiment Name: At_100uM_ABA_cDNA_P Parameter: Tissue Value: Aerial
  misc_feature: MA Experiment 108607 PARAMETER Experiment Name: At_100uM_ABA_cDNA_P Parameter: Treatment Value: 100uM ABA vs. No Treatment
  misc_feature: MA Experiment ID: 20000072 Result: Up-regulated in Transcription
  misc_feature: MA Experiment 20000072 PARAMETER Experiment Name: At_100uM_ABA_Mutants_cDNA_P Parameter: Plant Line Value: CS8105
  misc_feature: MA Experiment 20000072 PARAMETER Experiment Name: At_100uM_ABA_Mutants_cDNA_P Parameter: Timepoint (hr) Value: 6
  misc_feature: MA Experiment 20000072 PARAMETER Experiment Name: At_100uM_ABA_Mutants_cDNA_P Parameter: Tissue Value: Aerial
  misc_feature: MA Experiment 20000072 PARAMETER Experiment Name: At_100uM_ABA_Mutants_cDNA_P Parameter: Treatment Value: 100uM ABA vs. No Treatment
  misc_feature: MA Experiment ID: 20000314 Result: Down-regulated in Transcription
  misc_feature: MA Experiment 20000314 PARAMETER Experiment Name: At_14day_Shoots-Roots_Sub_P Parameter: Age (day) Value: 14
  misc_feature: MA Experiment 20000314 PARAMETER Experiment Name: At_14day_Shoots-Roots_Sub_P Parameter: Organism Value: A. thaliana
  misc_feature: MA Experiment 20000314 PARAMETER Experiment Name: At_14day_Shoots-Roots_Sub_P Parameter: Plant Line Value: WS
  misc_feature: MA Experiment 20000314 PARAMETER Experiment Name: At_14day_Shoots-Roots_Sub_P Parameter: Tissue Value: Roots vs. Whole Plant
  misc_feature: MA Experiment ID: 20000315 Result: Down-regulated in Transcription
  misc_feature: MA Experiment 20000315 PARAMETER Experiment Name: At_14day_Shoots-Roots_Sub_P Parameter: Age (day) Value: 14
  misc_feature: MA Experiment 20000315 PARAMETER Experiment Name: At_14day_Shoots-Roots_Sub_P Parameter: Organism Value: A. thaliana
  misc_feature: MA Experiment 20000315 PARAMETER Experiment Name: At_14day_Shoots-Roots_Sub_P Parameter: Plant Line Value: WS
  misc_feature: MA Experiment 20000315 PARAMETER Experiment Name: At_14day_Shoots-Roots_Sub_P Parameter: Tissue Value: Shoots vs. Whole Plant
  misc_feature: MA Experiment ID: 20000348 Result: Up-regulated in Transcription
  misc_feature: MA Experiment 20000348 PARAMETER Experiment Name: At_100uM_ABA_Sub_P Parameter: Age (day) Value: 14
  misc_feature: MA Experiment 20000348 PARAMETER Experiment Name: At_100uM_ABA_Sub_P Parameter: Organism Value: A. thaliana
  misc_feature: MA Experiment 20000348 PARAMETER Experiment Name: At_100uM_ABA_Sub_P Parameter: Plant Line Value: WS
  misc_feature: MA Experiment 20000348 PARAMETER Experiment Name: At_100uM_ABA_Sub_P Parameter: Timepoint (hr) Value: 1
  misc_feature: MA Experiment 20000348 PARAMETER Experiment Name: At_100uM_ABA_Sub_P Parameter: Tissue Value: Aerial
  misc_feature: MA Experiment 20000348 PARAMETER Experiment Name: At_100uM_ABA_Sub_P Parameter: Treatment Value: 100uM ABA vs. No Treatment
  misc_feature: MA Experiment ID: 20000349 Result: Up-regulated in Transcription
  misc_feature: MA Experiment 20000349 PARAMETER Experiment Name: At_100uM_ABA_Sub_P Parameter: Age (day) Value: 14
  misc_feature: MA Experiment 20000349 PARAMETER Experiment Name: At_100uM_ABA_Sub_P Parameter: Organism Value: A. thaliana
  misc_feature: MA Experiment 20000349 PARAMETER Experiment Name: At_100uM_ABA_Sub_P Parameter: Plant Line Value: WS
  misc_feature: MA Experiment 20000349 PARAMETER Experiment Name: At_100uM_ABA_Sub_P Parameter: Timepoint (hr) Value: 6
  misc_feature: MA Experiment 20000349 PARAMETER Experiment Name: At_100uM_ABA_Sub_P Parameter: Tissue Value: Aerial
  misc_feature: MA Experiment 20000349 PARAMETER Experiment Name: At_100uM_ABA_Sub_P Parameter: Treatment Value: 100uM ABA vs. No Treatment

SEQ ID NO: 49055 - protein, 279 aa, Arabidopsis thaliana; identical to SEQ ID NO: 41918
  peptide (1)..(279): Ceres Seq. ID no. 15223123
  misc_feature (50)..(278): Pfam Name: HAD superfamily, subfamily IIIB (Acid phosphatase) Pfam Description: HAD superfamily, subfamily IIIB (Acid
  misc_feature (50)..(278): Pfam Name: HAD superfamily, subfamily IIIB (Acid phosphatase) Pfam Description: HAD superfamily, subfamily IIIB (Acid
  misc_feature (17)..(279): Homolog of NCBI NO: 629583 NR Description: vegetative storage protein, 30K - Arabidopsis
  misc_feature (15)..(279): Homolog of NCBI NO: 2373397 NR Description: vegetative storage protein [Arabidopsis thaliana]
  misc_feature (15)..(279): Homolog of NCBI NO: 18206363 NR Description: Vegetative storage protein 1 precursor
  misc_feature (15)..(279): Homolog of NCBI NO: 18420838 NR Description: vegetative storage protein Vsp1 [Arabidopsis
  misc_feature (15)..(279): Homolog of NCBI NO: 2373397 NR Description: vegetative storage protein [Arabidopsis thaliana]
  misc_feature (15)..(279): Homolog of NCBI NO: 18420838 NR Description: vegetative storage protein Vsp1 [Arabidopsis
  misc_feature (15)..(279): Homolog of NCBI NO: 18420836 NR Description: vegetative storage protein Vsp2 [Arabidopsis
  misc_feature (15)..(279): Homolog of NCBI NO: 21537241 NR Description: vegetative storage protein Vsp2 [Arabidopsis
  misc_feature (15)..(279): Homolog of NCBI NO: 2373399 NR Description: vegetative storage protein [Arabidopsis thaliana]
  misc_feature (15)..(279): Homolog of NCBI NO: 18206363 NR Description: Vegetative storage protein 1 precursor
  misc_feature (17)..(279): Homolog of NCBI NO: 629583 NR Description: vegetative storage protein, 30K - Arabidopsis
  misc_feature (15)..(279): Homolog of NCBI NO: 2373399 NR Description: vegetative storage protein [Arabidopsis thaliana]
  misc_feature (15)..(279): Homolog of NCBI NO: 18420836 NR Description: vegetative storage protein Vsp2 [Arabidopsis
  misc_feature (15)..(279): Homolog of NCBI NO: 21537241 NR Description: vegetative storage protein Vsp2 [Arabidopsis
  misc_feature (1)..(1): Xaa is any aa, unknown or other

SEQ ID NO: 49056 - protein, 265 aa, Arabidopsis thaliana; identical to SEQ ID NO: 41919
  peptide (1)..(265): Ceres Seq. ID no. 15223124
  misc_feature (36)..(264): Pfam Name: HAD superfamily, subfamily IIIB (Acid phosphatase) Pfam Description: HAD superfamily, subfamily IIIB (Acid
  misc_feature (36)..(264): Pfam Name: HAD superfamily, subfamily IIIB (Acid phosphatase) Pfam Description: HAD superfamily, subfamily IIIB (Acid
  misc_feature (3)..(265): Homolog of NCBI NO: 629583 NR Description: vegetative storage protein, 30K - Arabidopsis
  misc_feature (1)..(265): Homolog of NCBI NO: 2373397 NR Description: vegetative storage protein [Arabidopsis thaliana]
  misc_feature (1)..(265): Homolog of NCBI NO: 18206363 NR Description: Vegetative storage protein 1 precursor
  misc_feature (1)..(265): Homolog of NCBI NO: 18420838 NR Description: vegetative storage protein Vsp1 [Arabidopsis
  misc_feature (1)..(265): Homolog of NCBI NO: 2373397 NR Description: vegetative storage protein [Arabidopsis thaliana]
  misc_feature (1)..(265): Homolog of NCBI NO: 18420838 NR Description: vegetative storage protein Vsp1 [Arabidopsis
  misc_feature (1)..(265): Homolog of NCBI NO: 18420836 NR Description: vegetative storage protein Vsp2 [Arabidopsis
  misc_feature (1)..(265): Homolog of NCBI NO: 21537241 NR Description: vegetative storage protein Vsp2 [Arabidopsis
  misc_feature (1)..(265): Homolog of NCBI NO: 2373399 NR Description: vegetative storage protein [Arabidopsis thaliana]
  misc_feature (1)..(265): Homolog of NCBI NO: 18206363 NR Description: Vegetative storage protein 1 precursor
  misc_feature (3)..(265): Homolog of NCBI NO: 629583 NR Description: vegetative storage protein, 30K - Arabidopsis
  misc_feature (1)..(265): Homolog of NCBI NO: 2373399 NR Description: vegetative storage protein [Arabidopsis thaliana]
  misc_feature (1)..(265): Homolog of NCBI NO: 18420836 NR Description: vegetative storage protein Vsp2 [Arabidopsis
  misc_feature (1)..(265): Homolog of NCBI NO: 21537241 NR Description: vegetative storage protein Vsp2 [Arabidopsis

SEQ ID NO: 49057 - DNA, 1038 bp, Arabidopsis thaliana
  misc_feature (1)..(1038): Ceres Seq. ID no. 13579802
  misc_feature: MA Experiment ID: 20000227 Result: Down-regulated in Transcription
  misc_feature: MA Experiment 20000227 PARAMETER Experiment Name: At_Root-Tips-vs-Tops_P Parameter: Tissue Value: Root Tips vs. Root Tops
  misc_feature: MA Experiment ID: 20000234 Result: Up-regulated in Transcription
  misc_feature: MA Experiment 20000234 PARAMETER Experiment Name: At_Siliques_P Parameter: Age (day) Value: 21
  misc_feature: MA Experiment 20000234 PARAMETER Experiment Name: At_Siliques_P Parameter: Organism Value: A. thaliana
  misc_feature: MA Experiment 20000234 PARAMETER Experiment Name: At_Siliques_P Parameter: Plant Line Value: WS
  misc_feature: MA Experiment 20000234 PARAMETER Experiment Name: At_Siliques_P Parameter: Tissue Value: Less Than 5mm Siliques vs. Whole Plant
atattacaccaaaatttgaaatcatcttctttgattgtttttggtgtgagcgaagatgggaagatcgaattctcaatgcccatctcattggattctcctctgcttcttcatctcttctcagttttggggattctcacttcccacttcgataattcaacaaaatctcgagggttttaaagatcctgaagacggttttcatgagattcattgttcaagagaacgtagcagagttgcttggaaaatcattcaagagtatctcatgccgtatgtggaaaaggagcggtatcagttaccgagtacttgtagagttcatcgagacaatgacatttatagagaacaagaagagcacaaattgcgttcagatattaatgagtggcgttgtggattctgcaaaaaggctttttatgaagagaagtatctcgataagcatttcgattcgcgccattacaatttacttaatgcgagtcatggtaaatgtctgtcggatctttgtggagcgttgcattgtgatcttgttgtagacacagctcggcttaagtccaagtgtaatcctgcagctgctgcaaaaaaccggcacttatgtgagagtttggctaatagttgttttccggtaaataaaggttcatcagccaaccgtcttcacgatttcttcttgcgtcagttctgcgatgcacatacatgttcaggaggatcaaagcccttatctcaaaaaccaaagaagaggagtatagtgtacattattttctccatcatcgttttggtagtgcttcttctctattacagctttgtctatttgttccgaagaggattaaagagaagatctcaagatttgaagcgtattagacacaatggtctgaagaagaaacccttctaaccatatcaagctttagctttaatggcggctgagagagagtacattttttttctttgcaagatgattacaattaggatcagattagtgcattttgcaacatcccttacaattatatcactacttacaccaatattgttacttagaattcaatagtgtttactgcc

SEQ ID NO: 49058 - protein, 272 aa, Arabidopsis thaliana
  peptide (1)..(272): Ceres Seq. ID no. 13579803
  misc_feature (107)..(130): Pfam Name: Zinc finger, C2H2 type Pfam Description: Zinc finger, C2H2 type
  misc_feature (43)..(161): Homolog of NCBI NO: 19920466 NR Description: CG4133-PA [Drosophila melanogaster]
  misc_feature (1)..(271): Homolog of NCBI NO: 10177309 NR Description: gene_id:MDC12.25~unknown protein [Arabidopsis
  misc_feature (1)..(271): Homolog of NCBI NO: 18424689 NR Description: expressed protein [Arabidopsis thaliana]
  misc_feature (1)..(272): Homolog of NCBI NO: 26452757 NR Description: putative zinc finger protein [Arabidopsis
  misc_feature (1)..(272): Homolog of NCBI NO: 15237477 NR Description: zinc finger - like protein [Arabidopsis thaliana]
MGRSNSQCPSHWILLCFFISSQFWGFSLPTSIIQQNLEGFKDPEDGFHEIHCSRERSRVAWKIIQEYLMPYVEKERYQLPSTCRVHRDNDIYREQEEHKLRSDINEWRCGFCKKAFYEEKYLDKHFDSRHYNLLNASHGKCLSDLCGALHCDLVVDTARLKSKCNPAAAAKNRHLCESLANSCFPVNKGSSANRLHDFFLRQFCDAHTCSGGSKPLSQKPKKRSIVYIIFSIIVLVVLLLYYSFVYLFRRGLKRRSQDLKRIRHNGLKKKPF

SEQ ID NO: 49059 - protein, 204 aa, Arabidopsis thaliana
  peptide (1)..(204): Ceres Seq. ID no. 13579804
  misc_feature (39)..(62): Pfam Name: Zinc finger, C2H2 type Pfam Description: Zinc finger, C2H2 type
  misc_feature (1)..(93): Homolog of NCBI NO: 19920466 NR Description: CG4133-PA [Drosophila melanogaster]
  misc_feature (1)..(203): Homolog of NCBI NO: 10177309 NR Description: gene_id:MDC12.25~unknown protein [Arabidopsis
  misc_feature (1)..(203): Homolog of NCBI NO: 18424689 NR Description: expressed protein [Arabidopsis thaliana]
  misc_feature (1)..(204): Homolog of NCBI NO: 26452757 NR Description: putative zinc finger protein [Arabidopsis
  misc_feature (1)..(204): Homolog of NCBI NO: 15237477 NR Description: zinc finger - like protein [Arabidopsis thaliana]
MPYVEKERYQLPSTCRVHRDNDIYREQEEHKLRSDINEWRCGFCKKAFYEEKYLDKHFDSRHYNLLNASHGKCLSDLCGALHCDLVVDTARLKSKCNPAAAAKNRHLCESLANSCFPVNKGSSANRLHDFFLRQFCDAHTCSGGSKPLSQKPKKRSIVYIIFSIIVLVVLLLYYSFVYLFRRGLKRRSQDLKRIRHNGLKKKPF

SEQ ID NO: 49060 - DNA, 1602 bp, Arabidopsis thaliana
  misc_feature (1)..(1602): Ceres Seq. ID no. 12578238
  misc_feature: MA Experiment ID: 20000184 Result: Down-regulated in Transcription
  misc_feature: MA Experiment 20000184 PARAMETER Experiment Name: At_Shoots__P Parameter: Age (day) Value: 7
  misc_feature: MA Experiment 20000184 PARAMETER Experiment Name: At_Shoots__P Parameter: Tissue Value: Shoots vs. Whole Plant
  misc_feature: MA Experiment ID: 20001451 Result: Down-regulated in Transcription
  misc_feature: MA Experiment 20001451 PARAMETER Experiment Name: At_Far-red-induction_P Parameter: Age (day) Value: 7
  misc_feature: MA Experiment 20001451 PARAMETER Experiment Name: At_Far-red-induction_P Parameter: Light Value: Far-red vs. White
  misc_feature: MA Experiment 20001451 PARAMETER Experiment Name: At_Far-red-induction_P Parameter: Organism Value: A. thaliana
  misc_feature: MA Experiment 20001451 PARAMETER Experiment Name: At_Far-red-induction_P Parameter: Plant Line Value: Columbia
  misc_feature: MA Experiment 20001451 PARAMETER Experiment Name: At_Far-red-induction_P Parameter: Timepoint (hr) Value: 24
  misc_feature: MA Experiment 20001451 PARAMETER Experiment Name: At_Far-red-induction_P Parameter: Tissue Value: Whole Plant
atgttgacgaaaccaaaacccaattccaaattttcaatcttgttcactttccttttgctcctcagtttcttaatcttcgttgctcgttcctctgatgtcgccgtcgaagccggatccgaggaagaattagacgatctagagcagctccttgcggttgacgaacaattgcaggaagagagaccagagcaacaatctgaagcggagacggtgagcaaggcgcagcggatcgttgtggaactcaacggagacaatacgaagcgattgattgatgggaatgagtatgtgatggttttaggttacgcgccgtggtgtgcgaggagtgctgagctaatgccgagatttgcggaggcggcgacggatttgaaggaaattggtagttcggttttgatggcgaagattgacggcgagaggtattcgaaagtggcgtctcagcttgagattaaaggtttcccaacgcttcttctgtttgttaatggcacatctcagtcttacactggtggattttcctcagaggagatagtgatttgggtgcaaaagaagactggtgcgtctactattaaacttgatacagttgatgaagcttcaggatttctgaagaagcatcatactttcattctcggtctattcgaaaagtctgaggattcttctggacatgatgaatttgtaaaagctgcgtcgttagacaatgaaatccagtttgtagaaacaagcagcattgatgttgctaagcttctcttccctaaccttaaaaccaacaatgtgtttgttggattggttaaaactgaggctgaaaagtatacttcatatgatggaccttgccaagccgagaagatagtggaatttctgaacagtaataaattccctttggttacaaaattgactgaatccaacaccgttcgtgtttactccagtccagtcaagcttcaggttatggtcttttcgaagactgatgactttgaaagtctagctcagcctctagaagatattgcaagaaagttcaaatcaaagcttatgttgatatatattgacatatcaaacgaaaacctcgcaatgccattcttgacattattcgggatagaagatgcaaagaaaactgttgctgcattcgacaacaacctgaactccaagtatttgcttgagtcggatccatctcctagcaatatagaagaattttgtttcggacttgctcatggaactgtttcagcttactataagtcacagcctattccagataatcaaaatgcaagcgtagtggctgtggtcggcaggacttttgatgaagtggtcttgaggagcagcgagaatgttcttcttgaggtgcacacaccatggtgtattaactgtgaggctctgagtaaacaggttgagaagttgtcgcaacactttaaagggtttgaaaatcttgtctttgcaaggatagacgcttctgcaaacgagcatcctaagctaacggttgatgattacccgacaatcttgctttacaagactggtgaaaaggagaatccgttaaagctttcgacgaaatccagtgcgaaggatatggctgttttaatcaacaaagagttgaaatggaaggatcagtctggtaaagatgagttatag

SEQ ID NO: 49061 - protein, 533 aa, Arabidopsis thaliana
  peptide (1)..(533): Ceres Seq. ID no. 12578239
  misc_feature (41)..(520): Homolog of NCBI NO: 22331799 NR Description: protein disulfide-isomerase-like protein
  misc_feature (114)..(507): Homolog of NCBI NO: 28140231 NR Description: protein disulphide isomerase [Elaeis guineensis]
  misc_feature (74)..(510): Homolog of NCBI NO: 30697408 NR Description: protein disulfide isomerase family [Arabidopsis
  misc_feature (74)..(507): Homolog of NCBI NO: 30697404 NR Description: protein disulfide isomerase family [Arabidopsis
  misc_feature (74)..(507): Homolog of NCBI NO: 21593313 NR Description: protein disulfide isomerase precursor-like
  misc_feature (413)..(526): Homolog of NCBI NO: 34898372 NR Description: ESTs D22477(C11179),AU075323(C11179) corresponds a region of the predicted gene.~Similar to Rabbit multifunctional
  misc_feature (18)..(414): Homolog of NCBI NO: 34898372 NR Description: ESTs D22477(C11179),AU075323(C11179) corresponds a region of the predicted gene.~Similar to Rabbit multifunctional
  misc_feature (5)..(533): Homolog of NCBI NO: 15218191 NR Description: protein disulfide isomerase precursor, putative
  misc_feature (1)..(533): Homolog of NCBI NO: 9294458 NR Description: dbj|BAA81871.1~gene_id:MSL1.15~strong similarity
  misc_feature (1)..(533): Homolog of NCBI NO: 15233287 NR Description: putative protein disulfide isomerase; protein id:
MLTKPKPNSKFSILFTFLLLLSFLIFVARSSDVAVEAGSEEELDDLEQLLAVDEQLQEERPEQQSEAETVSKAQRIVVELNGDNTKRLIDGNEYVMVLGYAPWCARSAELMPRFAEAATDLKEIGSSVLMAKIDGERYSKVASQLEIKGFPTLLLFVNGTSQSYTGGFSSEEIVIWVQKKTGASTIKLDTVDEASGFLKKHHTFILGLFEKSEDSSGHDEFVKAASLDNEIQFVETSSIDVAKLLFPNLKTNNVFVGLVKTEAEKYTSYDGPCQAEKIVEFLNSNKFPLVTKLTESNTVRVYSSPVKLQVMVFSKTDDFESLAQPLEDIARKFKSKLMLIYIDISNENLAMPFLTLFGIEDAKKTVAAFDNNLNSKYLLESDPSPSNIEEFCFGLAHGTVSAYYKSQPIPDNQNASVVAVVGRTFDEVVLRSSENVLLEVHTPWCINCEALSKQVEKLSQHFKGFENLVFARIDASANEHPKLTVDDYPTILLYKTGEKENPLKLSTKSSAKDMAVLINKELKWKDQSGKDEL

SEQ ID NO: 49062 - protein, 438 aa, Arabidopsis thaliana
  peptide (1)..(438): Ceres Seq. ID no. 12578240
  misc_feature (1)..(425): Homolog of NCBI NO: 22331799 NR Description: protein disulfide-isomerase-like protein
  misc_feature (19)..(412): Homolog of NCBI NO: 28140231 NR Description: protein disulphide isomerase [Elaeis guineensis]
  misc_feature (1)..(415): Homolog of NCBI NO: 30697408 NR Description: protein disulfide isomerase family [Arabidopsis
  misc_feature (1)..(412): Homolog of NCBI NO: 30697404 NR Description: protein disulfide isomerase family [Arabidopsis
  misc_feature (1)..(412): Homolog of NCBI NO: 21593313 NR Description: protein disulfide isomerase precursor-like
  misc_feature (318)..(431): Homolog of NCBI NO: 34898372 NR Description: ESTs D22477(C11179),AU075323(C11179) corresponds a region of the predicted gene.~Similar to Rabbit multifunctional
  misc_feature (1)..(319): Homolog of NCBI NO: 34898372 NR Description: ESTs D22477(C11179),AU075323(C11179) corresponds a region of the predicted gene.~Similar to Rabbit multifunctional
  misc_feature (1)..(438): Homolog of NCBI NO: 15218191 NR Description: protein disulfide isomerase precursor, putative
  misc_feature (1)..(438): Homolog of NCBI NO: 9294458 NR Description: dbj|BAA81871.1~gene_id:MSL1.15~strong similarity
  misc_feature (1)..(438): Homolog of NCBI NO: 15233287 NR Description: putative protein disulfide isomerase; protein id:
MVLGYAPWCARSAELMPRFAEAATDLKEIGSSVLMAKIDGERYSKVASQLEIKGFPTLLLFVNGTSQSYTGGFSSEEIVIWVQKKTGASTIKLDTVDEASGFLKKHHTFILGLFEKSEDSSGHDEFVKAASLDNEIQFVETSSIDVAKLLFPNLKTNNVFVGLVKTEAEKYTSYDGPCQAEKIVEFLNSNKFPLVTKLTESNTVRVYSSPVKLQVMVFSKTDDFESLAQPLEDIARKFKSKLMLIYIDISNENLAMPFLTLFGIEDAKKTVAAFDNNLNSKYLLESDPSPSNIEEFCFGLAHGTVSAYYKSQPIPDNQNASVVAVVGRTFDEVVLRSSENVLLEVHTPWCINCEALSKQVEKLSQHFKGFENLVFARIDASANEHPKLTVDDYPTILLYKTGEKENPLKLSTKSSAKDMAVLINKELKWKDQSGKDEL

SEQ ID NO: 49063 - protein, 423 aa, Arabidopsis thaliana
  peptide (1)..(423): Ceres Seq. ID no. 12578241
  misc_feature (1)..(410): Homolog of NCBI NO: 22331799 NR Description: protein disulfide-isomerase-like protein
  misc_feature (4)..(397): Homolog of NCBI NO: 28140231 NR Description: protein disulphide isomerase [Elaeis guineensis]
  misc_feature (1)..(400): Homolog of NCBI NO: 30697408 NR Description: protein disulfide isomerase family [Arabidopsis
  misc_feature (1)..(397): Homolog of NCBI NO: 30697404 NR Description: protein disulfide isomerase family [Arabidopsis
  misc_feature (1)..(397): Homolog of NCBI NO: 21593313 NR Description: protein disulfide isomerase precursor-like
  misc_feature (303)..(416): Homolog of NCBI NO: 34898372 NR Description: ESTs D22477(C11179),AU075323(C11179) corresponds a region of the predicted gene.~Similar to Rabbit multifunctional
  misc_feature (1)..(304): Homolog of NCBI NO: 34898372 NR Description: ESTs D22477(C11179),AU075323(C11179) corresponds a region of the predicted gene.~Similar to Rabbit multifunctional
  misc_feature (1)..(423): Homolog of NCBI NO: 15218191 NR Description: protein disulfide isomerase precursor, putative
  misc_feature (1)..(423): Homolog of NCBI NO: 9294458 NR Description: dbj|BAA81871.1~gene_id:MSL1.15~strong similarity
  misc_feature (1)..(423): Homolog of NCBI NO: 15233287 NR Description: putative protein disulfide isomerase; protein id:
MPRFAEAATDLKEIGSSVLMAKIDGERYSKVASQLEIKGFPTLLLFVNGTSQSYTGGFSSEEIVIWVQKKTGASTIKLDTVDEASGFLKKHHTFILGLFEKSEDSSGHDEFVKAASLDNEIQFVETSSIDVAKLLFPNLKTNNVFVGLVKTEAEKYTSYDGPCQAEKIVEFLNSNKFPLVTKLTESNTVRVYSSPVKLQVMVFSKTDDFESLAQPLEDIARKFKSKLMLIYIDISNENLAMPFLTLFGIEDAKKTVAAFDNNLNSKYLLESDPSPSNIEEFCFGLAHGTVSAYYKSQPIPDNQNASVVAVVGRTFDEVVLRSSENVLLEVHTPWCINCEALSKQVEKLSQHFKGFENLVFARIDASANEHPKLTVDDYPTILLYKTGEKENPLKLSTKSSAKDMAVLINKELKWKDQSGKDEL

SEQ ID NO: 49064 - DNA, 1577 bp, Arabidopsis thaliana
  misc_feature (1)..(1577): Ceres Seq. ID no. 12578242
  misc_feature: MA Experiment ID: 20000234 Result: Down-regulated in Transcription
  misc_feature: MA Experiment 20000234 PARAMETER Experiment Name: At_Siliques_P Parameter: Age (day) Value: 21
  misc_feature: MA Experiment 20000234 PARAMETER Experiment Name: At_Siliques_P Parameter: Organism Value: A. thaliana
  misc_feature: MA Experiment 20000234 PARAMETER Experiment Name: At_Siliques_P Parameter: Plant Line Value: WS
  misc_feature: MA Experiment 20000234 PARAMETER Experiment Name: At_Siliques_P Parameter: Tissue Value: Less Than 5mm Siliques vs. Whole Plant
  misc_feature: MA Experiment ID: 20000235 Result: Down-regulated in Transcription
  misc_feature: MA Experiment 20000235 PARAMETER Experiment Name: At_Siliques_P Parameter: Age (day) Value: 21
  misc_feature: MA Experiment 20000235 PARAMETER Experiment Name: At_Siliques_P Parameter: Organism Value: A. thaliana
  misc_feature: MA Experiment 20000235 PARAMETER Experiment Name: At_Siliques_P Parameter: Plant Line Value: WS
  misc_feature: MA Experiment 20000235 PARAMETER Experiment Name: At_Siliques_P Parameter: Tissue Value: 5-10mm Siliques vs. Whole Plant
  misc_feature: MA Experiment ID: 20000264 Result: Down-regulated in Transcription
  misc_feature: MA Experiment 20000264 PARAMETER Experiment Name: At_Open_Flower_P Parameter: Age (day) Value: 21
  misc_feature: MA Experiment 20000264 PARAMETER Experiment Name: At_Open_Flower_P Parameter: Plant Line Value: WS
  misc_feature: MA Experiment 20000264 PARAMETER Experiment Name: At_Open_Flower_P Parameter: Tissue Value: Open Flower vs. Whole Plant
  misc_feature: MA Experiment ID: 20000286 Result: Down-regulated in Transcription
  misc_feature: MA Experiment 20000286 PARAMETER Experiment Name: At_Open_Flower_P Parameter: Age (day) Value: 21
  misc_feature: MA Experiment 20000286 PARAMETER Experiment Name: At_Open_Flower_P Parameter: Plant Line Value: WS
  misc_feature: MA Experiment 20000286 PARAMETER Experiment Name: At_Open_Flower_P Parameter: Tissue Value: Half Open vs. Whole Plant
  misc_feature: MA Experiment ID: 20001247 Result: Up-regulated in Transcription
  misc_feature: MA Experiment 20001247 PARAMETER Experiment Name: At_Far-red-induction_P Parameter: Age (day) Value: 7
  misc_feature: MA Experiment 20001247 PARAMETER Experiment Name: At_Far-red-induction_P Parameter: Light Value: Far-red vs. White
  misc_feature: MA Experiment 20001247 PARAMETER Experiment Name: At_Far-red-induction_P Parameter: Organism Value: A. thaliana
  misc_feature: MA Experiment 20001247 PARAMETER Experiment Name: At_Far-red-induction_P Parameter: Plant Line Value: Columbia
  misc_feature: MA Experiment 20001247 PARAMETER Experiment Name: At_Far-red-induction_P Parameter: Timepoint (hr) Value: 1
  misc_feature: MA Experiment 20001247 PARAMETER Experiment Name: At_Far-red-induction_P Parameter: Tissue Value: Whole Plant
  misc_feature: MA Experiment ID: 20001557 Result: Up-regulated in Transcription
  misc_feature: MA Experiment 20001557 PARAMETER Experiment Name: At_Drought_Soil_Dry_P Parameter: Age (day) Value: 27
  misc_feature: MA Experiment 20001557 PARAMETER Experiment Name: At_Drought_Soil_Dry_P Parameter: Organism Value: A. thaliana
  misc_feature: MA Experiment 20001557 PARAMETER Experiment Name: At_Drought_Soil_Dry_P Parameter: Plant Line Value: WS
  misc_feature: MA Experiment 20001557 PARAMETER Experiment Name: At_Drought_Soil_Dry_P Parameter: Post Timepoint (hr) Value: 3
  misc_feature: MA Experiment 20001557 PARAMETER Experiment Name: At_Drought_Soil_Dry_P Parameter: Post-Treatment Value: Re-Water vs. No Drought
  misc_feature: MA Experiment 20001557 PARAMETER Experiment Name: At_Drought_Soil_Dry_P Parameter: Timepoint (day) Value: 13
  misc_feature: MA Experiment 20001557 PARAMETER Experiment Name: At_Drought_Soil_Dry_P Parameter: Treatment Value: Drought vs. No Drought
tctctctctcttctcgagacaaagaagaagacaagagtcaaacttgaaggcgacaatcggagcttccatggccgtttcttcctctttcaccaaaccctaatttcaatttcatcttcttttcccttctttctcaccggaaaatggatctctccgacatccgaaacaacaacaacgacaccgccgccgtcgccaccggaggaggagcaagacagctagttgacgcatctctctcaatcgttcccagatctacacctcccgaagactcaacactcgcaacaacctcatctacggcaacggcgactacaacgaagcggtcgactaaagaccgtcacacgaaagtcgacggaagaggacgtcggattcgtatgccggcgctatgtgcagctagagtttttcagttaacgagagagttaggtcataaatccgatggtgaaactattgaatggcttcttcaacaagctgagccagctattgttgctgctacaggtacaggaactattccggcgaacttctctactttaagtgtttcgttacgaagtagtggatcgactctctctgctccgccgtcgaaatcggtgccgctttacggtgctcttggattgactcatcatcagtatgatgaacaaggaggcggcggtgtgtttgctgctcatacgtcgccgcttttagggtttcatcatcagcttcaacaccaccagaaccagaatcagaatcaagatccggtggaaactattcctgaaggtgagaatttctctaggaaacggtatagatcggttgatttgtctaaagaaaacgatgatcggaaacagaacgagaataaatctttgaaagaaagtgaaacgtcgggtcctacggcggcgccgatgtgggcggttgcgccgccgagtaggtctggtgctgggaacactttttggatgcttccggtaccgacaacggccggtaatcaaatggagagtagtagcaacaataacaccgccgcaggccaccgtgctcctcctatgtggccatttgtgaactctgctggaggaggagcgggaggtggaggcggagcagcgactcactttatggcgggaacggggtttagttttccgatggatcagtacagaggaagtccacttcagttaggttcttttttagctcagccgcagccgactcagaacttaggactaagtatgccggactcgaatctcgggatgttagccgctttgaactcggcttattcaagaggcggaaacgcaaacgcgaatgcggaacaagcgaacaatgcggtggagcatcaagagaagcagcaacagagtgatcatgatgatgatagtagagaggagaactcaaatagctctgagtgagtgatgtaaactaatcttgtgaaatcattgaatgtggtaagaaattgatttaaagcgtttgtagcggtttggttgattgttttattgtgagattttgtgtgttgttgtttagtagtgtttagacaagaacaatttatgtgtgaaggaattgttaggtttgggtccaaatggactctcatgggtagagaatgttttcaatgtatagaaggaatgatagtcttttcgattttt

SEQ ID NO: 49065 - protein, 401 aa, Arabidopsis thaliana
  peptide (1)..(401): Ceres Seq. ID no. 12578243
  misc_feature (44)..(302): Pfam Name: TCP family transcription factor Pfam Description: TCP family transcription factor
  misc_feature (57)..(139): Homolog of NCBI NO: 26452377 NR Description: unknown protein [Arabidopsis thaliana]
  misc_feature (57)..(139): Homolog of NCBI NO: 15237274 NR Description: unknown protein; protein id: At5g23280.1
  misc_feature (42)..(141): Homolog of NCBI NO: 5731257 NR Description: auxin-induced basic helix-loop-helix
  misc_feature (24)..(162): Homolog of NCBI NO: 18409345 NR Description: expressed protein
  misc_feature (1)..(396): Homolog of NCBI NO: 22331641 NR Description: putative protein
  misc_feature (1)..(396): Homolog of NCBI NO: 11357581 NR Description: hypothetical protein F1P2.170 - Arabidopsis
  misc_feature (1)..(262): Homolog of NCBI NO: 15219640 NR Description: DNA binding protein, putative
  misc_feature (14)..(261): Homolog of NCBI NO: 20975251 NR Description: transcription factor PCF3 [Oryza sativa (japonica
  misc_feature (36)..(345): Homolog of NCBI NO: 15218305 NR Description: unknown protein
  misc_feature (1)..(401): Homolog of NCBI NO: 15217857 NR Description: auxin-induced basic helix-loop-helix
MDLSDIRNNNNDTAAVATGGGARQLVDASLSIVPRSTPPEDSTLATTSSTATATTTKRSTKDRHTKVDGRGRRIRMPALCAARVFQLTRELGHKSDGETIEWLLQQAEPAIVAATGTGTIPANFSTLSVSLRSSGSTLSAPPSKSVPLYGALGLTHHQYDEQGGGGVFAAHTSPLLGFHHQLQHHQNQNQNQDPVETIPEGENFSRKRYRSVDLSKENDDRKQNENKSLKESETSGPTAAPMWAVAPPSRSGAGNTFWMLPVPTTAGNQMESSSNNNTAAGHRAPPMWPFVNSAGGGAGGGGGAATHFMAGTGFSFPMDQYRGSPLQLGSFLAQPQPTQNLGLSMPDSNLGMLAALNSAYSRGGNANANAEQANNAVEHQEKQQQSDHDDDSREENSNSSE

SEQ ID NO: 49066 - protein, 326 aa, Arabidopsis thaliana
  peptide (1)..(326): Ceres Seq. ID no. 12578244
  misc_feature (1)..(227): Pfam Name: TCP family transcription factor Pfam Description: TCP family transcription factor
  misc_feature (1)..(64): Homolog of NCBI NO: 26452377 NR Description: unknown protein [Arabidopsis thaliana]
  misc_feature (1)..(64): Homolog of NCBI NO: 15237274 NR Description: unknown protein; protein id: At5g23280.1
  misc_feature (1)..(66): Homolog of NCBI NO: 5731257 NR Description: auxin-induced basic helix-loop-helix
  misc_feature (1)..(87): Homolog of NCBI NO: 18409345 NR Description: expressed protein
  misc_feature (1)..(321): Homolog of NCBI NO: 22331641 NR Description: putative protein
  misc_feature (1)..(321): Homolog of NCBI NO: 11357581 NR Description: hypothetical protein F1P2.170 - Arabidopsis
  misc_feature (1)..(187): Homolog of NCBI NO: 15219640 NR Description: DNA binding protein, putative
  misc_feature (1)..(186): Homolog of NCBI NO: 20975251 NR Description: transcription factor PCF3 [Oryza sativa (japonica
  misc_feature (1)..(270): Homolog of NCBI NO: 15218305 NR Description: unknown protein
  misc_feature (1)..(326): Homolog of NCBI NO: 15217857 NR Description: auxin-induced basic helix-loop-helix
MPALCAARVFQLTRELGHKSDGETIEWLLQQAEPAIVAATGTGTIPANFSTLSVSLRSSGSTLSAPPSKSVPLYGALGLTHHQYDEQGGGGVFAAHTSPLLGFHHQLQHHQNQNQNQDPVETIPEGENFSRKRYRSVDLSKENDDRKQNENKSLKESETSGPTAAPMWAVAPPSRSGAGNTFWMLPVPTTAGNQMESSSNNNTAAGHRAPPMWPFVNSAGGGAGGGGGAATHFMAGTGFSFPMDQYRGSPLQLGSFLAQPQPTQNLGLSMPDSNLGMLAALNSAYSRGGNANANAEQANNAVEHQEKQQQSDHDDDSREENSNSSE

SEQ ID NO: 49067 - DNA, 1599 bp, Arabidopsis thaliana
  misc_feature (1)..(1599): Ceres Seq. ID no. 13579805
  misc_feature: MA Experiment ID: 20000173 Result: Down-regulated in Transcription
  misc_feature: MA Experiment 20000173 PARAMETER Experiment Name: At_42deg_Heat_P Parameter: Age (day) Value: 14
  misc_feature: MA Experiment 20000173 PARAMETER Experiment Name: At_42deg_Heat_P Parameter: Organism Value: A. thaliana
  misc_feature: MA Experiment 20000173 PARAMETER Experiment Name: At_42deg_Heat_P Parameter: Plant Line Value: WS
  misc_feature: MA Experiment 20000173 PARAMETER Experiment Name: At_42deg_Heat_P Parameter: Temperature (deg C) Value: 42 vs. 22
  misc_feature: MA Experiment 20000173 PARAMETER Experiment Name: At_42deg_Heat_P Parameter: Timepoint (hr) Value: 6
  misc_feature: MA Experiment 20000173 PARAMETER Experiment Name: At_42deg_Heat_P Parameter: Tissue Value: Aerial
  misc_feature: MA Experiment ID: 20000182 Result: Up-regulated in Transcription
  misc_feature: MA Experiment 20000182 PARAMETER Experiment Name: At_2mM_SA_P Parameter: Age (day) Value: 14
  misc_feature: MA Experiment 20000182 PARAMETER Experiment Name: At_2mM_SA_P Parameter: Organism Value: A. thaliana
  misc_feature: MA Experiment 20000182 PARAMETER Experiment Name: At_2mM_SA_P Parameter: Plant Line Value: WS
  misc_feature: MA Experiment 20000182 PARAMETER Experiment Name: At_2mM_SA_P Parameter: Timepoint (hr) Value: 6
  misc_feature: MA Experiment 20000182 PARAMETER Experiment Name: At_2mM_SA_P Parameter: Tissue Value: Aerial
  misc_feature: MA Experiment 20000182 PARAMETER Experiment Name: At_2mM_SA_P Parameter: Treatment Value: 2mM SA vs. No Treatment
  misc_feature: MA Experiment ID: 20000184 Result: Down-regulated in Transcription
  misc_feature: MA Experiment 20000184 PARAMETER Experiment Name: At_Shoots__P Parameter: Age (day) Value: 7
  misc_feature: MA Experiment 20000184 PARAMETER Experiment Name: At_Shoots__P Parameter: Tissue Value: Shoots vs. Whole Plant
  misc_feature: MA Experiment ID: 20000438 Result: Down-regulated in Transcription
  misc_feature: MA Experiment 20000438 PARAMETER Experiment Name: At_Shoots__P Parameter: Age (day) Value: 14
  misc_feature: MA Experiment 20000438 PARAMETER Experiment Name: At_Shoots__P Parameter: Tissue Value: Shoots vs. Whole Plant
  misc_feature: MA Experiment ID: 20000794 Result: Up-regulated in Transcription
  misc_feature: MA Experiment 20000794 PARAMETER Experiment Name: At_Petals_P Parameter: Age (day) Value: 23-25 days
  misc_feature: MA Experiment 20000794 PARAMETER Experiment Name: At_Petals_P Parameter: Plant Line Value: WS
  misc_feature: MA Experiment 20000794 PARAMETER Experiment Name: At_Petals_P Parameter: Tissue Value: Petals vs. Whole plant
  misc_feature: MA Experiment ID: 20001558 Result: Down-regulated in Transcription
  misc_feature: MA Experiment 20001558 PARAMETER Experiment Name: At_Drought_Soil_Dry_P Parameter: Age (day) Value: 27
  misc_feature: MA Experiment 20001558 PARAMETER Experiment Name: At_Drought_Soil_Dry_P Parameter: Organism Value: A. thaliana
  misc_feature: MA Experiment 20001558 PARAMETER Experiment Name: At_Drought_Soil_Dry_P Parameter: Plant Line Value: WS
  misc_feature: MA Experiment 20001558 PARAMETER Experiment Name: At_Drought_Soil_Dry_P Parameter: Post Timepoint (hr) Value: 6
  misc_feature: MA Experiment 20001558 PARAMETER Experiment Name: At_Drought_Soil_Dry_P Parameter: Post-Treatment Value: Re-Water vs. No Drought
  misc_feature: MA Experiment 20001558 PARAMETER Experiment Name: At_Drought_Soil_Dry_P Parameter: Timepoint (day) Value: 13
  misc_feature: MA Experiment 20001558 PARAMETER Experiment Name: At_Drought_Soil_Dry_P Parameter: Treatment Value: Drought vs. No Drought
  misc_feature: MA Experiment ID: 20001560 Result: Down-regulated in Transcription
  misc_feature: MA Experiment 20001560 PARAMETER Experiment Name: At_Drought_Soil_Dry_P Parameter: Age (day) Value: 28
  misc_feature: MA Experiment 20001560 PARAMETER Experiment Name: At_Drought_Soil_Dry_P Parameter: Organism Value: A. thaliana
  misc_feature: MA Experiment 20001560 PARAMETER Experiment Name: At_Drought_Soil_Dry_P Parameter: Plant Line Value: WS
  misc_feature: MA Experiment 20001560 PARAMETER Experiment Name: At_Drought_Soil_Dry_P Parameter: Post Timepoint (hr) Value: None
  misc_feature: MA Experiment 20001560 PARAMETER Experiment Name: At_Drought_Soil_Dry_P Parameter: Post-Treatment Value: None
  misc_feature: MA Experiment 20001560 PARAMETER Experiment Name: At_Drought_Soil_Dry_P Parameter: Timepoint (day) Value: 14
  misc_feature: MA Experiment 20001560 PARAMETER Experiment Name: At_Drought_Soil_Dry_P Parameter: Treatment Value: Drought vs. No Drought
atgggttggtttaacaagatctttaaaggctctaaccaaaggctccgggttgggaataataagcacaatcacaatgtttattacgataattatccgactgcttcacatgatgatgagcctagtgcggcggatacagatgctgataatgatgaacctcatcatactcaggaaccatctacatctgaggataatacatcgaatgaccaggaaaatgaagacatagaccgtgcaattgcattgtcgcttttagaagagaatcaagaacagacaagtataagcgggaaatactcgatgccggtggatgaagatgagcaacttgctagagccctacaagaaagtatggtagttgggaattcaccccgtcacaaaagtggaagtacatatgataatgggaatgcatatggagctggagatttatatgggaatggacatatgtatggaggaggaaatgtatatgcaaatggagatatttattatccaagacctattacttttcaaatggatttcaggatttgtgctggctgtaatatggagattggccatggaagatttctgaattgccttaattcactatggcatccagaatgttttcgatgttatggctgcagtcagccgatttctgagtacgagttttcaacatcagggaactacccttttcacaaggcttgttacagggagagatatcatcctaaatgtgatgtctgcagccactttataccaacaaatcatgctggtcttattgaatatagggcacatcctttttgggttcagaagtattgtccttctcacgaacacgatgctaccccgagatgttgcagttgtgaaagaatggagccacggaatacgagatatgttgaacttaacgatggacggaaactttgccttgagtgtttggactcggcggtcatggacaccatgcaatgccaacctctgtacttgcaaatacaaaatttctatgaaggactcaacatgaaggtagagcaggaagttccactcctcttggttgagagacaagcacttaacgaagccagagaaggtgaaaagaatggtcactatcacatgccagaaacaagaggactctgcctttcagaagaacaaactgttagtactgtaagaaagcgatcaaagcatggcacaggaaaatgggccgggaatattacagaaccttacaagttaacacggcaatgtgaagttaccgccattctcatcttattcgggctccctaggttacttactggttcgattctagctcatgagatgatgcatgcgtggatgaggctcaaaggattccgaacactgagccaagatgttgaagaaggtatatgtcaagtgatggctcataaatggttagatgctgagttagctgctggttcaacaaatagcaatgctgcatcatcatcctcctcttctcaaggactgaaaaagggaccgagatctcagtacgagagaaagcttggtgagtttttcaagcaccaaatcgagtctgatgcttctccggtttatggagacgggttcagagctgggaggttagctgttcacaagtacggtttgcgaaaaacacttgagcatatacagatgaccggtagattcccggtttaa

SEQ ID NO: 49068 - protein, 532 aa, Arabidopsis thaliana
  peptide (1)..(532): Ceres Seq. ID no. 13579806
  misc_feature (172)..(229): Pfam Name: LIM domain Pfam Description: LIM domain
  misc_feature (172)..(531): Homolog of NCBI NO: 22326876 NR Description: disease resistance protein (TIR-NBS-LRR class),
  misc_feature (1)..(225): Homolog of NCBI NO: 25518496 NR Description: hypothetical protein T29M8.14 - Arabidopsis
  misc_feature (73)..(524): Homolog of NCBI NO: 15240018 NR Description: hypothetical protein [Arabidopsis thaliana]
  misc_feature (60)..(186): Homolog of NCBI NO: 25407769 NR Description: hypothetical protein AT4g36860 [imported] -
  misc_feature (234)..(531): Homolog of NCBI NO: 25407769 NR Description: hypothetical protein AT4g36860 [imported] -
  misc_feature (188)..(531): Homolog of NCBI NO: 22329212 NR Description: expressed protein [Arabidopsis thaliana]
  misc_feature (169)..(532): Homolog of NCBI NO: 29893641 NR Description: hypothetical protein [Oryza sativa (japonica
  misc_feature (60)..(531): Homolog of NCBI NO: 17065046 NR Description: Unknown protein [Arabidopsis thaliana]
  misc_feature (28)..(527): Homolog of NCBI NO: 25518496 NR Description: hypothetical protein T29M8.14 - Arabidopsis
  misc_feature (1)..(532): Homolog of NCBI NO: 15221983 NR Description: expressed protein [Arabidopsis thaliana]
MGWFNKIFKGSNQRLRVGNNKHNHNVYYDNYPTASHDDEPSAADTDADNDEPHHTQEPSTSEDNTSNDQENEDIDRAIALSLLEENQEQTSISGKYSMPVDEDEQLARALQESMVVGNSPRHKSGSTYDNGNAYGAGDLYGNGHMYGGGNVYANGDIYYPRPITFQMDFRICAGCNMEIGHGRFLNCLNSLWHPECFRCYGCSQPISEYEFSTSGNYPFHKACYRERYHPKCDVCSHFIPTNHAGLIEYRAHPFWVQKYCPSHEHDATPRCCSCERMEPRNTRYVELNDGRKLCLECLDSAVMDTMQCQPLYLQIQNFYEGLNMKVEQEVPLLLVERQALNEAREGEKNGHYHMPETRGLCLSEEQTVSTVRKRSKHGTGKWAGNITEPYKLTRQCEVTAILILFGLPRLLTGSILAHEMMHAWMRLKGFRTLSQDVEEGICQVMAHKWLDAELAAGSTNSNAASSSSSSQGLKKGPRSQYERKLGEFFKHQIESDASPVYGDGFRAGRLAVHKYGLRKTLEHIQMTGRFPV

SEQ ID NO: 49069 - protein, 435 aa, Arabidopsis thaliana
  peptide (1)..(435): Ceres Seq. ID no. 13579807
  misc_feature (75)..(132): Pfam Name: LIM domain Pfam Description: LIM domain
  misc_feature (75)..(434): Homolog of NCBI NO: 22326876 NR Description: disease resistance protein (TIR-NBS-LRR class),
  misc_feature (1)..(128): Homolog of NCBI NO: 25518496 NR Description: hypothetical protein T29M8.14 - Arabidopsis
  misc_feature (1)..(427): Homolog of NCBI NO: 15240018 NR Description: hypothetical protein [Arabidopsis thaliana]
  misc_feature (1)..(89): Homolog of NCBI NO: 25407769 NR Description: hypothetical protein AT4g36860 [imported] -
  misc_feature (137)..(434): Homolog of NCBI NO: 25407769 NR Description: hypothetical protein AT4g36860 [imported] -
  misc_feature (91)..(434): Homolog of NCBI NO: 22329212 NR Description: expressed protein [Arabidopsis thaliana]
  misc_feature (72)..(435): Homolog of NCBI NO: 29893641 NR Description: hypothetical protein [Oryza sativa (japonica
  misc_feature (1)..(434): Homolog of NCBI NO: 17065046 NR Description: Unknown protein [Arabidopsis thaliana]
  misc_feature (1)..(430): Homolog of NCBI NO: 25518496 NR Description: hypothetical protein T29M8.14 - Arabidopsis
  misc_feature (1)..(435): Homolog of NCBI NO: 15221983 NR Description: expressed protein [Arabidopsis thaliana]
MPVDEDEQLARALQESMVVGNSPRHKSGSTYDNGNAYGAGDLYGNGHMYGGGNVYANGDIYYPRPITFQMDFRICAGCNMEIGHGRFLNCLNSLWHPECFRCYGCSQPISEYEFSTSGNYPFHKACYRERYHPKCDVCSHFIPTNHAGLIEYRAHPFWVQKYCPSHEHDATPRCCSCERMEPRNTRYVELNDGRKLCLECLDSAVMDTMQCQPLYLQIQNFYEGLNMKVEQEVPLLLVERQALNEAREGEKNGHYHMPETRGLCLSEEQTVSTVRKRSKHGTGKWAGNITEPYKLTRQCEVTAILILFGLPRLLTGSILAHEMMHAWMRLKGFRTLSQDVEEGICQVMAHKWLDAELAAGSTNSNAASSSSSSQGLKKGPRSQYERKLGEFFKHQIESDASPVYGDGFRAGRLAVHKYGLRKTLEHIQMTGRFPV

SEQ ID NO: 49070 - protein, 419 aa, Arabidopsis thaliana
  peptide (1)..(419): Ceres Seq. ID no. 13579808
  misc_feature (59)..(116): Pfam Name: LIM domain Pfam Description: LIM domain
  misc_feature (59)..(418): Homolog of NCBI NO: 22326876 NR Description: disease resistance protein (TIR-NBS-LRR class),
  misc_feature (1)..(112): Homolog of NCBI NO: 25518496 NR Description: hypothetical protein T29M8.14 - Arabidopsis
  misc_feature (1)..(411): Homolog of NCBI NO: 15240018 NR Description: hypothetical protein [Arabidopsis thaliana]
  misc_feature (1)..(73): Homolog of NCBI NO: 25407769 NR Description: hypothetical protein AT4g36860 [imported] -
  misc_feature (121)..(418): Homolog of NCBI NO: 25407769 NR Description: hypothetical protein AT4g36860 [imported] -
  misc_feature (75)..(418): Homolog of NCBI NO: 22329212 NR Description: expressed protein [Arabidopsis thaliana]
  misc_feature (56)..(419): Homolog of NCBI NO: 29893641 NR Description: hypothetical protein [Oryza sativa (japonica
  misc_feature (1)..(418): Homolog of NCBI NO: 17065046 NR Description: Unknown protein [Arabidopsis thaliana]
  misc_feature (1)..(414): Homolog of NCBI NO: 25518496 NR Description: hypothetical protein T29M8.14 - Arabidopsis
  misc_feature (1)..(419): Homolog of NCBI NO: 15221983 NR Description: expressed protein [Arabidopsis thaliana]
MVVGNSPRHKSGSTYDNGNAYGAGDLYGNGHMYGGGNVYANGDIYYPRPITFQMDFRICAGCNMEIGHGRFLNCLNSLWHPECFRCYGCSQPISEYEFSTSGNYPFHKACYRERYHPKCDVCSHFIPTNHAGLIEYRAHPFWVQKYCPSHEHDATPRCCSCERMEPRNTRYVELNDGRKLCLECLDSAVMDTMQCQPLYLQIQNFYEGLNMKVEQEVPLLLVERQALNEAREGEKNGHYHMPETRGLCLSEEQTVSTVRKRSKHGTGKWAGNITEPYKLTRQCEVTAILILFGLPRLLTGSILAHEMMHAWMRLKGFRTLSQDVEEGICQVMAHKWLDAELAAGSTNSNAASSSSSSQGLKKGPRSQYERKLGEFFKHQIESDASPVYGDGFRAGRLAVHKYGLRKTLEHIQMTGRFPV

SEQ ID NO: 49071 - DNA, 1980 bp, Arabidopsis thaliana
  misc_feature (1)..(1980): Ceres Seq. ID no. 13592092
  misc_feature: MA Experiment ID: 20000171 Result: Down-regulated in Transcription
  misc_feature: MA Experiment 20000171 PARAMETER Experiment Name: At_42deg_Heat_P Parameter: Age (day) Value: 14
  misc_feature: MA Experiment 20000171 PARAMETER Experiment Name: At_42deg_Heat_P Parameter: Organism Value: A. thaliana
  misc_feature: MA Experiment 20000171 PARAMETER Experiment Name: At_42deg_Heat_P Parameter: Plant Line Value: WS
  misc_feature: MA Experiment 20000171 PARAMETER Experiment Name: At_42deg_Heat_P Parameter: Temperature (deg C) Value: 42 vs. 22
  misc_feature: MA Experiment 20000171 PARAMETER Experiment Name: At_42deg_Heat_P Parameter: Timepoint (hr) Value: 1
  misc_feature: MA Experiment 20000171 PARAMETER Experiment Name: At_42deg_Heat_P Parameter: Tissue Value: Aerial
  misc_feature: MA Experiment ID: 20000180 Result: Up-regulated in Transcription
  misc_feature: MA Experiment 20000180 PARAMETER Experiment Name: At_Germinating_Seeds_P Parameter: Age (hr) Value: 24 vs. 0
  misc_feature: MA Experiment 20000180 PARAMETER Experiment Name: At_Germinating_Seeds_P Parameter: Tissue Value: Germinating Seeds
  misc_feature: MA Experiment ID: 20000182 Result: Down-regulated in Transcription
  misc_feature: MA Experiment 20000182 PARAMETER Experiment Name: At_2mM_SA_P Parameter: Age (day) Value: 14
  misc_feature: MA Experiment 20000182 PARAMETER Experiment Name: At_2mM_SA_P Parameter: Organism Value: A. thaliana
  misc_feature: MA Experiment 20000182 PARAMETER Experiment Name: At_2mM_SA_P Parameter: Plant Line Value: WS
  misc_feature: MA Experiment 20000182 PARAMETER Experiment Name: At_2mM_SA_P Parameter: Timepoint (hr) Value: 6
  misc_feature: MA Experiment 20000182 PARAMETER Experiment Name: At_2mM_SA_P Parameter: Tissue Value: Aerial
  misc_feature: MA Experiment 20000182 PARAMETER Experiment Name: At_2mM_SA_P Parameter: Treatment Value: 2mM SA vs. No Treatment
  misc_feature: MA Experiment ID: 20000184 Result: Up-regulated in Transcription
  misc_feature: MA Experiment 20000184 PARAMETER Experiment Name: At_Shoots__P Parameter: Age (day) Value: 7
  misc_feature: MA Experiment 20000184 PARAMETER Experiment Name: At_Shoots__P Parameter: Tissue Value: Shoots vs. Whole Plant
  misc_feature: MA Experiment ID: 20000185 Result: Up-regulated in Transcription
  misc_feature: MA Experiment 20000185 PARAMETER Experiment Name: At_Roots__P Parameter: Age (day) Value: 7 vs. 21
  misc_feature: MA Experiment 20000185 PARAMETER Experiment Name: At_Roots__P Parameter: Organism Value: A. thaliana
  misc_feature: MA Experiment 20000185 PARAMETER Experiment Name: At_Roots__P Parameter: Tissue Value: Roots vs. Whole Plant
  misc_feature: MA Experiment ID: 20000227 Result: Up-regulated in Transcription
  misc_feature: MA Experiment 20000227 PARAMETER Experiment Name: At_Root-Tips-vs-Tops_P Parameter: Tissue Value: Root Tips vs. Root Tops
  misc_feature: MA Experiment ID: 20000234 Result: Up-regulated in Transcription
  misc_feature: MA Experiment 20000234 PARAMETER Experiment Name: At_Siliques_P Parameter: Age (day) Value: 21
  misc_feature: MA Experiment 20000234 PARAMETER Experiment Name: At_Siliques_P Parameter: Organism Value: A. thaliana
  misc_feature: MA Experiment 20000234 PARAMETER Experiment Name: At_Siliques_P Parameter: Plant Line Value: WS
  misc_feature: MA Experiment 20000234 PARAMETER Experiment Name: At_Siliques_P Parameter: Tissue Value: Less Than 5mm Siliques vs. Whole Plant
  misc_feature: MA Experiment ID: 20000235 Result: Up-regulated in Transcription
  misc_feature: MA Experiment 20000235 PARAMETER Experiment Name: At_Siliques_P Parameter: Age (day) Value: 21
  misc_feature: MA Experiment 20000235 PARAMETER Experiment Name: At_Siliques_P Parameter: Organism Value: A. thaliana
  misc_feature: MA Experiment 20000235 PARAMETER Experiment Name: At_Siliques_P Parameter: Plant Line Value: WS
  misc_feature: MA Experiment 20000235 PARAMETER Experiment Name: At_Siliques_P Parameter: Tissue Value: 5-10mm Siliques vs. Whole Plant
  misc_feature: MA Experiment ID: 20000265 Result: Up-regulated in Transcription
  misc_feature: MA Experiment 20000265 PARAMETER Experiment Name: At_Open_Flower_P Parameter: Age (day) Value: 21
  misc_feature: MA Experiment 20000265 PARAMETER Experiment Name: At_Open_Flower_P Parameter: Plant Line Value: WS
  misc_feature: MA Experiment 20000265 PARAMETER Experiment Name: At_Open_Flower_P Parameter: Tissue Value: Closed Flower vs. Whole Plant
  misc_feature: MA Experiment ID: 20000286 Result: Up-regulated in Transcription
  misc_feature: MA Experiment 20000286 PARAMETER Experiment Name: At_Open_Flower_P Parameter: Age (day) Value: 21
  misc_feature: MA Experiment 20000286 PARAMETER Experiment Name: At_Open_Flower_P Parameter: Plant Line Value: WS
  misc_feature: MA Experiment 20000286 PARAMETER Experiment Name: At_Open_Flower_P Parameter: Tissue Value: Half Open vs. Whole Plant
  misc_feature: MA Experiment ID: 20000437 Result: Down-regulated in Transcription
  misc_feature: MA Experiment 20000437 PARAMETER Experiment Name: At_Drought_P Parameter: Age (day) Value: 8
  misc_feature: MA Experiment 20000437 PARAMETER Experiment Name: At_Drought_P Parameter: Organism Value: A. thaliana
  misc_feature: MA Experiment 20000437 PARAMETER Experiment Name: At_Drought_P Parameter: Plant Line Value: WS
  misc_feature: MA Experiment 20000437 PARAMETER Experiment Name: At_Drought_P Parameter: Timepoint (hr) Value: 24
  misc_feature: MA Experiment 20000437 PARAMETER Experiment Name: At_Drought_P Parameter: Tissue Value: Whole Plant
  misc_feature: MA Experiment 20000437 PARAMETER Experiment Name: At_Drought_P Parameter: Treatment Value: Drought vs. No Drought
  misc_feature: MA Experiment ID: 20000794 Result: Down-regulated in Transcription
  misc_feature: MA Experiment 20000794 PARAMETER Experiment Name: At_Petals_P Parameter: Age (day) Value: 23-25 days
  misc_feature: MA Experiment 20000794 PARAMETER Experiment Name: At_Petals_P Parameter: Plant Line Value: WS
  misc_feature: MA Experiment 20000794 PARAMETER Experiment Name: At_Petals_P Parameter: Tissue Value: Petals vs. Whole plant
  misc_feature: MA Experiment ID: 20001554 Result: Down-regulated in Transcription
  misc_feature: MA Experiment 20001554 PARAMETER Experiment Name: At_Drought_Soil_Dry_P Parameter: Age (day) Value: 21
  misc_feature: MA Experiment 20001554 PARAMETER Experiment Name: At_Drought_Soil_Dry_P Parameter: Organism Value: A. thaliana
  misc_feature: MA Experiment 20001554 PARAMETER Experiment Name: At_Drought_Soil_Dry_P Parameter: Plant Line Value: WS
  misc_feature: MA Experiment 20001554 PARAMETER Experiment Name: At_Drought_Soil_Dry_P Parameter: Post Timepoint (hr) Value: None
  misc_feature: MA Experiment 20001554 PARAMETER Experiment Name: At_Drought_Soil_Dry_P Parameter: Post-Treatment Value: None
  misc_feature: MA Experiment 20001554 PARAMETER Experiment Name: At_Drought_Soil_Dry_P Parameter: Timepoint (day) Value: 7
  misc_feature: MA Experiment 20001554 PARAMETER Experiment Name: At_Drought_Soil_Dry_P Parameter: Treatment Value: Drought vs. No Drought
  misc_feature: MA Experiment ID: 20001555 Result: Down-regulated in Transcription
  misc_feature: MA Experiment 20001555 PARAMETER Experiment Name: At_Drought_Soil_Dry_P Parameter: Age (day) Value: 24
  misc_feature: MA Experiment 20001555 PARAMETER Experiment Name: At_Drought_Soil_Dry_P Parameter: Organism Value: A. thaliana
  misc_feature: MA Experiment 20001555 PARAMETER Experiment Name: At_Drought_Soil_Dry_P Parameter: Plant Line Value: WS
  misc_feature: MA Experiment 20001555 PARAMETER Experiment Name: At_Drought_Soil_Dry_P Parameter: Post Timepoint (hr) Value: None
  misc_feature: MA Experiment 20001555 PARAMETER Experiment Name: At_Drought_Soil_Dry_P Parameter: Post-Treatment Value: None
  misc_feature: MA Experiment 20001555 PARAMETER Experiment Name: At_Drought_Soil_Dry_P Parameter: Timepoint (day) Value: 10
  misc_feature: MA Experiment 20001555 PARAMETER Experiment Name: At_Drought_Soil_Dry_P Parameter: Treatment Value: Drought vs. No Drought
  misc_feature: MA Experiment ID: 20001556 Result: Down-regulated in Transcription
  misc_feature: MA Experiment 20001556 PARAMETER Experiment Name: At_Drought_Soil_Dry_P Parameter: Age (day) Value: 26
  misc_feature: MA Experiment 20001556 PARAMETER Experiment Name: At_Drought_Soil_Dry_P Parameter: Organism Value: A. thaliana
  misc_feature: MA Experiment 20001556 PARAMETER Experiment Name: At_Drought_Soil_Dry_P Parameter: Plant Line Value: WS
  misc_feature: MA Experiment 20001556 PARAMETER Experiment Name: At_Drought_Soil_Dry_P Parameter: Post Timepoint (hr) Value: None
  misc_feature: MA Experiment 20001556 PARAMETER Experiment Name: At_Drought_Soil_Dry_P Parameter: Post-Treatment Value: None
  misc_feature: MA Experiment 20001556 PARAMETER Experiment Name: At_Drought_Soil_Dry_P Parameter: Timepoint (day) Value: 12
  misc_feature: MA Experiment 20001556 PARAMETER Experiment Name: At_Drought_Soil_Dry_P Parameter: Treatment Value: Drought vs. No Drought
  misc_feature: MA Experiment ID: 20001558 Result: Up-regulated in Transcription
  misc_feature: MA Experiment 20001558 PARAMETER Experiment Name: At_Drought_Soil_Dry_P Parameter: Age (day) Value: 27
  misc_feature: MA Experiment 20001558 PARAMETER Experiment Name: At_Drought_Soil_Dry_P Parameter: Organism Value: A. thaliana
  misc_feature: MA Experiment 20001558 PARAMETER Experiment Name: At_Drought_Soil_Dry_P Parameter: Plant Line Value: WS
  misc_feature: MA Experiment 20001558 PARAMETER Experiment Name: At_Drought_Soil_Dry_P Parameter: Post Timepoint (hr) Value: 6
  misc_feature: MA Experiment 20001558 PARAMETER Experiment Name: At_Drought_Soil_Dry_P Parameter: Post-Treatment Value: Re-Water vs. No Drought
  misc_feature: MA Experiment 20001558 PARAMETER Experiment Name: At_Drought_Soil_Dry_P Parameter: Timepoint (day) Value: 13
  misc_feature: MA Experiment 20001558 PARAMETER Experiment Name: At_Drought_Soil_Dry_P Parameter: Treatment Value: Drought vs. No Drought
  misc_feature: MA Experiment ID: 20001559 Result: Down-regulated in Transcription
  misc_feature: MA Experiment 20001559 PARAMETER Experiment Name: At_Drought_Soil_Dry_P Parameter: Age (day) Value: 28
  misc_feature: MA Experiment 20001559 PARAMETER Experiment Name: At_Drought_Soil_Dry_P Parameter: Organism Value: A. thaliana
  misc_feature: MA Experiment 20001559 PARAMETER Experiment Name: At_Drought_Soil_Dry_P Parameter: Plant Line Value: WS
  misc_feature: MA Experiment 20001559 PARAMETER Experiment Name: At_Drought_Soil_Dry_P Parameter: Post Timepoint (hr) Value: 29
  misc_feature: MA Experiment 20001559 PARAMETER Experiment Name: At_Drought_Soil_Dry_P Parameter: Post-Treatment Value: Re-Water vs. No Drought
  misc_feature: MA Experiment 20001559 PARAMETER Experiment Name: At_Drought_Soil_Dry_P Parameter: Timepoint (day) Value: 14
  misc_feature: MA Experiment 20001559 PARAMETER Experiment Name: At_Drought_Soil_Dry_P Parameter: Treatment Value: Drought vs. No Drought
  misc_feature: MA Experiment ID: 20001560 Result: Up-regulated in Transcription
  misc_feature: MA Experiment 20001560 PARAMETER Experiment Name: At_Drought_Soil_Dry_P Parameter: Age (day) Value: 28
  misc_feature: MA Experiment 20001560 PARAMETER Experiment Name: At_Drought_Soil_Dry_P Parameter: Organism Value: A. thaliana
  misc_feature: MA Experiment 20001560 PARAMETER Experiment Name: At_Drought_Soil_Dry_P Parameter: Plant Line Value: WS
  misc_feature: MA Experiment 20001560 PARAMETER Experiment Name: At_Drought_Soil_Dry_P Parameter: Post Timepoint (hr) Value: None
  misc_feature: MA Experiment 20001560 PARAMETER Experiment Name: At_Drought_Soil_Dry_P Parameter: Post-Treatment Value: None
  misc_feature: MA Experiment 20001560 PARAMETER Experiment Name: At_Drought_Soil_Dry_P Parameter: Timepoint (day) Value: 14
  misc_feature: MA Experiment 20001560 PARAMETER Experiment Name: At_Drought_Soil_Dry_P Parameter: Treatment Value: Drought vs. No Drought
  misc_feature: MA Experiment ID: 20001906 Result: Down-regulated in Transcription
  misc_feature: MA Experiment 20001906 PARAMETER Experiment Name: At_Drought_Reproduction_P Parameter: Age (day) Value: 35
  misc_feature: MA Experiment 20001906 PARAMETER Experiment Name: At_Drought_Reproduction_P Parameter: Organism Value: A. thaliana
  misc_feature: MA Experiment 20001906 PARAMETER Experiment Name: At_Drought_Reproduction_P Parameter: Plant Line Value: WS
  misc_feature: MA Experiment 20001906 PARAMETER Experiment Name: At_Drought_Reproduction_P Parameter: Timepoint (day) Value: 5
  misc_feature: MA Experiment 20001906 PARAMETER Experiment Name: At_Drought_Reproduction_P Parameter: Tissue Value: Siliques
  misc_feature: MA Experiment 20001906 PARAMETER Experiment Name: At_Drought_Reproduction_P Parameter: Treatment Value: Drought vs. No Drought
  misc_feature: MA Experiment ID: 20001911 Result: Down-regulated in Transcription
  misc_feature: MA Experiment 20001911 PARAMETER Experiment Name: At_Drought_Reproduction_P Parameter: Age (day) Value: 40
  misc_feature: MA Experiment 20001911 PARAMETER Experiment Name: At_Drought_Reproduction_P Parameter: Organism Value: A. thaliana
  misc_feature: MA Experiment 20001911 PARAMETER Experiment Name: At_Drought_Reproduction_P Parameter: Plant Line Value: WS
  misc_feature: MA Experiment 20001911 PARAMETER Experiment Name: At_Drought_Reproduction_P Parameter: Timepoint (day) Value: 10
  misc_feature: MA Experiment 20001911 PARAMETER Experiment Name: At_Drought_Reproduction_P Parameter: Tissue Value: Flowers
  misc_feature: MA Experiment 20001911 PARAMETER Experiment Name: At_Drought_Reproduction_P Parameter: Treatment Value: Drought vs. No Drought
gattccaaaatcctctgtatatggatctacacctctcctcagtctcatactcaaatcaataatccaaaccccaaaaaaaagaaaaccagagaagagagtttaaaaaatgagaggttcttgcaaagtctctatagttcttcttctggttttaatcaatggtgtgcttggagataacccttatagattcttcacctggaaaattacttatggcgacatttatccccttggtgttaaacaacagggaatattgataaatgggcagtttcctggacctcacattgacgcaatcacaaatgataatatcattatcagtgttttcaattacttgaaagagccttttctcatttcttggaacggagtgcaacagaggaagaactcatggcaagatggagtcgtagggacaacatgtccgattccaccaggcaaaaacttcacttatgtaattcaagtcaaagatcaaattggtagcttctactatttcccttctcttgccttccacaaagccgctggtgcatttggagccatccgtgtctggagtcgtcctcgcatccctgtcccgttctctccccctgacggtgatttctggcttctcgccggagattggtacaaaaccaatcactatgttttgagacgtctactagaagccggaaggaatctaccgaatcctgatggagttctcatcaatggtcgcggctggggaggcaataccttcaccgttcaacccggtaagacctatagattcagaatatcaaacgttggggtcgcgacttcattaaacttcagaatccaaggacacacgatgaagctcgttgaagtagaaggctctcacactgttcaaaacatctacacttcacttgacattcatttaggacagtcttactctgttcttgtgacggctaaccaagctcctcaagactattacatcgtcatctcctcgaggttcacgcggaaagtccttacaacgacttcgattctccattacagtaactcgagaaaaggcgtatctggccctgttccaaatggtcctactttggacatcgcatcttcactctaccaagctcgaactatccggagaaatcttacagcgagtggtccgagaccgaatccgcaaggctcgtatcattacggtttgatcaaaccaggccgtacgatcatactcgccaactcagctccttggatcaacggcaagcaaaggtacgccgtgaacggtgcctcgtttgttgcgcctgacacaccattgaagctcgccgattacttcaagattcccggagtttttaacctcggaagcatcccaacgagtccctctggtggaaacggagggtatcttcaaagctctgttatggccgctaactttagagaattcatcgaggttgttttccaaaactgggaaaattcagtccagtcttggcacgtctccggttactctttcttcgtcgtcggtatggatggaggacaatggactcccggaagccgagcaaagtacaacctgcgggacgcggtttcacggtccaccgttcaagtatatccgagggcatggacagcgatctacatagcgttggataatgttgggatgtggaacataaggtcggagaattgggcaagacagtatttggggcaacaattctatcttcgagtttacacttcctctacttcgtaccgagatgaatatccaccaccaaagaacgctcttatgtgcggacgagctaaaggccgccacactaggccattctaaaagggatattggacgcaacggctcaactgttttttttttctttgtttttttagattgaatgatttgaaatgtttagtattgtcacgagagggtggcaaagagatgtgagcttcgtggatttattcactacggcacaaaaattaggaacaagaaaaatttggagcttgacttgagctttcaacttagtttttatgacgaaatcaaatgttgtgttcttattttaaataatcaaattattttgttttact

SEQ ID NO: 49072 - protein, 541 aa, Arabidopsis thaliana
  peptide (1)..(541): Ceres Seq. ID no. 13592093
  misc_feature (22)..(525): Homolog of NCBI NO: 7432997 NR Description: pollen-specific protein homolog - tomato
  misc_feature (9)..(538): Homolog of NCBI NO: 15219118 NR Description: pectinesterase (pectin methylesterase), putative
  misc_feature (9)..(540): Homolog of NCBI NO: 25285550 NR Description: probable pectinesterase [imported] - Arabidopsis
  misc_feature (9)..(540): Homolog of NCBI NO: 18400509 NR Description: pectinesterase (pectin methylesterase) -related
  misc_feature (9)..(540): Homolog of NCBI NO: 16648889 NR Description: Unknown protein [Arabidopsis thaliana]
  misc_feature (1)..(540): Homolog of NCBI NO: 22531132 NR Description: pectinesterase, putative [Arabidopsis thaliana]
  misc_feature (1)..(540): Homolog of NCBI NO: 15982771 NR Description: At1g76160/T23E18_10 [Arabidopsis thaliana]
  misc_feature (7)..(540): Homolog of NCBI NO: 1255951 NR Description: PS60 [Nicotiana tabacum]
  misc_feature (1)..(540): Homolog of NCBI NO: 15222981 NR Description: pectinesterase (pectin methylesterase), putative
  misc_feature (1)..(541): Homolog of NCBI NO: 15234688 NR Description: pectinesterase (pectin methylesterase), putative
  misc_feature (22)..(525): Homolog of NCBI NO: 7432997 NR Description: pollen-specific protein homolog - tomato
  misc_feature (9)..(538): Homolog of NCBI NO: 15219118 NR Description: pectinesterase (pectin methylesterase), putative
  misc_feature (9)..(540): Homolog of NCBI NO: 25285550 NR Description: probable pectinesterase [imported] - Arabidopsis
  misc_feature (9)..(540): Homolog of NCBI NO: 18400509 NR Description: pectinesterase (pectin methylesterase) -related
  misc_feature (9)..(540): Homolog of NCBI NO: 16648889 NR Description: Unknown protein [Arabidopsis thaliana]
  misc_feature (1)..(540): Homolog of NCBI NO: 22531132 NR Description: pectinesterase, putative [Arabidopsis thaliana]
  misc_feature (1)..(540): Homolog of NCBI NO: 15982771 NR Description: At1g76160/T23E18_10 [Arabidopsis thaliana]
  misc_feature (7)..(540): Homolog of NCBI NO: 1255951 NR Description: PS60 [Nicotiana tabacum]
  misc_feature (1)..(540): Homolog of NCBI NO: 15222981 NR Description: pectinesterase (pectin methylesterase), putative
  misc_feature (1)..(541): Homolog of NCBI NO: 15234688 NR Description: pectinesterase (pectin methylesterase), putative
MRGSCKVSIVLLLVLINGVLGDNPYRFFTWKITYGDIYPLGVKQQGILINGQFPGPHIDAITNDNIIISVFNYLKEPFLISWNGVQQRKNSWQDGVVGTTCPIPPGKNFTYVIQVKDQIGSFYYFPSLAFHKAAGAFGAIRVWSRPRIPVPFSPPDGDFWLLAGDWYKTNHYVLRRLLEAGRNLPNPDGVLINGRGWGGNTFTVQPGKTYRFRISNVGVATSLNFRIQGHTMKLVEVEGSHTVQNIYTSLDIHLGQSYSVLVTANQAPQDYYIVISSRFTRKVLTTTSILHYSNSRKGVSGPVPNGPTLDIASSLYQARTIRRNLTASGPRPNPQGSYHYGLIKPGRTIILANSAPWINGKQRYAVNGASFVAPDTPLKLADYFKIPGVFNLGSIPTSPSGGNGGYLQSSVMAANFREFIEVVFQNWENSVQSWHVSGYSFFVVGMDGGQWTPGSRAKYNLRDAVSRSTVQVYPRAWTAIYIALDNVGMWNIRSENWARQYLGQQFYLRVYTSSTSYRDEYPPPKNALMCGRAKGRHTRPF

SEQ ID NO: 49073 - protein, 310 aa, Arabidopsis thaliana
  peptide (1)..(310): Ceres Seq. ID no. 13592094
  misc_feature (1)..(294): Homolog of NCBI NO: 7432997 NR Description: pollen-specific protein homolog - tomato
  misc_feature (1)..(307): Homolog of NCBI NO: 15219118 NR Description: pectinesterase (pectin methylesterase), putative
  misc_feature (1)..(309): Homolog of NCBI NO: 18400509 NR Description: pectinesterase (pectin methylesterase) -related
  misc_feature (1)..(309): Homolog of NCBI NO: 25285550 NR Description: probable pectinesterase [imported] - Arabidopsis
  misc_feature (1)..(309): Homolog of NCBI NO: 16648889 NR Description: Unknown protein [Arabidopsis thaliana]
  misc_feature (1)..(309): Homolog of NCBI NO: 22531132 NR Description: pectinesterase, putative [Arabidopsis thaliana]
  misc_feature (1)..(309): Homolog of NCBI NO: 15982771 NR Description: At1g76160/T23E18_10 [Arabidopsis thaliana]
  misc_feature (1)..(309): Homolog of NCBI NO: 1255951 NR Description: PS60 [Nicotiana tabacum]
  misc_feature (1)..(309): Homolog of NCBI NO: 15222981 NR Description: pectinesterase (pectin methylesterase), putative
  misc_feature (1)..(310): Homolog of NCBI NO: 15234688 NR Description: pectinesterase (pectin methylesterase), putative
  misc_feature (1)..(294): Homolog of NCBI NO: 7432997 NR Description: pollen-specific protein homolog - tomato
  misc_feature (1)..(307): Homolog of NCBI NO: 15219118 NR Description: pectinesterase (pectin methylesterase), putative
  misc_feature (1)..(309): Homolog of NCBI NO: 18400509 NR Description: pectinesterase (pectin methylesterase) -related
  misc_feature (1)..(309): Homolog of NCBI NO: 25285550 NR Description: probable pectinesterase [imported] - Arabidopsis
  misc_feature (1)..(309): Homolog of NCBI NO: 16648889 NR Description: Unknown protein [Arabidopsis thaliana]
  misc_feature (1)..(309): Homolog of NCBI NO: 22531132 NR Description: pectinesterase, putative [Arabidopsis thaliana]
  misc_feature (1)..(309): Homolog of NCBI NO: 15982771 NR Description: At1g76160/T23E18_10 [Arabidopsis thaliana]
  misc_feature (1)..(309): Homolog of NCBI NO: 1255951 NR Description: PS60 [Nicotiana tabacum]
  misc_feature (1)..(309): Homolog of NCBI NO: 15222981 NR Description: pectinesterase (pectin methylesterase), putative
  misc_feature (1)..(310): Homolog of NCBI NO: 15234688 NR Description: pectinesterase (pectin methylesterase), putative
MKLVEVEGSHTVQNIYTSLDIHLGQSYSVLVTANQAPQDYYIVISSRFTRKVLTTTSILHYSNSRKGVSGPVPNGPTLDIASSLYQARTIRRNLTASGPRPNPQGSYHYGLIKPGRTIILANSAPWINGKQRYAVNGASFVAPDTPLKLADYFKIPGVFNLGSIPTSPSGGNGGYLQSSVMAANFREFIEVVFQNWENSVQSWHVSGYSFFVVGMDGGQWTPGSRAKYNLRDAVSRSTVQVYPRAWTAIYIALDNVGMWNIRSENWARQYLGQQFYLRVYTSSTSYRDEYPPPKNALMCGRAKGRHTRPF

SEQ ID NO: 49074 - DNA, 1180 bp, Arabidopsis thaliana; identical to SEQ ID NO: 23631
  misc_feature (1)..(1180): Ceres Seq. ID no. 12330478
  misc_feature: MA Experiment ID: 20000495 Result: Down-regulated in Transcription
  misc_feature: MA Experiment 20000495 PARAMETER Experiment Name: At_Guard_Cells_P Parameter: Harvest Date Value: 8/2/2002
  misc_feature: MA Experiment 20000495 PARAMETER Experiment Name: At_Guard_Cells_P Parameter: Organism Value: A. thaliana
  misc_feature: MA Experiment 20000495 PARAMETER Experiment Name: At_Guard_Cells_P Parameter: Tissue Value: Guard Cells vs. Leaves

SEQ ID NO: 49075 - protein, 254 aa, Arabidopsis thaliana; identical to SEQ ID NO: 23632
  peptide (1)..(254): Ceres Seq. ID no. 12330479
  misc_feature (5)..(240): Pfam Name: 14-3-3 protein Pfam Description: 14-3-3 protein
  misc_feature (5)..(240): Pfam Name: 14-3-3 protein Pfam Description: 14-3-3 protein
  misc_feature (5)..(240): Pfam Name: 14-3-3 protein Pfam Description: 14-3-3 protein
  misc_feature (1)..(240): Homolog of NCBI NO: 18399427 NR Description: 14-3-3 protein GF14 omicron (grf11)
  misc_feature (1)..(254): Homolog of NCBI NO: 2492490 NR Description: 14-3-3-LIKE PROTEIN
  misc_feature (1)..(254): Homolog of NCBI NO: 3925703 NR Description: 14-3-3 protein [Lycopersicon esculentum]
  misc_feature (1)..(240): Homolog of NCBI NO: 18399427 NR Description: 14-3-3 protein GF14 omicron (grf11)
  misc_feature (1)..(254): Homolog of NCBI NO: 3925703 NR Description: 14-3-3 protein [Lycopersicon esculentum]
  misc_feature (1)..(253): Homolog of NCBI NO: 30687814 NR Description: 14-3-3 protein GF14 epsilon (grf10) [Arabidopsis
  misc_feature (1)..(254): Homolog of NCBI NO: 2492490 NR Description: 14-3-3-LIKE PROTEIN
  misc_feature (1)..(254): Homolog of NCBI NO: 18395103 NR Description: 14-3-3 protein GF14 epsilon (grf10)
  misc_feature (1)..(253): Homolog of NCBI NO: 30687814 NR Description: 14-3-3 protein GF14 epsilon (grf10) [Arabidopsis
  misc_feature (1)..(254): Homolog of NCBI NO: 26454609 NR Description: 14-3-3 protein 7
  misc_feature (1)..(254): Homolog of NCBI NO: 3925703 NR Description: 14-3-3 protein [Lycopersicon esculentum]
  misc_feature (1)..(240): Homolog of NCBI NO: 18399427 NR Description: 14-3-3 protein GF14 omicron (grf11)
  misc_feature (1)..(254): Homolog of NCBI NO: 18395103 NR Description: 14-3-3 protein GF14 epsilon (grf10)
  misc_feature (1)..(254): Homolog of NCBI NO: 26454609 NR Description: 14-3-3 protein 7
  misc_feature (1)..(254): Homolog of NCBI NO: 2492490 NR Description: 14-3-3-LIKE PROTEIN
  misc_feature (1)..(254): Homolog of NCBI NO: 26454609 NR Description: 14-3-3 protein 7
  misc_feature (1)..(253): Homolog of NCBI NO: 30687814 NR Description: 14-3-3 protein GF14 epsilon (grf10) [Arabidopsis
  misc_feature (1)..(254): Homolog of NCBI NO: 18395103 NR Description: 14-3-3 protein GF14 epsilon (grf10)

SEQ ID NO: 49076 - protein, 231 aa, Arabidopsis thaliana; identical to SEQ ID NO: 23633
  peptide (1)..(231): Ceres Seq. ID no. 12330480
  misc_feature (1)..(217): Pfam Name: 14-3-3 protein Pfam Description: 14-3-3 protein
  misc_feature (1)..(217): Pfam Name: 14-3-3 protein Pfam Description: 14-3-3 protein
  misc_feature (1)..(217): Pfam Name: 14-3-3 protein Pfam Description: 14-3-3 protein
  misc_feature (1)..(217): Homolog of NCBI NO: 18399427 NR Description: 14-3-3 protein GF14 omicron (grf11)
  misc_feature (1)..(231): Homolog of NCBI NO: 2492490 NR Description: 14-3-3-LIKE PROTEIN
  misc_feature (1)..(231): Homolog of NCBI NO: 3925703 NR Description: 14-3-3 protein [Lycopersicon esculentum]
  misc_feature (1)..(217): Homolog of NCBI NO: 18399427 NR Description: 14-3-3 protein GF14 omicron (grf11)
  misc_feature (1)..(231): Homolog of NCBI NO: 3925703 NR Description: 14-3-3 protein [Lycopersicon esculentum]
  misc_feature (1)..(230): Homolog of NCBI NO: 30687814 NR Description: 14-3-3 protein GF14 epsilon (grf10) [Arabidopsis
  misc_feature (1)..(231): Homolog of NCBI NO: 2492490 NR Description: 14-3-3-LIKE PROTEIN
  misc_feature (1)..(231): Homolog of NCBI NO: 18395103 NR Description: 14-3-3 protein GF14 epsilon (grf10)
  misc_feature (1)..(230): Homolog of NCBI NO: 30687814 NR Description: 14-3-3 protein GF14 epsilon (grf10) [Arabidopsis
  misc_feature (1)..(231): Homolog of NCBI NO: 26454609 NR Description: 14-3-3 protein 7
  misc_feature (1)..(231): Homolog of NCBI NO: 3925703 NR Description: 14-3-3 protein [Lycopersicon esculentum]
  misc_feature (1)..(217): Homolog of NCBI NO: 18399427 NR Description: 14-3-3 protein GF14 omicron (grf11)
  misc_feature (1)..(231): Homolog of NCBI NO: 18395103 NR Description: 14-3-3 protein GF14 epsilon (grf10)
  misc_feature (1)..(231): Homolog of NCBI NO: 26454609 NR Description: 14-3-3 protein 7
  misc_feature (1)..(231): Homolog of NCBI NO: 2492490 NR Description: 14-3-3-LIKE PROTEIN
  misc_feature (1)..(231): Homolog of NCBI NO: 26454609 NR Description: 14-3-3 protein 7
  misc_feature (1)..(230): Homolog of NCBI NO: 30687814 NR Description: 14-3-3 protein GF14 epsilon (grf10) [Arabidopsis
  misc_feature (1)..(231): Homolog of NCBI NO: 18395103 NR Description: 14-3-3 protein GF14 epsilon (grf10)

SEQ ID NO: 49077 - protein, 227 aa, Arabidopsis thaliana; identical to SEQ ID NO: 23634
  peptide (1)..(227): Ceres Seq. ID no. 12330481
  misc_feature (1)..(213): Pfam Name: 14-3-3 protein Pfam Description: 14-3-3 protein
  misc_feature (1)..(213): Pfam Name: 14-3-3 protein Pfam Description: 14-3-3 protein
  misc_feature (1)..(213): Pfam Name: 14-3-3 protein Pfam Description: 14-3-3 protein
  misc_feature (1)..(213): Homolog of NCBI NO: 18399427 NR Description: 14-3-3 protein GF14 omicron (grf11)
  misc_feature (1)..(227): Homolog of NCBI NO: 2492490 NR Description: 14-3-3-LIKE PROTEIN
  misc_feature (1)..(227): Homolog of NCBI NO: 3925703 NR Description: 14-3-3 protein [Lycopersicon esculentum]
  misc_feature (1)..(213): Homolog of NCBI NO: 18399427 NR Description: 14-3-3 protein GF14 omicron (grf11)
  misc_feature (1)..(227): Homolog of NCBI NO: 3925703 NR Description: 14-3-3 protein [Lycopersicon esculentum]
  misc_feature (1)..(226): Homolog of NCBI NO: 30687814 NR Description: 14-3-3 protein GF14 epsilon (grf10) [Arabidopsis
  misc_feature (1)..(227): Homolog of NCBI NO: 2492490 NR Description: 14-3-3-LIKE PROTEIN
  misc_feature (1)..(227): Homolog of NCBI NO: 18395103 NR Description: 14-3-3 protein GF14 epsilon (grf10)
  misc_feature (1)..(226): Homolog of NCBI NO: 30687814 NR Description: 14-3-3 protein GF14 epsilon (grf10) [Arabidopsis
  misc_feature (1)..(227): Homolog of NCBI NO: 26454609 NR Description: 14-3-3 protein 7
  misc_feature (1)..(227): Homolog of NCBI NO: 3925703 NR Description: 14-3-3 protein [Lycopersicon esculentum]
  misc_feature (1)..(213): Homolog of NCBI NO: 18399427 NR Description: 14-3-3 protein GF14 omicron (grf11)
  misc_feature (1)..(227): Homolog of NCBI NO: 18395103 NR Description: 14-3-3 protein GF14 epsilon (grf10)
  misc_feature (1)..(227): Homolog of NCBI NO: 26454609 NR Description: 14-3-3 protein 7
  misc_feature (1)..(227): Homolog of NCBI NO: 2492490 NR Description: 14-3-3-LIKE PROTEIN
  misc_feature (1)..(227): Homolog of NCBI NO: 26454609 NR Description: 14-3-3 protein 7
  misc_feature (1)..(226): Homolog of NCBI NO: 30687814 NR Description: 14-3-3 protein GF14 epsilon (grf10) [Arabidopsis
  misc_feature (1)..(227): Homolog of NCBI NO: 18395103 NR Description: 14-3-3 protein GF14 epsilon (grf10)

SEQ ID NO: 49078 - DNA, 868 bp, Arabidopsis thaliana
  misc_feature (1)..(868): Ceres Seq. ID no. 13579873
  misc_feature: MA Experiment ID: 20000173 Result: Down-regulated in Transcription
  misc_feature: MA Experiment 20000173 PARAMETER Experiment Name: At_42deg_Heat_P Parameter: Age (day) Value: 14
  misc_feature: MA Experiment 20000173 PARAMETER Experiment Name: At_42deg_Heat_P Parameter: Organism Value: A. thaliana
  misc_feature: MA Experiment 20000173 PARAMETER Experiment Name: At_42deg_Heat_P Parameter: Plant Line Value: WS
  misc_feature: MA Experiment 20000173 PARAMETER Experiment Name: At_42deg_Heat_P Parameter: Temperature (deg C) Value: 42 vs. 22
  misc_feature: MA Experiment 20000173 PARAMETER Experiment Name: At_42deg_Heat_P Parameter: Timepoint (hr) Value: 6
  misc_feature: MA Experiment 20000173 PARAMETER Experiment Name: At_42deg_Heat_P Parameter: Tissue Value: Aerial
  misc_feature: MA Experiment ID: 20000227 Result: Up-regulated in Transcription
  misc_feature: MA Experiment 20000227 PARAMETER Experiment Name: At_Root-Tips-vs-Tops_P Parameter: Tissue Value: Root Tips vs. Root Tops
  misc_feature: MA Experiment ID: 20001247 Result: Down-regulated in Transcription
  misc_feature: MA Experiment 20001247 PARAMETER Experiment Name: At_Far-red-induction_P Parameter: Age (day) Value: 7
  misc_feature: MA Experiment 20001247 PARAMETER Experiment Name: At_Far-red-induction_P Parameter: Light Value: Far-red vs. White
  misc_feature: MA Experiment 20001247 PARAMETER Experiment Name: At_Far-red-induction_P Parameter: Organism Value: A. thaliana
  misc_feature: MA Experiment 20001247 PARAMETER Experiment Name: At_Far-red-induction_P Parameter: Plant Line Value: Columbia
  misc_feature: MA Experiment 20001247 PARAMETER Experiment Name: At_Far-red-induction_P Parameter: Timepoint (hr) Value: 1
  misc_feature: MA Experiment 20001247 PARAMETER Experiment Name: At_Far-red-induction_P Parameter: Tissue Value: Whole Plant
  misc_feature: MA Experiment ID: 20001556 Result: Up-regulated in Transcription
  misc_feature: MA Experiment 20001556 PARAMETER Experiment Name: At_Drought_Soil_Dry_P Parameter: Age (day) Value: 26
  misc_feature: MA Experiment 20001556 PARAMETER Experiment Name: At_Drought_Soil_Dry_P Parameter: Organism Value: A. thaliana
  misc_feature: MA Experiment 20001556 PARAMETER Experiment Name: At_Drought_Soil_Dry_P Parameter: Plant Line Value: WS
  misc_feature: MA Experiment 20001556 PARAMETER Experiment Name: At_Drought_Soil_Dry_P Parameter: Post Timepoint (hr) Value: None
  misc_feature: MA Experiment 20001556 PARAMETER Experiment Name: At_Drought_Soil_Dry_P Parameter: Post-Treatment Value: None
  misc_feature: MA Experiment 20001556 PARAMETER Experiment Name: At_Drought_Soil_Dry_P Parameter: Timepoint (day) Value: 12
  misc_feature: MA Experiment 20001556 PARAMETER Experiment Name: At_Drought_Soil_Dry_P Parameter: Treatment Value: Drought vs. No Drought
agcagtgtttgaaatcctttggattgcatcaccaggagcaagagatcacgatgatcatttgttggatttcgtcattgaagctctgaagttttttttcgtcattctcgtatcaactgaatcgctgctttctattgttgatgatattcagtctaagaaacggggactttcgctggaggagaaacgagagaagatgcttcagatattctatgagtctcaagacttcttcctactaaaggaacttgagaagatggggccgaagaagggtgtaattagtcagtctgtgaaagatgttatccagagtttagtcgatgatgatcttgttgcgaaagacaagattggaatttctatctacttttggagccttcccagctgtgctggcaatcaacttaggagtgttcgccagaaacttgaatctgatcttcagggtagtaacaaaaggttagcagaacttgttgatcagtgtgaggccctaaagaagggaagggaagaatcggaggaacgaacagaggccttgacgcaactcaaagatattgaaaagaaacacaaagatctgaagaacgagatggtacaatttgctgacaacgatccagctactttggaggcaaagaggaatgcaattgaagttgctcaccagtcggctaacagatggacagataacatcttcacactgcgacaatggtgttcaaacaacttcccccaggccaaggaacagctagaacatctatacacggaggcgggaatcactgaggactttgattacatagagttatcatcattccctttgagctcatcccatgaagctgataccgcaaagcagctagtacaagatgaagcttagttctaatactctccagcataacagttaaag

SEQ ID NO: 49079 - protein, 278 aa, Arabidopsis thaliana
  peptide (1)..(278): Ceres Seq. ID no. 13579874
  misc_feature (58)..(255): Homolog of NCBI NO: 19074771 NR Description: similarity to HYPOTHETICAL PROTEIN YA53_SCHPO
  misc_feature (53)..(255): Homolog of NCBI NO: 29246883 NR Description: GLP_76_12374_11763 [Giardia lamblia ATCC 50803]
  misc_feature (53)..(256): Homolog of NCBI NO: 19113903 NR Description: hypothetical coiled-coil protein
  misc_feature (59)..(254): Homolog of NCBI NO: 29841076 NR Description: similar to GenBank Accession Number AY028916 GAJ
  misc_feature (50)..(255): Homolog of NCBI NO: 37591185 NR Description: GAJ protein [Mus musculus]
  misc_feature (50)..(255): Homolog of NCBI NO: 20380711 NR Description: GAJ protein [Mus musculus]
  misc_feature (50)..(255): Homolog of NCBI NO: 34857888 NR Description: similar to RIKEN cDNA 2610034E18 gene [Rattus
  misc_feature (50)..(255): Homolog of NCBI NO: 14149769 NR Description: GAJ protein; homolog of yeast MND1 [Homo sapiens]
  misc_feature (64)..(185): Homolog of NCBI NO: 7485748 NR Description: hypothetical protein F19B15.200 - Arabidopsis
  misc_feature (50)..(278): Homolog of NCBI NO: 30688234 NR Description: expressed protein [Arabidopsis thaliana]
AVFEILWIASPGARDHDDHLLDFVIEALKFFFVILVSTESLLSIVDDIQSKKRGLSLEEKREKMLQIFYESQDFFLLKELEKMGPKKGVISQSVKDVIQSLVDDDLVAKDKIGISIYFWSLPSCAGNQLRSVRQKLESDLQGSNKRLAELVDQCEALKKGREESEERTEALTQLKDIEKKHKDLKNEMVQFADNDPATLEAKRNAIEVAHQSANRWTDNIFTLRQWCSNNFPQAKEQLEHLYTEAGITEDFDYIELSSFPLSSSHEADTAKQLVQDEA

SEQ ID NO: 49080 - protein, 215 aa, Arabidopsis thaliana
  peptide (1)..(215): Ceres Seq. ID no. 13579875
  misc_feature (1)..(192): Homolog of NCBI NO: 19074771 NR Description: similarity to HYPOTHETICAL PROTEIN YA53_SCHPO
  misc_feature (1)..(192): Homolog of NCBI NO: 29246883 NR Description: GLP_76_12374_11763 [Giardia lamblia ATCC 50803]
  misc_feature (1)..(193): Homolog of NCBI NO: 19113903 NR Description: hypothetical coiled-coil protein
  misc_feature (1)..(191): Homolog of NCBI NO: 29841076 NR Description: similar to GenBank Accession Number AY028916 GAJ
  misc_feature (1)..(192): Homolog of NCBI NO: 37591185 NR Description: GAJ protein [Mus musculus]
  misc_feature (1)..(192): Homolog of NCBI NO: 20380711 NR Description: GAJ protein [Mus musculus]
  misc_feature (1)..(192): Homolog of NCBI NO: 34857888 NR Description: similar to RIKEN cDNA 2610034E18 gene [Rattus
  misc_feature (1)..(192): Homolog of NCBI NO: 14149769 NR Description: GAJ protein; homolog of yeast MND1 [Homo sapiens]
  misc_feature (1)..(122): Homolog of NCBI NO: 7485748 NR Description: hypothetical protein F19B15.200 - Arabidopsis
  misc_feature (1)..(215): Homolog of NCBI NO: 30688234 NR Description: expressed protein [Arabidopsis thaliana]
MLQIFYESQDFFLLKELEKMGPKKGVISQSVKDVIQSLVDDDLVAKDKIGISIYFWSLPSCAGNQLRSVRQKLESDLQGSNKRLAELVDQCEALKKGREESEERTEALTQLKDIEKKHKDLKNEMVQFADNDPATLEAKRNAIEVAHQSANRWTDNIFTLRQWCSNNFPQAKEQLEHLYTEAGITEDFDYIELSSFPLSSSHEADTAKQLVQDEA

SEQ ID NO: 49081 - protein, 196 aa, Arabidopsis thaliana
  peptide (1)..(196): Ceres Seq. ID no. 13579876
  misc_feature (1)..(173): Homolog of NCBI NO: 19074771 NR Description: similarity to HYPOTHETICAL PROTEIN YA53_SCHPO
  misc_feature (1)..(173): Homolog of NCBI NO: 29246883 NR Description: GLP_76_12374_11763 [Giardia lamblia ATCC 50803]
  misc_feature (1)..(174): Homolog of NCBI NO: 19113903 NR Description: hypothetical coiled-coil protein
  misc_feature (1)..(172): Homolog of NCBI NO: 29841076 NR Description: similar to GenBank Accession Number AY028916 GAJ
  misc_feature (1)..(173): Homolog of NCBI NO: 37591185 NR Description: GAJ protein [Mus musculus]
  misc_feature (1)..(173): Homolog of NCBI NO: 20380711 NR Description: GAJ protein [Mus musculus]
  misc_feature (1)..(173): Homolog of NCBI NO: 34857888 NR Description: similar to RIKEN cDNA 2610034E18 gene [Rattus
  misc_feature (1)..(173): Homolog of NCBI NO: 14149769 NR Description: GAJ protein; homolog of yeast MND1 [Homo sapiens]
  misc_feature (1)..(103): Homolog of NCBI NO: 7485748 NR Description: hypothetical protein F19B15.200 - Arabidopsis
  misc_feature (1)..(196): Homolog of NCBI NO: 30688234 NR Description: expressed protein [Arabidopsis thaliana]
MGPKKGVISQSVKDVIQSLVDDDLVAKDKIGISIYFWSLPSCAGNQLRSVRQKLESDLQGSNKRLAELVDQCEALKKGREESEERTEALTQLKDIEKKHKDLKNEMVQFADNDPATLEAKRNAIEVAHQSANRWTDNIFTLRQWCSNNFPQAKEQLEHLYTEAGITEDFDYIELSSFPLSSSHEADTAKQLVQDEA

SEQ ID NO: 49082 - DNA, 1596 bp, Arabidopsis thaliana
  misc_feature (1)..(1596): Ceres Seq. ID no. 12578257
  misc_feature: MA Experiment ID: 20000173 Result: Down-regulated in Transcription
  misc_feature: MA Experiment 20000173 PARAMETER Experiment Name: At_42deg_Heat_P Parameter: Age (day) Value: 14
  misc_feature: MA Experiment 20000173 PARAMETER Experiment Name: At_42deg_Heat_P Parameter: Organism Value: A. thaliana
  misc_feature: MA Experiment 20000173 PARAMETER Experiment Name: At_42deg_Heat_P Parameter: Plant Line Value: WS
  misc_feature: MA Experiment 20000173 PARAMETER Experiment Name: At_42deg_Heat_P Parameter: Temperature (deg C) Value: 42 vs. 22
  misc_feature: MA Experiment 20000173 PARAMETER Experiment Name: At_42deg_Heat_P Parameter: Timepoint (hr) Value: 6
  misc_feature: MA Experiment 20000173 PARAMETER Experiment Name: At_42deg_Heat_P Parameter: Tissue Value: Aerial
  misc_feature: MA Experiment ID: 20000182 Result: Up-regulated in Transcription
  misc_feature: MA Experiment 20000182 PARAMETER Experiment Name: At_2mM_SA_P Parameter: Age (day) Value: 14
  misc_feature: MA Experiment 20000182 PARAMETER Experiment Name: At_2mM_SA_P Parameter: Organism Value: A. thaliana
  misc_feature: MA Experiment 20000182 PARAMETER Experiment Name: At_2mM_SA_P Parameter: Plant Line Value: WS
  misc_feature: MA Experiment 20000182 PARAMETER Experiment Name: At_2mM_SA_P Parameter: Timepoint (hr) Value: 6
  misc_feature: MA Experiment 20000182 PARAMETER Experiment Name: At_2mM_SA_P Parameter: Tissue Value: Aerial
  misc_feature: MA Experiment 20000182 PARAMETER Experiment Name: At_2mM_SA_P Parameter: Treatment Value: 2mM SA vs. No Treatment
  misc_feature: MA Experiment ID: 20000184 Result: Down-regulated in Transcription
  misc_feature: MA Experiment 20000184 PARAMETER Experiment Name: At_Shoots__P Parameter: Age (day) Value: 7
  misc_feature: MA Experiment 20000184 PARAMETER Experiment Name: At_Shoots__P Parameter: Tissue Value: Shoots vs. Whole Plant
  misc_feature: MA Experiment ID: 20000185 Result: Down-regulated in Transcription
  misc_feature: MA Experiment 20000185 PARAMETER Experiment Name: At_Roots__P Parameter: Age (day) Value: 7 vs. 21
  misc_feature: MA Experiment 20000185 PARAMETER Experiment Name: At_Roots__P Parameter: Organism Value: A. thaliana
  misc_feature: MA Experiment 20000185 PARAMETER Experiment Name: At_Roots__P Parameter: Tissue Value: Roots vs. Whole Plant
  misc_feature: MA Experiment ID: 20000213 Result: Down-regulated in Transcription
  misc_feature: MA Experiment 20000213 PARAMETER Experiment Name: At_4deg_Cold_P Parameter: Timepoint (hr) Value: 2
  misc_feature: MA Experiment ID: 20000234 Result: Down-regulated in Transcription
  misc_feature: MA Experiment 20000234 PARAMETER Experiment Name: At_Siliques_P Parameter: Age (day) Value: 21
  misc_feature: MA Experiment 20000234 PARAMETER Experiment Name: At_Siliques_P Parameter: Organism Value: A. thaliana
  misc_feature: MA Experiment 20000234 PARAMETER Experiment Name: At_Siliques_P Parameter: Plant Line Value: WS
  misc_feature: MA Experiment 20000234 PARAMETER Experiment Name: At_Siliques_P Parameter: Tissue Value: Less Than 5mm Siliques vs. Whole Plant
  misc_feature: MA Experiment ID: 20000235 Result: Down-regulated in Transcription
  misc_feature: MA Experiment 20000235 PARAMETER Experiment Name: At_Siliques_P Parameter: Age (day) Value: 21
  misc_feature: MA Experiment 20000235 PARAMETER Experiment Name: At_Siliques_P Parameter: Organism Value: A. thaliana
  misc_feature: MA Experiment 20000235 PARAMETER Experiment Name: At_Siliques_P Parameter: Plant Line Value: WS
  misc_feature: MA Experiment 20000235 PARAMETER Experiment Name: At_Siliques_P Parameter: Tissue Value: 5-10mm Siliques vs. Whole Plant
  misc_feature: MA Experiment ID: 20000265 Result: Down-regulated in Transcription
  misc_feature: MA Experiment 20000265 PARAMETER Experiment Name: At_Open_Flower_P Parameter: Age (day) Value: 21
  misc_feature: MA Experiment 20000265 PARAMETER Experiment Name: At_Open_Flower_P Parameter: Plant Line Value: WS
  misc_feature: MA Experiment 20000265 PARAMETER Experiment Name: At_Open_Flower_P Parameter: Tissue Value: Closed Flower vs. Whole Plant
  misc_feature: MA Experiment ID: 20000286 Result: Down-regulated in Transcription
  misc_feature: MA Experiment 20000286 PARAMETER Experiment Name: At_Open_Flower_P Parameter: Age (day) Value: 21
  misc_feature: MA Experiment 20000286 PARAMETER Experiment Name: At_Open_Flower_P Parameter: Plant Line Value: WS
  misc_feature: MA Experiment 20000286 PARAMETER Experiment Name: At_Open_Flower_P Parameter: Tissue Value: Half Open vs. Whole Plant
  misc_feature: MA Experiment ID: 20000438 Result: Down-regulated in Transcription
  misc_feature: MA Experiment 20000438 PARAMETER Experiment Name: At_Shoots__P Parameter: Age (day) Value: 14
  misc_feature: MA Experiment 20000438 PARAMETER Experiment Name: At_Shoots__P Parameter: Tissue Value: Shoots vs. Whole Plant
  misc_feature: MA Experiment ID: 20000495 Result: Down-regulated in Transcription
  misc_feature: MA Experiment 20000495 PARAMETER Experiment Name: At_Guard_Cells_P Parameter: Harvest Date Value: 8/2/2002
  misc_feature: MA Experiment 20000495 PARAMETER Experiment Name: At_Guard_Cells_P Parameter: Organism Value: A. thaliana
  misc_feature: MA Experiment 20000495 PARAMETER Experiment Name: At_Guard_Cells_P Parameter: Tissue Value: Guard Cells vs. Leaves
  misc_feature: MA Experiment ID: 20000709 Result: Down-regulated in Transcription
  misc_feature: MA Experiment 20000709 PARAMETER Experiment Name: At_15mM_NH4NO3_L-to-H_P Parameter: Age (hr) Value: 14
  misc_feature: MA Experiment 20000709 PARAMETER Experiment Name: At_15mM_NH4NO3_L-to-H_P Parameter: Organism Value: A. thaliana
  misc_feature: MA Experiment 20000709 PARAMETER Experiment Name: At_15mM_NH4NO3_L-to-H_P Parameter: Plant Line Value: WS
  misc_feature: MA Experiment 20000709 PARAMETER Experiment Name: At_15mM_NH4NO3_L-to-H_P Parameter: Timepoint (hr) Value: 4
  misc_feature: MA Experiment 20000709 PARAMETER Experiment Name: At_15mM_NH4NO3_L-to-H_P Parameter: Tissue Value: Aerial
  misc_feature: MA Experiment 20000709 PARAMETER Experiment Name: At_15mM_NH4NO3_L-to-H_P Parameter: Treatment Value: 15mM NH4NO3 vs. 30mM Mannitol
  misc_feature: MA Experiment ID: 20000794 Result: Down-regulated in Transcription
  misc_feature: MA Experiment 20000794 PARAMETER Experiment Name: At_Petals_P Parameter: Age (day) Value: 23-25 days
  misc_feature: MA Experiment 20000794 PARAMETER Experiment Name: At_Petals_P Parameter: Plant Line Value: WS
  misc_feature: MA Experiment 20000794 PARAMETER Experiment Name: At_Petals_P Parameter: Tissue Value: Petals vs. Whole plant
  misc_feature: MA Experiment ID: 20001248 Result: Up-regulated in Transcription
  misc_feature: MA Experiment 20001248 PARAMETER Experiment Name: At_Far-red-induction_P Parameter: Age (day) Value: 7
  misc_feature: MA Experiment 20001248 PARAMETER Experiment Name: At_Far-red-induction_P Parameter: Light Value: Far-red vs. White
  misc_feature: MA Experiment 20001248 PARAMETER Experiment Name: At_Far-red-induction_P Parameter: Organism Value: A. thaliana
  misc_feature: MA Experiment 20001248 PARAMETER Experiment Name: At_Far-red-induction_P Parameter: Plant Line Value: Columbia
  misc_feature: MA Experiment 20001248 PARAMETER Experiment Name: At_Far-red-induction_P Parameter: Timepoint (hr) Value: 4
  misc_feature: MA Experiment 20001248 PARAMETER Experiment Name: At_Far-red-induction_P Parameter: Tissue Value: Whole Plant
  misc_feature: MA Experiment ID: 20001450 Result: Up-regulated in Transcription
  misc_feature: MA Experiment 20001450 PARAMETER Experiment Name: At_Far-red-induction_P Parameter: Age (day) Value: 7
  misc_feature: MA Experiment 20001450 PARAMETER Experiment Name: At_Far-red-induction_P Parameter: Light Value: Far-red vs. White
  misc_feature: MA Experiment 20001450 PARAMETER Experiment Name: At_Far-red-induction_P Parameter: Organism Value: A. thaliana
  misc_feature: MA Experiment 20001450 PARAMETER Experiment Name: At_Far-red-induction_P Parameter: Plant Line Value: Columbia
  misc_feature: MA Experiment 20001450 PARAMETER Experiment Name: At_Far-red-induction_P Parameter: Timepoint (hr) Value: 8
  misc_feature: MA Experiment 20001450 PARAMETER Experiment Name: At_Far-red-induction_P Parameter: Tissue Value: Whole Plant
  misc_feature: MA Experiment ID: 20001556 Result: Down-regulated in Transcription
  misc_feature: MA Experiment 20001556 PARAMETER Experiment Name: At_Drought_Soil_Dry_P Parameter: Age (day) Value: 26
  misc_feature: MA Experiment 20001556 PARAMETER Experiment Name: At_Drought_Soil_Dry_P Parameter: Organism Value: A. thaliana
  misc_feature: MA Experiment 20001556 PARAMETER Experiment Name: At_Drought_Soil_Dry_P Parameter: Plant Line Value: WS
  misc_feature: MA Experiment 20001556 PARAMETER Experiment Name: At_Drought_Soil_Dry_P Parameter: Post Timepoint (hr) Value: None
  misc_feature: MA Experiment 20001556 PARAMETER Experiment Name: At_Drought_Soil_Dry_P Parameter: Post-Treatment Value: None
  misc_feature: MA Experiment 20001556 PARAMETER Experiment Name: At_Drought_Soil_Dry_P Parameter: Timepoint (day) Value: 12
  misc_feature: MA Experiment 20001556 PARAMETER Experiment Name: At_Drought_Soil_Dry_P Parameter: Treatment Value: Drought vs. No Drought
  misc_feature: MA Experiment ID: 20001557 Result: Down-regulated in Transcription
  misc_feature: MA Experiment 20001557 PARAMETER Experiment Name: At_Drought_Soil_Dry_P Parameter: Age (day) Value: 27
  misc_feature: MA Experiment 20001557 PARAMETER Experiment Name: At_Drought_Soil_Dry_P Parameter: Organism Value: A. thaliana
  misc_feature: MA Experiment 20001557 PARAMETER Experiment Name: At_Drought_Soil_Dry_P Parameter: Plant Line Value: WS
  misc_feature: MA Experiment 20001557 PARAMETER Experiment Name: At_Drought_Soil_Dry_P Parameter: Post Timepoint (hr) Value: 3
  misc_feature: MA Experiment 20001557 PARAMETER Experiment Name: At_Drought_Soil_Dry_P Parameter: Post-Treatment Value: Re-Water vs. No Drought
  misc_feature: MA Experiment 20001557 PARAMETER Experiment Name: At_Drought_Soil_Dry_P Parameter: Timepoint (day) Value: 13
  misc_feature: MA Experiment 20001557 PARAMETER Experiment Name: At_Drought_Soil_Dry_P Parameter: Treatment Value: Drought vs. No Drought
  misc_feature: MA Experiment ID: 20001558 Result: Down-regulated in Transcription
  misc_feature: MA Experiment 20001558 PARAMETER Experiment Name: At_Drought_Soil_Dry_P Parameter: Age (day) Value: 27
  misc_feature: MA Experiment 20001558 PARAMETER Experiment Name: At_Drought_Soil_Dry_P Parameter: Organism Value: A. thaliana
  misc_feature: MA Experiment 20001558 PARAMETER Experiment Name: At_Drought_Soil_Dry_P Parameter: Plant Line Value: WS
  misc_feature: MA Experiment 20001558 PARAMETER Experiment Name: At_Drought_Soil_Dry_P Parameter: Post Timepoint (hr) Value: 6
  misc_feature: MA Experiment 20001558 PARAMETER Experiment Name: At_Drought_Soil_Dry_P Parameter: Post-Treatment Value: Re-Water vs. No Drought
  misc_feature: MA Experiment 20001558 PARAMETER Experiment Name: At_Drought_Soil_Dry_P Parameter: Timepoint (day) Value: 13
  misc_feature: MA Experiment 20001558 PARAMETER Experiment Name: At_Drought_Soil_Dry_P Parameter: Treatment Value: Drought vs. No Drought
  misc_feature: MA Experiment ID: 20001560 Result: Down-regulated in Transcription
  misc_feature: MA Experiment 20001560 PARAMETER Experiment Name: At_Drought_Soil_Dry_P Parameter: Age (day) Value: 28
  misc_feature: MA Experiment 20001560 PARAMETER Experiment Name: At_Drought_Soil_Dry_P Parameter: Organism Value: A. thaliana
  misc_feature: MA Experiment 20001560 PARAMETER Experiment Name: At_Drought_Soil_Dry_P Parameter: Plant Line Value: WS
  misc_feature: MA Experiment 20001560 PARAMETER Experiment Name: At_Drought_Soil_Dry_P Parameter: Post Timepoint (hr) Value: None
  misc_feature: MA Experiment 20001560 PARAMETER Experiment Name: At_Drought_Soil_Dry_P Parameter: Post-Treatment Value: None
  misc_feature: MA Experiment 20001560 PARAMETER Experiment Name: At_Drought_Soil_Dry_P Parameter: Timepoint (day) Value: 14
  misc_feature: MA Experiment 20001560 PARAMETER Experiment Name: At_Drought_Soil_Dry_P Parameter: Treatment Value: Drought vs. No Drought
aaactatgtcgattcttctgtatttcttctttctccccgttattttatcgttaatattcatgaagaaattcaaagactcgaaacgaaatcttcctccgagcccaccgaagctaccaattatcggaaacttacaccagcttcgaggattgtttcatagatgtcttcatgatctctccaagaaacacggtccggtgttacttctccgtctaggttttatcgatatggttgtgatctcatcaaaagaagcagcggaagaagttctcaaagtacatgaccttgagtgttgtactagacctaagaccaacgcctcatcaaaattctcgcgtgatggtaaagacatcgcctttgcgccatacggggaggtttcgagagagttgcggaagctttccttaatcaactttttcagcacgcaaaaggttcgatcttttaggtacatcagagaggaagaaaatgatttgatggtcaagaaactaaaggaatcagctaagaagaagaatacagtggatttgagccaaacacttttctatctagttgggagtatcatattcagggctacctttgggcagcgtttagaccagaacaagcatgtcaataaggaaaagatcgaagaactcatgtttgaggtccagaaagttgggtctctaagcagctctgatattttccctgctggtgtgggatggtttatggactttgtgtcaggacgacataagacacttcacaaagttttcgtcgaggttgatactttgctaaatcatgtaattgatggtcacttgaagaatcctgaagacaaaacaaatcaagatcgccctgatatcatcgactcgatcttagagactatttataaacaagaacaagatgaatctttcaaactcaccattgatcatctcaaaggaattatccaaaatatatatcttgctggagtagacacaagtgccatcaccatgatttgggcaatggcagagcttgttaagaacccacgggtaatgaagaaagctcaagaagagatccgaacatgcattggaatcaaacagaaggagagaatcgaagaagaagatgtcgataagcttcagtacttgaagcttgtgatcaaagaaaccttaagactacacccaccagcacctcttttacttccaagagagacaatggctgatatcaagattcaaggctacgacattcctcggaaaaccattcttttggttaatgcatggtcgataggacgaaaccctgaactctgggaaaaccctgaggaatttaacccggagagatttatcgattgtcctatggattacaaaggaaatagttttgagatgttaccatttggttctggtcggaagatatgtccagggatagcttttggaatagcgaccgttgaactgggactattgaacttgctttactactttgattggagattggctgaggaggataaagatattgacatggaagaggctggtgatgccacaattgttaagaaagttcctcttgaacttgtcccaattattcatcattgaatgatgttccaactctataaataaaaatgaagttatatatttgcttgtcgaaacagaaaaatgttatgtaacatatatttttatt

SEQ ID NO: 49083 - protein, 502 aa, Arabidopsis thaliana
  peptide (1)..(502): Ceres Seq. ID no. 12578258
  misc_feature (31)..(496): Pfam Name: Cytochrome P450 Pfam Description: Cytochrome P450
  misc_feature (5)..(499): Homolog of NCBI NO: 30696845 NR Description: cytochrome P450 71B10 [Arabidopsis thaliana]
  misc_feature (2)..(499): Homolog of NCBI NO: 15231520 NR Description: cytochrome p450 family
  misc_feature (2)..(499): Homolog of NCBI NO: 15222174 NR Description: cytochrome p450 family
  misc_feature (2)..(500): Homolog of NCBI NO: 5915827 NR Description: Cytochrome P450 71B4
  misc_feature (2)..(500): Homolog of NCBI NO: 15231536 NR Description: cytochrome p450 family
  misc_feature (2)..(502): Homolog of NCBI NO: 15231534 NR Description: cytochrome p450 family; protein id: At3g26270.1
  misc_feature (2)..(502): Homolog of NCBI NO: 15231528 NR Description: cytochrome p450 family; protein id: At3g26230.1
  misc_feature (20)..(502): Homolog of NCBI NO: 17065192 NR Description: cytochrome P450 [Arabidopsis thaliana]
  misc_feature (2)..(502): Homolog of NCBI NO: 25282600 NR Description: cytochrome P450 monooxygenase [imported] -
  misc_feature (2)..(502): Homolog of NCBI NO: 15231527 NR Description: cytochrome p450 family
TMSILLYFFFLPVILSLIFMKKFKDSKRNLPPSPPKLPIIGNLHQLRGLFHRCLHDLSKKHGPVLLLRLGFIDMVVISSKEAAEEVLKVHDLECCTRPKTNASSKFSRDGKDIAFAPYGEVSRELRKLSLINFFSTQKVRSFRYIREEENDLMVKKLKESAKKKNTVDLSQTLFYLVGSIIFRATFGQRLDQNKHVNKEKIEELMFEVQKVGSLSSSDIFPAGVGWFMDFVSGRHKTLHKVFVEVDTLLNHVIDGHLKNPEDKTNQDRPDIIDSILETIYKQEQDESFKLTIDHLKGIIQNIYLAGVDTSAITMIWAMAELVKNPRVMKKAQEEIRTCIGIKQKERIEEEDVDKLQYLKLVIKETLRLHPPAPLLLPRETMADIKIQGYDIPRKTILLVNAWSIGRNPELWENPEEFNPERFIDCPMDYKGNSFEMLPFGSGRKICPGIAFGIATVELGLLNLLYYFDWRLAEEDKDIDMEEAGDATIVKKVPLELVPIIHH

SEQ ID NO: 49084 - protein, 501 aa, Arabidopsis thaliana
  peptide (1)..(501): Ceres Seq. ID no. 12578259
  misc_feature (30)..(495): Pfam Name: Cytochrome P450 Pfam Description: Cytochrome P450
  misc_feature (4)..(498): Homolog of NCBI NO: 30696845 NR Description: cytochrome P450 71B10 [Arabidopsis thaliana]
  misc_feature (1)..(498): Homolog of NCBI NO: 15231520 NR Description: cytochrome p450 family
  misc_feature (1)..(498): Homolog of NCBI NO: 15222174 NR Description: cytochrome p450 family
  misc_feature (1)..(499): Homolog of NCBI NO: 5915827 NR Description: Cytochrome P450 71B4
  misc_feature (1)..(499): Homolog of NCBI NO: 15231536 NR Description: cytochrome p450 family
  misc_feature (1)..(501): Homolog of NCBI NO: 15231534 NR Description: cytochrome p450 family; protein id: At3g26270.1
  misc_feature (1)..(501): Homolog of NCBI NO: 15231528 NR Description: cytochrome p450 family; protein id: At3g26230.1
  misc_feature (19)..(501): Homolog of NCBI NO: 17065192 NR Description: cytochrome P450 [Arabidopsis thaliana]
  misc_feature (1)..(501): Homolog of NCBI NO: 25282600 NR Description: cytochrome P450 monooxygenase [imported] -
  misc_feature (1)..(501): Homolog of NCBI NO: 15231527 NR Description: cytochrome p450 family
MSILLYFFFLPVILSLIFMKKFKDSKRNLPPSPPKLPIIGNLHQLRGLFHRCLHDLSKKHGPVLLLRLGFIDMVVISSKEAAEEVLKVHDLECCTRPKTNASSKFSRDGKDIAFAPYGEVSRELRKLSLINFFSTQKVRSFRYIREEENDLMVKKLKESAKKKNTVDLSQTLFYLVGSIIFRATFGQRLDQNKHVNKEKIEELMFEVQKVGSLSSSDIFPAGVGWFMDFVSGRHKTLHKVFVEVDTLLNHVIDGHLKNPEDKTNQDRPDIIDSILETIYKQEQDESFKLTIDHLKGIIQNIYLAGVDTSAITMIWAMAELVKNPRVMKKAQEEIRTCIGIKQKERIEEEDVDKLQYLKLVIKETLRLHPPAPLLLPRETMADIKIQGYDIPRKTILLVNAWSIGRNPELWENPEEFNPERFIDCPMDYKGNSFEMLPFGSGRKICPGIAFGIATVELGLLNLLYYFDWRLAEEDKDIDMEEAGDATIVKKVPLELVPIIHH

SEQ ID NO: 49085 - protein, 483 aa, Arabidopsis thaliana
  peptide (1)..(483): Ceres Seq. ID no. 12578260
  misc_feature (12)..(477): Pfam Name: Cytochrome P450 Pfam Description: Cytochrome P450
  misc_feature (1)..(480): Homolog of NCBI NO: 30696845 NR Description: cytochrome P450 71B10 [Arabidopsis thaliana]
  misc_feature (1)..(480): Homolog of NCBI NO: 15231520 NR Description: cytochrome p450 family
  misc_feature (1)..(480): Homolog of NCBI NO: 15222174 NR Description: cytochrome p450 family
  misc_feature (1)..(481): Homolog of NCBI NO: 5915827 NR Description: Cytochrome P450 71B4
  misc_feature (1)..(481): Homolog of NCBI NO: 15231536 NR Description: cytochrome p450 family
  misc_feature (1)..(483): Homolog of NCBI NO: 15231534 NR Description: cytochrome p450 family; protein id: At3g26270.1
  misc_feature (1)..(483): Homolog of NCBI NO: 15231528 NR Description: cytochrome p450 family; protein id: At3g26230.1
  misc_feature (1)..(483): Homolog of NCBI NO: 17065192 NR Description: cytochrome P450 [Arabidopsis thaliana]
  misc_feature (1)..(483): Homolog of NCBI NO: 25282600 NR Description: cytochrome P450 monooxygenase [imported] -
  misc_feature (1)..(483): Homolog of NCBI NO: 15231527 NR Description: cytochrome p450 family
MKKFKDSKRNLPPSPPKLPIIGNLHQLRGLFHRCLHDLSKKHGPVLLLRLGFIDMVVISSKEAAEEVLKVHDLECCTRPKTNASSKFSRDGKDIAFAPYGEVSRELRKLSLINFFSTQKVRSFRYIREEENDLMVKKLKESAKKKNTVDLSQTLFYLVGSIIFRATFGQRLDQNKHVNKEKIEELMFEVQKVGSLSSSDIFPAGVGWFMDFVSGRHKTLHKVFVEVDTLLNHVIDGHLKNPEDKTNQDRPDIIDSILETIYKQEQDESFKLTIDHLKGIIQNIYLAGVDTSAITMIWAMAELVKNPRVMKKAQEEIRTCIGIKQKERIEEEDVDKLQYLKLVIKETLRLHPPAPLLLPRETMADIKIQGYDIPRKTILLVNAWSIGRNPELWENPEEFNPERFIDCPMDYKGNSFEMLPFGSGRKICPGIAFGIATVELGLLNLLYYFDWRLAEEDKDIDMEEAGDATIVKKVPLELVPIIHH

SEQ ID NO: 49086 - DNA, 761 bp, Arabidopsis thaliana
  misc_feature (1)..(761): Ceres Seq. ID no. 13579813
  misc_feature: MA Experiment ID: 20000307 Result: Up-regulated in Transcription
  misc_feature: MA Experiment 20000307 PARAMETER Experiment Name: At_Germinating_Seeds_Sub_P Parameter: Age (hr) Value: 24 vs. 0
  misc_feature: MA Experiment 20000307 PARAMETER Experiment Name: At_Germinating_Seeds_Sub_P Parameter: Organism Value: A. thaliana
  misc_feature: MA Experiment 20000307 PARAMETER Experiment Name: At_Germinating_Seeds_Sub_P Parameter: Plant Line Value: WS
  misc_feature: MA Experiment 20000307 PARAMETER Experiment Name: At_Germinating_Seeds_Sub_P Parameter: Tissue Value: Germinating Seeds
  misc_feature: MA Experiment ID: 20000315 Result: Down-regulated in Transcription
  misc_feature: MA Experiment 20000315 PARAMETER Experiment Name: At_14day_Shoots-Roots_Sub_P Parameter: Age (day) Value: 14
  misc_feature: MA Experiment 20000315 PARAMETER Experiment Name: At_14day_Shoots-Roots_Sub_P Parameter: Organism Value: A. thaliana
  misc_feature: MA Experiment 20000315 PARAMETER Experiment Name: At_14day_Shoots-Roots_Sub_P Parameter: Plant Line Value: WS
  misc_feature: MA Experiment 20000315 PARAMETER Experiment Name: At_14day_Shoots-Roots_Sub_P Parameter: Tissue Value: Shoots vs. Whole Plant
aaagagagacgactctgaatccaaaaaaaamaaaaaactcattaagtaaagacaaaggaagagaagaaagacgatttctcgaagaagctatggcggatcagctaactgatgaacagatctctgagtttaaggaagcttttagcctcttcgacaaagatggagatggttgcatcaccacaaaggagctgggaacagtgatgcggtcactagggcagaacccaacagaagctgagctacaagacatgatcaacgaggttgacgctgatggaaacggaaccattgacttccctgagttcttaaacctaatggctaaaaagatgaaggacacagactcggaggaagagctgaaagaagctttcagggtgttcgacaaagaccagaacggtttcatatccgctgcagagcttcgccatgtgatgacgaatctaggtgagaaactgactgatgaagaggtcgaggagatgattcgtgaagcagatgttgatggagatggtcagataaactacgaggagtttgtcaagattatgatggctaagtgatttgataaaggtgatgatgatgatgatgatgacctttttatgcttctaggagtttaaccaaaaacatttgcatgattggtggagatatgcttttaaacagacataatttgtttttcgttcttttgattttctggtttgtgacttttgtgtgtaatggaaaatcaagtaagttggattgaaaccgatgggttgggtttttactttttacccacattttgttgc

SEQ ID NO: 49087 - protein, 178 aa, Arabidopsis thaliana
  peptide (1)..(178): Ceres Seq. ID no. 15222700
  misc_feature (41)..(69): Pfam Name: EF hand Pfam Description: EF hand
  misc_feature (30)..(178): Homolog of NCBI NO: 15225840 NR Description: calmodulin [Arabidopsis thaliana]
  misc_feature (30)..(178): Homolog of NCBI NO: 30683369 NR Description: calmodulin [Arabidopsis thaliana]
  misc_feature (30)..(178): Homolog of NCBI NO: 3121848 NR Description: CALMODULIN
  misc_feature (30)..(178): Homolog of NCBI NO: 34304715 NR Description: calmodulin 4 [Daucus carota]
  misc_feature (30)..(178): Homolog of NCBI NO: 15229784 NR Description: calmodulin [Arabidopsis thaliana]
  misc_feature (30)..(178): Homolog of NCBI NO: 20186 NR Description: calmodulin [Oryza sativa]
  misc_feature (30)..(178): Homolog of NCBI NO: 2809481 NR Description: calmodulin [Oryza sativa]
  misc_feature (30)..(178): Homolog of NCBI NO: 115515 NR Description: Calmodulin
  misc_feature (30)..(178): Homolog of NCBI NO: 479693 NR Description: calmodulin 4 - Arabidopsis thaliana
  misc_feature (30)..(178): Homolog of NCBI NO: 15219652 NR Description: calmodulin 4 [Arabidopsis thaliana]
  misc_feature (10)..(10): Xaa is any aa, unknown or other
RETTLNPKKXKNSLSKDKGREERRFLEEAMADQLTDEQISEFKEAFSLFDKDGDGCITTKELGTVMRSLGQNPTEAELQDMINEVDADGNGTIDFPEFLNLMAKKMKDTDSEEELKEAFRVFDKDQNGFISAAELRHVMTNLGEKLTDEEVEEMIREADVDGDGQINYEEFVKIMMAK

SEQ ID NO: 49088 - protein, 149 aa, Arabidopsis thaliana; identical to SEQ ID NO: 27678
  peptide (1)..(149): Ceres Seq. ID no. 15222701
  misc_feature (12)..(40): Pfam Name: EF hand Pfam Description: EF hand
  misc_feature (1)..(149): Homolog of NCBI NO: 15225840 NR Description: calmodulin [Arabidopsis thaliana]
  misc_feature (1)..(149): Homolog of NCBI NO: 30683369 NR Description: calmodulin [Arabidopsis thaliana]
  misc_feature (1)..(149): Homolog of NCBI NO: 3121848 NR Description: CALMODULIN
  misc_feature (1)..(149): Homolog of NCBI NO: 34304715 NR Description: calmodulin 4 [Daucus carota]
  misc_feature (1)..(149): Homolog of NCBI NO: 15229784 NR Description: calmodulin [Arabidopsis thaliana]
  misc_feature (1)..(149): Homolog of NCBI NO: 20186 NR Description: calmodulin [Oryza sativa]
  misc_feature (1)..(149): Homolog of NCBI NO: 2809481 NR Description: calmodulin [Oryza sativa]
  misc_feature (1)..(149): Homolog of NCBI NO: 115515 NR Description: Calmodulin
  misc_feature (1)..(149): Homolog of NCBI NO: 479693 NR Description: calmodulin 4 - Arabidopsis thaliana
  misc_feature (1)..(149): Homolog of NCBI NO: 15219652 NR Description: calmodulin 4 [Arabidopsis thaliana]

SEQ ID NO: 49089 - protein, 113 aa, Arabidopsis thaliana; identical to SEQ ID NO: 27679
  peptide (1)..(113): Ceres Seq. ID no. 15222702
  misc_feature (1)..(113): Homolog of NCBI NO: 15225840 NR Description: calmodulin [Arabidopsis thaliana]
  misc_feature (1)..(113): Homolog of NCBI NO: 30683369 NR Description: calmodulin [Arabidopsis thaliana]
  misc_feature (1)..(113): Homolog of NCBI NO: 3121848 NR Description: CALMODULIN
  misc_feature (1)..(113): Homolog of NCBI NO: 34304715 NR Description: calmodulin 4 [Daucus carota]
  misc_feature (1)..(113): Homolog of NCBI NO: 15229784 NR Description: calmodulin [Arabidopsis thaliana]
  misc_feature (1)..(113): Homolog of NCBI NO: 20186 NR Description: calmodulin [Oryza sativa]
  misc_feature (1)..(113): Homolog of NCBI NO: 2809481 NR Description: calmodulin [Oryza sativa]
  misc_feature (1)..(113): Homolog of NCBI NO: 115515 NR Description: Calmodulin
  misc_feature (1)..(113): Homolog of NCBI NO: 479693 NR Description: calmodulin 4 - Arabidopsis thaliana
  misc_feature (1)..(113): Homolog of NCBI NO: 15219652 NR Description: calmodulin 4 [Arabidopsis thaliana]

SEQ ID NO: 49090 - DNA, 2527 bp, Arabidopsis thaliana
  misc_feature (1)..(2527): Ceres Seq. ID no. 12578261
  misc_feature: MA Experiment ID: 20000171 Result: Up-regulated in Transcription
  misc_feature: MA Experiment 20000171 PARAMETER Experiment Name: At_42deg_Heat_P Parameter: Age (day) Value: 14
  misc_feature: MA Experiment 20000171 PARAMETER Experiment Name: At_42deg_Heat_P Parameter: Organism Value: A. thaliana
  misc_feature: MA Experiment 20000171 PARAMETER Experiment Name: At_42deg_Heat_P Parameter: Plant Line Value: WS
  misc_feature: MA Experiment 20000171 PARAMETER Experiment Name: At_42deg_Heat_P Parameter: Temperature (deg C) Value: 42 vs. 22
  misc_feature: MA Experiment 20000171 PARAMETER Experiment Name: At_42deg_Heat_P Parameter: Timepoint (hr) Value: 1
  misc_feature: MA Experiment 20000171 PARAMETER Experiment Name: At_42deg_Heat_P Parameter: Tissue Value: Aerial
  misc_feature: MA Experiment ID: 20000496 Result: Up-regulated in Transcription
  misc_feature: MA Experiment 20000496 PARAMETER Experiment Name: At_Guard_Cells_P Parameter: Harvest Date Value: 7/19/2002
  misc_feature: MA Experiment 20000496 PARAMETER Experiment Name: At_Guard_Cells_P Parameter: Organism Value: Canola
  misc_feature: MA Experiment 20000496 PARAMETER Experiment Name: At_Guard_Cells_P Parameter: Tissue Value: Guard Cells vs. Leaves
aaacaaaaaaaccattgaagaagatcggaggcgacgacggtgatgacgatggacagagaaaaggagagagaacttgagctcgagagtgcaatgtacacaaactgtttgcttttaggtttggatccgaatgtgatcggactcggagcctccaatggcacgcctcgggtcgggttatttcgccattcgaatccaaagctcggtgaacagcttctctacttcatcctctcttctcttcgtggccctgctcagtcttcaaaggattttgataaggtttggccaattttcgattcggctcaatctcgcgattttcgtaaggttgttcaagcgattataagcgagcttgaatcacaaggggcattaccaaggagtaattcgagggtttcatcactagccacttgctgtggaccaagatttgtggagctcttgtggcaactttcactgcatgcgttaagagaagttcataggcggacatttcctgctgatgtagcttccaatcctctaccttcttctctaactgacgtttctttctcacatgcagctactttgcttcctgtaaccaaggcccggatagtgcttgagcgccgtcggtttcttaaaaatgcagagactgcggtacaaagacaggccatgtggtctaatttagcccatgagatgactgcagagttccgtggtctctgtgctgaagaggcttaccttcaacaggaactagagaaacttaacgatttgagaaacaaagtgaagcaggaaggagaagtgtgggatgaccttgtgtctagctccagtcagaattctcatctagtttcaaaggcaactaggttatgggattctataatggctcgtaaaggtcagcatgaagttcttgcgtcaggtcccattgaggacttgatagctcacagggagcatagataccggatttcaggatcggccctacttgcagcgatggatcagagttctcaagttcctcgagcagaattactctctgcccactcagatgattcagcttcacttgcggatgacaaagaactaagtgatggatcgtacacaaacatgcatgaccactctttagtagatagttttgaaacagccagctcacaagcaagtgatgaaacactttctcgagtagatgatagaggtggaaagatcaatcagacagtcgatgtagcggaagtcataaggcgctggacacatgcattacagcgtattcataaacagtctcttcttctggctaaagcaaatgatggggatggtccagatattttgcggactgcgagtgatggtggtacaagtgggcatgttgaatcattggctgcaactttgactgaacatcaacaacatttagctagctttcaggttcttatcaaccaattaaaggaagtttctccagccatacaaaagtccatatcggaatgtactgagatggttaatagtcttcccccaaccttgcctccagttacgagaagtaatggacaagcatcttcacttctacaatctcagggcagtgggagaattatggaaggtgtatcaaatgatgttgctgagctgacctcgacaatgtctaatgttcagctcgagaaagtctcagctagtcctacattaaagcttccacagttatttagttccactcctacttcttctggtaaaggaggaaatggacaaaagcgacagacaatggcttcccaggtcaataaaatggaaagcttgtctgagaagaactctacagaccaagcactatcaaatgctcgaccagacaacttaccgactgatacaagcagttcttttgtccataacctgaagaaatctgtgagggaagcggctttattgattccttcttcagcaggctcatcacgggatagtcaatccgatgagggctccgagcattattttgtacctctttcagcaactggcttttcccgttttccatcagaaaccaaagccctgcctctcagagggtcgagagcacttacctctctgagcgagccttcgtttcttgaacccaatgttcccgatagctttgcaccaagcaagtacagcgatatacctgacacgtatgatgatcttgattcattcaaagattacgataatgggaacgggtttctgtcggttgctggatcaaacagtgtagcttctgatgcacaacaatcattttacgatattgatgatcaagtattttccccacctttactaatggactcatccctattatcagatgcctatgaagacttgttagctcctctttcagaaaccgaagccgctttaatggagcattaggaagaagccttgaatcattataacacttgtgtttcttcaacaattgttcttgggggaatttgaagcctgtgatcgatctctcggtctcacacaggtgtatcaattatttaccatttaacaaggctttcgtaatttatcttggatttgttggtaatgggactgactcttgatgaatgattcatgatatcactatttgtttgtgttgtgtcaagtgtgtgtgtaaaaagaaactcgagcttaggtagaagcattgctcact

SEQ ID NO: 49091 - protein, 741 aa, Arabidopsis thaliana
  peptide (1)..(741): Ceres Seq. ID no. 12578262
  misc_feature (243)..(700): Homolog of NCBI NO: 27469167 NR Description: streptococcal hemagglutinin protein
  misc_feature (244)..(700): Homolog of NCBI NO: 27469167 NR Description: streptococcal hemagglutinin protein
  misc_feature (242)..(700): Homolog of NCBI NO: 21284304 NR Description: ORFID:MW2575~hypothetical protein, similar to
  misc_feature (242)..(700): Homolog of NCBI NO: 15925644 NR Description: hypothetical protein [Staphylococcus aureus
  misc_feature (242)..(700): Homolog of NCBI NO: 18072158 NR Description: serine-threonine rich antigen [Staphylococcus
  misc_feature (300)..(740): Homolog of NCBI NO: 27469167 NR Description: streptococcal hemagglutinin protein
MTMDREKERELELESAMYTNCLLLGLDPNVIGLGASNGTPRVGLFRHSNPKLGEQLLYFILSSLRGPAQSSKDFDKVWPIFDSAQSRDFRKVVQAIISELESQGALPRSNSRVSSLATCCGPRFVELLWQLSLHALREVHRRTFPADVASNPLPSSLTDVSFSHAATLLPVTKARIVLERRRFLKNAETAVQRQAMWSNLAHEMTAEFRGLCAEEAYLQQELEKLNDLRNKVKQEGEVWDDLVSSSSQNSHLVSKATRLWDSIMARKGQHEVLASGPIEDLIAHREHRYRISGSALLAAMDQSSQVPRAELLSAHSDDSASLADDKELSDGSYTNMHDHSLVDSFETASSQASDETLSRVDDRGGKINQTVDVAEVIRRWTHALQRIHKQSLLLAKANDGDGPDILRTASDGGTSGHVESLAATLTEHQQHLASFQVLINQLKEVSPAIQKSISECTEMVNSLPPTLPPVTRSNGQASSLLQSQGSGRIMEGVSNDVAELTSTMSNVQLEKVSASPTLKLPQLFSSTPTSSGKGGNGQKRQTMASQVNKMESLSEKNSTDQALSNARPDNLPTDTSSSFVHNLKKSVREAALLIPSSAGSSRDSQSDEGSEHYFVPLSATGFSRFPSETKALPLRGSRALTSLSEPSFLEPNVPDSFAPSKYSDIPDTYDDLDSFKDYDNGNGFLSVAGSNSVASDAQQSFYDIDDQVFSPPLLMDSSLLSDAYEDLLAPLSETEAALMEH

SEQ ID NO: 49092 - protein, 739 aa, Arabidopsis thaliana
  peptide (1)..(739): Ceres Seq. ID no. 12578263
  misc_feature (241)..(698): Homolog of NCBI NO: 27469167 NR Description: streptococcal hemagglutinin protein
  misc_feature (242)..(698): Homolog of NCBI NO: 27469167 NR Description: streptococcal hemagglutinin protein
  misc_feature (240)..(698): Homolog of NCBI NO: 21284304 NR Description: ORFID:MW2575~hypothetical protein, similar to
  misc_feature (240)..(698): Homolog of NCBI NO: 15925644 NR Description: hypothetical protein [Staphylococcus aureus
  misc_feature (240)..(698): Homolog of NCBI NO: 18072158 NR Description: serine-threonine rich antigen [Staphylococcus
  misc_feature (298)..(738): Homolog of NCBI NO: 27469167 NR Description: streptococcal hemagglutinin protein
MDREKERELELESAMYTNCLLLGLDPNVIGLGASNGTPRVGLFRHSNPKLGEQLLYFILSSLRGPAQSSKDFDKVWPIFDSAQSRDFRKVVQAIISELESQGALPRSNSRVSSLATCCGPRFVELLWQLSLHALREVHRRTFPADVASNPLPSSLTDVSFSHAATLLPVTKARIVLERRRFLKNAETAVQRQAMWSNLAHEMTAEFRGLCAEEAYLQQELEKLNDLRNKVKQEGEVWDDLVSSSSQNSHLVSKATRLWDSIMARKGQHEVLASGPIEDLIAHREHRYRISGSALLAAMDQSSQVPRAELLSAHSDDSASLADDKELSDGSYTNMHDHSLVDSFETASSQASDETLSRVDDRGGKINQTVDVAEVIRRWTHALQRIHKQSLLLAKANDGDGPDILRTASDGGTSGHVESLAATLTEHQQHLASFQVLINQLKEVSPAIQKSISECTEMVNSLPPTLPPVTRSNGQASSLLQSQGSGRIMEGVSNDVAELTSTMSNVQLEKVSASPTLKLPQLFSSTPTSSGKGGNGQKRQTMASQVNKMESLSEKNSTDQALSNARPDNLPTDTSSSFVHNLKKSVREAALLIPSSAGSSRDSQSDEGSEHYFVPLSATGFSRFPSETKALPLRGSRALTSLSEPSFLEPNVPDSFAPSKYSDIPDTYDDLDSFKDYDNGNGFLSVAGSNSVASDAQQSFYDIDDQVFSPPLLMDSSLLSDAYEDLLAPLSETEAALMEH

SEQ ID NO: 49093 - protein, 725 aa, Arabidopsis thaliana
  peptide (1)..(725): Ceres Seq. ID no. 12578264
  misc_feature (227)..(684): Homolog of NCBI NO: 27469167 NR Description: streptococcal hemagglutinin protein
  misc_feature (228)..(684): Homolog of NCBI NO: 27469167 NR Description: streptococcal hemagglutinin protein
  misc_feature (226)..(684): Homolog of NCBI NO: 21284304 NR Description: ORFID:MW2575~hypothetical protein, similar to
  misc_feature (226)..(684): Homolog of NCBI NO: 15925644 NR Description: hypothetical protein [Staphylococcus aureus
  misc_feature (226)..(684): Homolog of NCBI NO: 18072158 NR Description: serine-threonine rich antigen [Staphylococcus
  misc_feature (284)..(724): Homolog of NCBI NO: 27469167 NR Description: streptococcal hemagglutinin protein
MYTNCLLLGLDPNVIGLGASNGTPRVGLFRHSNPKLGEQLLYFILSSLRGPAQSSKDFDKVWPIFDSAQSRDFRKVVQAIISELESQGALPRSNSRVSSLATCCGPRFVELLWQLSLHALREVHRRTFPADVASNPLPSSLTDVSFSHAATLLPVTKARIVLERRRFLKNAETAVQRQAMWSNLAHEMTAEFRGLCAEEAYLQQELEKLNDLRNKVKQEGEVWDDLVSSSSQNSHLVSKATRLWDSIMARKGQHEVLASGPIEDLIAHREHRYRISGSALLAAMDQSSQVPRAELLSAHSDDSASLADDKELSDGSYTNMHDHSLVDSFETASSQASDETLSRVDDRGGKINQTVDVAEVIRRWTHALQRIHKQSLLLAKANDGDGPDILRTASDGGTSGHVESLAATLTEHQQHLASFQVLINQLKEVSPAIQKSISECTEMVNSLPPTLPPVTRSNGQASSLLQSQGSGRIMEGVSNDVAELTSTMSNVQLEKVSASPTLKLPQLFSSTPTSSGKGGNGQKRQTMASQVNKMESLSEKNSTDQALSNARPDNLPTDTSSSFVHNLKKSVREAALLIPSSAGSSRDSQSDEGSEHYFVPLSATGFSRFPSETKALPLRGSRALTSLSEPSFLEPNVPDSFAPSKYSDIPDTYDDLDSFKDYDNGNGFLSVAGSNSVASDAQQSFYDIDDQVFSPPLLMDSSLLSDAYEDLLAPLSETEAALMEH

SEQ ID NO: 49094 - DNA, 2318 bp, Arabidopsis thaliana
  misc_feature (1)..(2318): Ceres Seq. ID no. 13579877
  misc_feature: MA Experiment ID: 20000306 Result: Up-regulated in Transcription
  misc_feature: MA Experiment 20000306 PARAMETER Experiment Name: At_Germinating_Seeds_Sub_P Parameter: Age (hr) Value: 6 vs. 0
  misc_feature: MA Experiment 20000306 PARAMETER Experiment Name: At_Germinating_Seeds_Sub_P Parameter: Organism Value: A. thaliana
  misc_feature: MA Experiment 20000306 PARAMETER Experiment Name: At_Germinating_Seeds_Sub_P Parameter: Plant Line Value: WS
  misc_feature: MA Experiment 20000306 PARAMETER Experiment Name: At_Germinating_Seeds_Sub_P Parameter: Tissue Value: Germinating Seeds
  misc_feature: MA Experiment ID: 20000307 Result: Up-regulated in Transcription
  misc_feature: MA Experiment 20000307 PARAMETER Experiment Name: At_Germinating_Seeds_Sub_P Parameter: Age (hr) Value: 24 vs. 0
  misc_feature: MA Experiment 20000307 PARAMETER Experiment Name: At_Germinating_Seeds_Sub_P Parameter: Organism Value: A. thaliana
  misc_feature: MA Experiment 20000307 PARAMETER Experiment Name: At_Germinating_Seeds_Sub_P Parameter: Plant Line Value: WS
  misc_feature: MA Experiment 20000307 PARAMETER Experiment Name: At_Germinating_Seeds_Sub_P Parameter: Tissue Value: Germinating Seeds
  misc_feature: MA Experiment ID: 20000315 Result: Down-regulated in Transcription
  misc_feature: MA Experiment 20000315 PARAMETER Experiment Name: At_14day_Shoots-Roots_Sub_P Parameter: Age (day) Value: 14
  misc_feature: MA Experiment 20000315 PARAMETER Experiment Name: At_14day_Shoots-Roots_Sub_P Parameter: Organism Value: A. thaliana
  misc_feature: MA Experiment 20000315 PARAMETER Experiment Name: At_14day_Shoots-Roots_Sub_P Parameter: Plant Line Value: WS
  misc_feature: MA Experiment 20000315 PARAMETER Experiment Name: At_14day_Shoots-Roots_Sub_P Parameter: Tissue Value: Shoots vs. Whole Plant
acggtcgtcttgtttggtctctgtttttcacgccggagatagagagagagaagtaaaaaagcgagaaaaagctagaaactttagaatacccaataatggatccgatcgaatctgtcgagtacaatggcttcgagacctctaacggtaacgtcgaccatggttggaagaaagtcgtgtacccgaaacgtcaccggaagcaaaaacaagcggatcaagcgacggcaaatggtggcaaaactgttgcttcaaatggaaccgtagctaacggcggagataacgttttccgttcgttggaagagcaagctgaggatcgtcgacgacggatcttagcggcgaagatgactgctattgattcagatgatgatggtgttgttagatctaaacatcgatctaatggttacggtgatgatgggtatgattttgatggtagtgatgatgagatcgcaacgctgaaggttgaggaagttaagaagccaaagcctaagaaggagaagaagcctaaagtttctttgcctgaagctgcatcaaagatcgatcctttaaatctcgaagcttttctcgttgaagcatcggaatcgtatgcgagtcagcctgagattcagctaatgagatttgctgattactttgggagagcactttctggagtctcatctgtgcaatttccatgggtgaagatgtttaaagagtctcctttgtctaagctgattgaagttccgttagctcatattccggaaccagtgtataagacatcagttgattggatcaaccatcgtccaattgaggcacttggagcctttgtgttgtgggcttttgattgtattctcacagatttagcagcacaacaaggtggtgctaaaggtgggaagaagggtggtcaacaaactacttccaaatctcaggtggcaatatttgttgcattagcgatggtattgcgtaggaagcctgatgctttgactaatgtattgccaactctgagggagaatcctaagtatcagggtcaggataagcttccggttacagtttggatgatggctcaggcctcccaaggtgatatagctgtaggcttgtattcatgggctcacaacttgttacctgttgtcggtaataagaactgtaaccctcagtcaagggatctcatcctgcagttggttgagaaaattttgacgaatccaaaggctcgtaccatacttgtaaatggagctgttaggaagggagagcgtttgattccacctccttcatttgagatcttgttgcggcttacattccctgcatcatctgcaagagtaaaggctacagagaggtttgaggcaatatatcccttgctgaaagaagtggctcttgctggtgcaccaggaagcaaggcgatgaaacaagtcacacaacagatattcacttttgctctgaaattagctggagaaggaaatcctgttttagccaaggaagctacagcaattgctatctggtctgtgacccaaaactttgattgctgcaagcactgggacaatctctacaaggagaatctggaagctagtgttgctgttcttaaaaagcttgttgaagaatggaaagagcattcggtcaaactatcatcatcaccgaatgatgctctcactctcaaccgaactatgaaaagcttcaggctaaagaacgaggaggtcatcactgagggaggagccaatgcttctctttacaaagaagctgacaagtcttgcaaaacgatctcggggagactctcccgtggaagtggctgcctcaaaggaacagccattactttagtgtttctagctgctgcaggagccgctgctgcagctgttctatcttccaacccggaggttacaaacgagctgaagaacctggtggactcattggagctgcatgaatacatcaacaaatacactgaggttatctccacagctttgaagaagtaagagaaaagaaacaatcaaaaacctgaggatgatatagagaggtaactcttaatatcatcggtgtagagaattacttaaaagttaaagccttttactctccaagatacaaaattttgaacatcttgaccagaacttaggggttatggaggtgaagagaataatgagagttttcgtttttataatcacagagtctgttcaaagttgttgaaggttttttttagactgtttaatttgtttctgagataatttatatttcttcttttttccctgatgacaataaagttatttctgtttattacatgtttgatttggatttctcttgaacataagtgtatgcacaagccattacattgtgttcatgtgaatgcagagtatatacatacagtctca

SEQ ID NO: 49095 - protein, 610 aa, Arabidopsis thaliana
  peptide (1)..(610): Ceres Seq. ID no. 13579878
  misc_feature (469)..(587): Homolog of NCBI NO: 25518112 NR Description: T26J12.6 protein - Arabidopsis thaliana
  misc_feature (135)..(577): Homolog of NCBI NO: 18399392 NR Description: expressed protein [Arabidopsis thaliana]
  misc_feature (119)..(577): Homolog of NCBI NO: 6671944 NR Description: unknown protein [Arabidopsis thaliana]
  misc_feature (21)..(594): Homolog of NCBI NO: 34895518 NR Description: unnamed protein product [Oryza sativa (japonica
  misc_feature (1)..(179): Homolog of NCBI NO: 25518112 NR Description: T26J12.6 protein - Arabidopsis thaliana
  misc_feature (203)..(433): Homolog of NCBI NO: 25518112 NR Description: T26J12.6 protein - Arabidopsis thaliana
  misc_feature (1)..(179): Homolog of NCBI NO: 15220663 NR Description: hypothetical protein [Arabidopsis thaliana]
  misc_feature (203)..(609): Homolog of NCBI NO: 15220663 NR Description: hypothetical protein [Arabidopsis thaliana]
MDPIESVEYNGFETSNGNVDHGWKKVVYPKRHRKQKQADQATANGGKTVASNGTVANGGDNVFRSLEEQAEDRRRRILAAKMTAIDSDDDGVVRSKHRSNGYGDDGYDFDGSDDEIATLKVEEVKKPKPKKEKKPKVSLPEAASKIDPLNLEAFLVEASESYASQPEIQLMRFADYFGRALSGVSSVQFPWVKMFKESPLSKLIEVPLAHIPEPVYKTSVDWINHRPIEALGAFVLWAFDCILTDLAAQQGGAKGGKKGGQQTTSKSQVAIFVALAMVLRRKPDALTNVLPTLRENPKYQGQDKLPVTVWMMAQASQGDIAVGLYSWAHNLLPVVGNKNCNPQSRDLILQLVEKILTNPKARTILVNGAVRKGERLIPPPSFEILLRLTFPASSARVKATERFEAIYPLLKEVALAGAPGSKAMKQVTQQIFTFALKLAGEGNPVLAKEATAIAIWSVTQNFDCCKHWDNLYKENLEASVAVLKKLVEEWKEHSVKLSSSPNDALTLNRTMKSFRLKNEEVITEGGANASLYKEADKSCKTISGRLSRGSGCLKGTAITLVFLAAAGAAAAAVLSSNPEVTNELKNLVDSLELHEYINKYTEVISTALKK

SEQ ID NO: 49096 - protein, 529 aa, Arabidopsis thaliana
  peptide (1)..(529): Ceres Seq. ID no. 13579879
  misc_feature (388)..(506): Homolog of NCBI NO: 25518112 NR Description: T26J12.6 protein - Arabidopsis thaliana
  misc_feature (54)..(496): Homolog of NCBI NO: 18399392 NR Description: expressed protein [Arabidopsis thaliana]
  misc_feature (38)..(496): Homolog of NCBI NO: 6671944 NR Description: unknown protein [Arabidopsis thaliana]
  misc_feature (1)..(513): Homolog of NCBI NO: 34895518 NR Description: unnamed protein product [Oryza sativa (japonica
  misc_feature (1)..(98): Homolog of NCBI NO: 25518112 NR Description: T26J12.6 protein - Arabidopsis thaliana
  misc_feature (122)..(352): Homolog of NCBI NO: 25518112 NR Description: T26J12.6 protein - Arabidopsis thaliana
  misc_feature (1)..(98): Homolog of NCBI NO: 15220663 NR Description: hypothetical protein [Arabidopsis thaliana]
  misc_feature (122)..(528): Homolog of NCBI NO: 15220663 NR Description: hypothetical protein [Arabidopsis thaliana]
MTAIDSDDDGVVRSKHRSNGYGDDGYDFDGSDDEIATLKVEEVKKPKPKKEKKPKVSLPEAASKIDPLNLEAFLVEASESYASQPEIQLMRFADYFGRALSGVSSVQFPWVKMFKESPLSKLIEVPLAHIPEPVYKTSVDWINHRPIEALGAFVLWAFDCILTDLAAQQGGAKGGKKGGQQTTSKSQVAIFVALAMVLRRKPDALTNVLPTLRENPKYQGQDKLPVTVWMMAQASQGDIAVGLYSWAHNLLPVVGNKNCNPQSRDLILQLVEKILTNPKARTILVNGAVRKGERLIPPPSFEILLRLTFPASSARVKATERFEAIYPLLKEVALAGAPGSKAMKQVTQQIFTFALKLAGEGNPVLAKEATAIAIWSVTQNFDCCKHWDNLYKENLEASVAVLKKLVEEWKEHSVKLSSSPNDALTLNRTMKSFRLKNEEVITEGGANASLYKEADKSCKTISGRLSRGSGCLKGTAITLVFLAAAGAAAAAVLSSNPEVTNELKNLVDSLELHEYINKYTEVISTALKK

SEQ ID NO: 49097 - protein, 440 aa, Arabidopsis thaliana
  peptide (1)..(440): Ceres Seq. ID no. 13579880
  misc_feature (299)..(417): Homolog of NCBI NO: 25518112 NR Description: T26J12.6 protein - Arabidopsis thaliana
  misc_feature (1)..(407): Homolog of NCBI NO: 18399392 NR Description: expressed protein [Arabidopsis thaliana]
  misc_feature (1)..(407): Homolog of NCBI NO: 6671944 NR Description: unknown protein [Arabidopsis thaliana]
  misc_feature (1)..(424): Homolog of NCBI NO: 34895518 NR Description: unnamed protein product [Oryza sativa (japonica
  misc_feature (33)..(263): Homolog of NCBI NO: 25518112 NR Description: T26J12.6 protein - Arabidopsis thaliana
  misc_feature (33)..(439): Homolog of NCBI NO: 15220663 NR Description: hypothetical protein [Arabidopsis thaliana]
MRFADYFGRALSGVSSVQFPWVKMFKESPLSKLIEVPLAHIPEPVYKTSVDWINHRPIEALGAFVLWAFDCILTDLAAQQGGAKGGKKGGQQTTSKSQVAIFVALAMVLRRKPDALTNVLPTLRENPKYQGQDKLPVTVWMMAQASQGDIAVGLYSWAHNLLPVVGNKNCNPQSRDLILQLVEKILTNPKARTILVNGAVRKGERLIPPPSFEILLRLTFPASSARVKATERFEAIYPLLKEVALAGAPGSKAMKQVTQQIFTFALKLAGEGNPVLAKEATAIAIWSVTQNFDCCKHWDNLYKENLEASVAVLKKLVEEWKEHSVKLSSSPNDALTLNRTMKSFRLKNEEVITEGGANASLYKEADKSCKTISGRLSRGSGCLKGTAITLVFLAAAGAAAAAVLSSNPEVTNELKNLVDSLELHEYINKYTEVISTALKK

SEQ ID NO: 49098 - DNA, 2036 bp, Arabidopsis thaliana; identical to SEQ ID NO: 47325
  misc_feature (1)..(2036): Ceres Seq. ID no. 13592107
  misc_feature: MA Experiment ID: 20000234 Result: Up-regulated in Transcription
  misc_feature: MA Experiment 20000234 PARAMETER Experiment Name: At_Siliques_P Parameter: Age (day) Value: 21
  misc_feature: MA Experiment 20000234 PARAMETER Experiment Name: At_Siliques_P Parameter: Organism Value: A. thaliana
  misc_feature: MA Experiment 20000234 PARAMETER Experiment Name: At_Siliques_P Parameter: Plant Line Value: WS
  misc_feature: MA Experiment 20000234 PARAMETER Experiment Name: At_Siliques_P Parameter: Tissue Value: Less Than 5mm Siliques vs. Whole Plant
  misc_feature: MA Experiment ID: 20000496 Result: Up-regulated in Transcription
  misc_feature: MA Experiment 20000496 PARAMETER Experiment Name: At_Guard_Cells_P Parameter: Harvest Date Value: 7/19/2002
  misc_feature: MA Experiment 20000496 PARAMETER Experiment Name: At_Guard_Cells_P Parameter: Organism Value: Canola
  misc_feature: MA Experiment 20000496 PARAMETER Experiment Name: At_Guard_Cells_P Parameter: Tissue Value: Guard Cells vs. Leaves

SEQ ID NO: 49099 - protein, 626 aa, Arabidopsis thaliana; identical to SEQ ID NO: 47326
  peptide (1)..(626): Ceres Seq. ID no. 13592108
  misc_feature (38)..(468): Pfam Name: Ribophorin I Pfam Description: Ribophorin I
  misc_feature (38)..(468): Pfam Name: Ribophorin I Pfam Description: Ribophorin I
  misc_feature (24)..(611): Homolog of NCBI NO: 39593466 NR Description: Hypothetical protein CBG05717 [Caenorhabditis
  misc_feature (25)..(620): Homolog of NCBI NO: 40674542 NR Description: Unknown (protein for MGC:76266) [Silurana
  misc_feature (15)..(620): Homolog of NCBI NO: 28175644 NR Description: Similar to ribophorin I [Xenopus laevis]
  misc_feature (15)..(620): Homolog of NCBI NO: 28277278 NR Description: Similar to ribophorin I [Xenopus laevis]
  misc_feature (21)..(620): Homolog of NCBI NO: 6981486 NR Description: ribophorin I [Rattus norvegicus]
  misc_feature (24)..(611): Homolog of NCBI NO: 39593466 NR Description: Hypothetical protein CBG05717 [Caenorhabditis
  misc_feature (15)..(620): Homolog of NCBI NO: 28175644 NR Description: Similar to ribophorin I [Xenopus laevis]
  misc_feature (21)..(620): Homolog of NCBI NO: 6981486 NR Description: ribophorin I [Rattus norvegicus]
  misc_feature (22)..(488): Homolog of NCBI NO: 7489438 NR Description: ribophorin I homolog - barley (fragment)
  misc_feature (19)..(473): Homolog of NCBI NO: 15226341 NR Description: ribophorin I -related [Arabidopsis thaliana]
  misc_feature (362)..(626): Homolog of NCBI NO: 5918187 NR Description: ribophorin I [Hordeum vulgare]
  misc_feature (15)..(620): Homolog of NCBI NO: 38512106 NR Description: Ribophorin I [Rattus norvegicus]
  misc_feature (18)..(620): Homolog of NCBI NO: 9857227 NR Description: ribophorin I [Sus scrofa]
  misc_feature (15)..(620): Homolog of NCBI NO: 28277278 NR Description: Similar to ribophorin I [Xenopus laevis]
  misc_feature (25)..(620): Homolog of NCBI NO: 40674542 NR Description: Unknown (protein for MGC:76266) [Silurana
  misc_feature (18)..(620): Homolog of NCBI NO: 9857227 NR Description: ribophorin I [Sus scrofa]
  misc_feature (15)..(620): Homolog of NCBI NO: 38512106 NR Description: Ribophorin I [Rattus norvegicus]
  misc_feature (362)..(626): Homolog of NCBI NO: 5918187 NR Description: ribophorin I [Hordeum vulgare]
  misc_feature (19)..(473): Homolog of NCBI NO: 15226341 NR Description: ribophorin I -related [Arabidopsis thaliana]
  misc_feature (22)..(488): Homolog of NCBI NO: 7489438 NR Description: ribophorin I homolog - barley (fragment)

SEQ ID NO: 49100 - protein, 614 aa, Arabidopsis thaliana; identical to SEQ ID NO: 47327
  peptide (1)..(614): Ceres Seq. ID no. 13592109
  misc_feature (26)..(456): Pfam Name: Ribophorin I Pfam Description: Ribophorin I
  misc_feature (26)..(456): Pfam Name: Ribophorin I Pfam Description: Ribophorin I
  misc_feature (12)..(599): Homolog of NCBI NO: 39593466 NR Description: Hypothetical protein CBG05717 [Caenorhabditis
  misc_feature (13)..(608): Homolog of NCBI NO: 40674542 NR Description: Unknown (protein for MGC:76266) [Silurana
  misc_feature (3)..(608): Homolog of NCBI NO: 28175644 NR Description: Similar to ribophorin I [Xenopus laevis]
  misc_feature (3)..(608): Homolog of NCBI NO: 28277278 NR Description: Similar to ribophorin I [Xenopus laevis]
  misc_feature (9)..(608): Homolog of NCBI NO: 6981486 NR Description: ribophorin I [Rattus norvegicus]
  misc_feature (12)..(599): Homolog of NCBI NO: 39593466 NR Description: Hypothetical protein CBG05717 [Caenorhabditis
  misc_feature (3)..(608): Homolog of NCBI NO: 28175644 NR Description: Similar to ribophorin I [Xenopus laevis]
  misc_feature (9)..(608): Homolog of NCBI NO: 6981486 NR Description: ribophorin I [Rattus norvegicus]
  misc_feature (10)..(476): Homolog of NCBI NO: 7489438 NR Description: ribophorin I homolog - barley (fragment)
  misc_feature (7)..(461): Homolog of NCBI NO: 15226341 NR Description: ribophorin I -related [Arabidopsis thaliana]
  misc_feature (350)..(614): Homolog of NCBI NO: 5918187 NR Description: ribophorin I [Hordeum vulgare]
  misc_feature (3)..(608): Homolog of NCBI NO: 38512106 NR Description: Ribophorin I [Rattus norvegicus]
  misc_feature (6)..(608): Homolog of NCBI NO: 9857227 NR Description: ribophorin I [Sus scrofa]
  misc_feature (3)..(608): Homolog of NCBI NO: 28277278 NR Description: Similar to ribophorin I [Xenopus laevis]
  misc_feature (13)..(608): Homolog of NCBI NO: 40674542 NR Description: Unknown (protein for MGC:76266) [Silurana
  misc_feature (6)..(608): Homolog of NCBI NO: 9857227 NR Description: ribophorin I [Sus scrofa]
  misc_feature (3)..(608): Homolog of NCBI NO: 38512106 NR Description: Ribophorin I [Rattus norvegicus]
  misc_feature (350)..(614): Homolog of NCBI NO: 5918187 NR Description: ribophorin I [Hordeum vulgare]
  misc_feature (7)..(461): Homolog of NCBI NO: 15226341 NR Description: ribophorin I -related [Arabidopsis thaliana]
  misc_feature (10)..(476): Homolog of NCBI NO: 7489438 NR Description: ribophorin I homolog - barley (fragment)

SEQ ID NO: 49101 - protein, 461 aa, Arabidopsis thaliana; identical to SEQ ID NO: 47328
  peptide (1)..(461): Ceres Seq. ID no. 13592110
  misc_feature (1)..(303): Pfam Name: Ribophorin I Pfam Description: Ribophorin I
  misc_feature (1)..(303): Pfam Name: Ribophorin I Pfam Description: Ribophorin I
  misc_feature (1)..(446): Homolog of NCBI NO: 39593466 NR Description: Hypothetical protein CBG05717 [Caenorhabditis
  misc_feature (1)..(455): Homolog of NCBI NO: 40674542 NR Description: Unknown (protein for MGC:76266) [Silurana
  misc_feature (1)..(455): Homolog of NCBI NO: 28175644 NR Description: Similar to ribophorin I [Xenopus laevis]
  misc_feature (1)..(455): Homolog of NCBI NO: 28277278 NR Description: Similar to ribophorin I [Xenopus laevis]
  misc_feature (1)..(455): Homolog of NCBI NO: 6981486 NR Description: ribophorin I [Rattus norvegicus]
  misc_feature (1)..(446): Homolog of NCBI NO: 39593466 NR Description: Hypothetical protein CBG05717 [Caenorhabditis
  misc_feature (1)..(455): Homolog of NCBI NO: 28175644 NR Description: Similar to ribophorin I [Xenopus laevis]
  misc_feature (1)..(455): Homolog of NCBI NO: 6981486 NR Description: ribophorin I [Rattus norvegicus]
  misc_feature (1)..(323): Homolog of NCBI NO: 7489438 NR Description: ribophorin I homolog - barley (fragment)
  misc_feature (1)..(308): Homolog of NCBI NO: 15226341 NR Description: ribophorin I -related [Arabidopsis thaliana]
  misc_feature (197)..(461): Homolog of NCBI NO: 5918187 NR Description: ribophorin I [Hordeum vulgare]
  misc_feature (1)..(455): Homolog of NCBI NO: 38512106 NR Description: Ribophorin I [Rattus norvegicus]
  misc_feature (1)..(455): Homolog of NCBI NO: 9857227 NR Description: ribophorin I [Sus scrofa]
  misc_feature (1)..(455): Homolog of NCBI NO: 28277278 NR Description: Similar to ribophorin I [Xenopus laevis]
  misc_feature (1)..(455): Homolog of NCBI NO: 40674542 NR Description: Unknown (protein for MGC:76266) [Silurana
  misc_feature (1)..(455): Homolog of NCBI NO: 9857227 NR Description: ribophorin I [Sus scrofa]
  misc_feature (1)..(455): Homolog of NCBI NO: 38512106 NR Description: Ribophorin I [Rattus norvegicus]
  misc_feature (197)..(461): Homolog of NCBI NO: 5918187 NR Description: ribophorin I [Hordeum vulgare]
  misc_feature (1)..(308): Homolog of NCBI NO: 15226341 NR Description: ribophorin I -related [Arabidopsis thaliana]
  misc_feature (1)..(323): Homolog of NCBI NO: 7489438 NR Description: ribophorin I homolog - barley (fragment)

SEQ ID NO: 49102 - DNA, 989 bp, Arabidopsis thaliana
  misc_feature (1)..(989): Ceres Seq. ID no. 13579814
  misc_feature: MA Experiment ID: 20000180 Result: Up-regulated in Transcription
  misc_feature: MA Experiment 20000180 PARAMETER Experiment Name: At_Germinating_Seeds_P Parameter: Age (hr) Value: 24 vs. 0
  misc_feature: MA Experiment 20000180 PARAMETER Experiment Name: At_Germinating_Seeds_P Parameter: Tissue Value: Germinating Seeds
  misc_feature: MA Experiment ID: 20000495 Result: Up-regulated in Transcription
  misc_feature: MA Experiment 20000495 PARAMETER Experiment Name: At_Guard_Cells_P Parameter: Harvest Date Value: 8/2/2002
  misc_feature: MA Experiment 20000495 PARAMETER Experiment Name: At_Guard_Cells_P Parameter: Organism Value: A. thaliana
  misc_feature: MA Experiment 20000495 PARAMETER Experiment Name: At_Guard_Cells_P Parameter: Tissue Value: Guard Cells vs. Leaves
  misc_feature: MA Experiment ID: 20000496 Result: Up-regulated in Transcription
  misc_feature: MA Experiment 20000496 PARAMETER Experiment Name: At_Guard_Cells_P Parameter: Harvest Date Value: 7/19/2002
  misc_feature: MA Experiment 20000496 PARAMETER Experiment Name: At_Guard_Cells_P Parameter: Organism Value: Canola
  misc_feature: MA Experiment 20000496 PARAMETER Experiment Name: At_Guard_Cells_P Parameter: Tissue Value: Guard Cells vs. Leaves
  misc_feature: MA Experiment ID: 20001451 Result: Up-regulated in Transcription
  misc_feature: MA Experiment 20001451 PARAMETER Experiment Name: At_Far-red-induction_P Parameter: Age (day) Value: 7
  misc_feature: MA Experiment 20001451 PARAMETER Experiment Name: At_Far-red-induction_P Parameter: Light Value: Far-red vs. White
  misc_feature: MA Experiment 20001451 PARAMETER Experiment Name: At_Far-red-induction_P Parameter: Organism Value: A. thaliana
  misc_feature: MA Experiment 20001451 PARAMETER Experiment Name: At_Far-red-induction_P Parameter: Plant Line Value: Columbia
  misc_feature: MA Experiment 20001451 PARAMETER Experiment Name: At_Far-red-induction_P Parameter: Timepoint (hr) Value: 24
  misc_feature: MA Experiment 20001451 PARAMETER Experiment Name: At_Far-red-induction_P Parameter: Tissue Value: Whole Plant
  misc_feature: MA Experiment ID: 20001557 Result: Down-regulated in Transcription
  misc_feature: MA Experiment 20001557 PARAMETER Experiment Name: At_Drought_Soil_Dry_P Parameter: Age (day) Value: 27
  misc_feature: MA Experiment 20001557 PARAMETER Experiment Name: At_Drought_Soil_Dry_P Parameter: Organism Value: A. thaliana
  misc_feature: MA Experiment 20001557 PARAMETER Experiment Name: At_Drought_Soil_Dry_P Parameter: Plant Line Value: WS
  misc_feature: MA Experiment 20001557 PARAMETER Experiment Name: At_Drought_Soil_Dry_P Parameter: Post Timepoint (hr) Value: 3
  misc_feature: MA Experiment 20001557 PARAMETER Experiment Name: At_Drought_Soil_Dry_P Parameter: Post-Treatment Value: Re-Water vs. No Drought
  misc_feature: MA Experiment 20001557 PARAMETER Experiment Name: At_Drought_Soil_Dry_P Parameter: Timepoint (day) Value: 13
  misc_feature: MA Experiment 20001557 PARAMETER Experiment Name: At_Drought_Soil_Dry_P Parameter: Treatment Value: Drought vs. No Drought
atctccgctctctttctctctcgaacttcctctgaaaactaaggctcttgctcttgctttctcgccgtcgtctgagtcgttagcagtacggtgatcggaaaaatgagtaagaaatcgacagaatctgacgctggcaatactgagaagcaatggtccctggcagatttcgagatcgggagaccacttggaaaaggcaaatttggcagagtctatctcgcccgagaagccaagagcaagtacatagtggcgctgaaagtcatattcaaggaacagatagagaagtataaaattcatcatcagcttaggagagaaatggagatccaaacgagtttaaggcacccaaatatcttgcgtctttttggttggttccatgacaatgagaggattttcttgattctcgagtatgctcatggtggtgagctctatggtgtgctcaaacagaatggtcatcttactgaacaacaagccgccacttacattgcaagtctcagtcaggcactggcctattgtcatggcaaatgtgtgattcatagagacatcaaacctgaaaatttgttgctcgatcatgaggggagattgaaaattgctgactttggatggtcagttcagtcaagtaacaagaggaaaaccatgtgtggaaccttggattacttagcacctgagatggtagaaaatagagatcatgattatgcagttgataactggaccttaggcatactgtgttacgagtttctctacggtaaccctccattcgaagccgagagtcaaaaagatacattcaagagaattcttaagattgatctgagttttcctcttacaccgaatgtttcagaagaagccaaaaatcttatcagtcagcttcttgttaaggatccctccaaacgactctctattgagaagatcatgcaacatccatggattgtcaagaacgcagatccgaaaggtgtgtgtgcctcaattgatatttgatgtattctctcccaattctc

SEQ ID NO: 49103 - protein, 288 aa, Arabidopsis thaliana
  peptide (1)..(288): Ceres Seq. ID no. 13579815
  misc_feature (22)..(273): Pfam Name: Protein kinase domain Pfam Description: Protein kinase domain
  misc_feature (5)..(283): Homolog of NCBI NO: 30749504 NR Description: Chain A, Crystal Structure Of Aurora-2, An
  misc_feature (5)..(283): Homolog of NCBI NO: 27923855 NR Description: Serine/threonine kinase 6 (Serine/threonine
  misc_feature (14)..(280): Homolog of NCBI NO: 27923859 NR Description: Serine/threonine protein kinase Eg2-like
  misc_feature (14)..(280): Homolog of NCBI NO: 1079309 NR Description: protein kinase (EC 2.7.1.-) p46XlEg22 - African
  misc_feature (1)..(280): Homolog of NCBI NO: 27923860 NR Description: Serine/threonine protein kinase Eg2 (pEg2)
  misc_feature (15)..(282): Homolog of NCBI NO: 34906424 NR Description: putative protein kinase [Oryza sativa (japonica
  misc_feature (14)..(282): Homolog of NCBI NO: 15225210 NR Description: serine/threonine protein kinase, putative
  misc_feature (3)..(282): Homolog of NCBI NO: 21592557 NR Description: putative serine/threonine protein kinase
  misc_feature (3)..(282): Homolog of NCBI NO: 15233958 NR Description: protein kinase, putative [Arabidopsis thaliana]
  misc_feature (1)..(288): Homolog of NCBI NO: 15225495 NR Description: protein kinase, putative [Arabidopsis thaliana]
MSKKSTESDAGNTEKQWSLADFEIGRPLGKGKFGRVYLAREAKSKYIVALKVIFKEQIEKYKIHHQLRREMEIQTSLRHPNILRLFGWFHDNERIFLILEYAHGGELYGVLKQNGHLTEQQAATYIASLSQALAYCHGKCVIHRDIKPENLLLDHEGRLKIADFGWSVQSSNKRKTMCGTLDYLAPEMVENRDHDYAVDNWTLGILCYEFLYGNPPFEAESQKDTFKRILKIDLSFPLTPNVSEEAKNLISQLLVKDPSKRLSIEKIMQHPWIVKNADPKGVCASIDI

SEQ ID NO: 49104 - protein, 218 aa, Arabidopsis thaliana
  peptide (1)..(218): Ceres Seq. ID no. 13579816
  misc_feature (1)..(203): Pfam Name: Protein kinase domain Pfam Description: Protein kinase domain
  misc_feature (1)..(213): Homolog of NCBI NO: 30584951 NR Description: Homo sapiens serine/threonine kinase 6 [synthetic
  misc_feature (1)..(213): Homolog of NCBI NO: 27923855 NR Description: Serine/threonine kinase 6 (Serine/threonine
  misc_feature (1)..(210): Homolog of NCBI NO: 27923859 NR Description: Serine/threonine protein kinase Eg2-like
  misc_feature (1)..(210): Homolog of NCBI NO: 1079309 NR Description: protein kinase (EC 2.7.1.-) p46XlEg22 - African
  misc_feature (1)..(210): Homolog of NCBI NO: 27923860 NR Description: Serine/threonine protein kinase Eg2 (pEg2)
  misc_feature (1)..(212): Homolog of NCBI NO: 34906424 NR Description: putative protein kinase [Oryza sativa (japonica
  misc_feature (1)..(212): Homolog of NCBI NO: 15225210 NR Description: serine/threonine protein kinase, putative
  misc_feature (1)..(212): Homolog of NCBI NO: 21592557 NR Description: putative serine/threonine protein kinase
  misc_feature (1)..(212): Homolog of NCBI NO: 15233958 NR Description: protein kinase, putative [Arabidopsis thaliana]
  misc_feature (1)..(218): Homolog of NCBI NO: 15225495 NR Description: protein kinase, putative [Arabidopsis thaliana]
MEIQTSLRHPNILRLFGWFHDNERIFLILEYAHGGELYGVLKQNGHLTEQQAATYIASLSQALAYCHGKCVIHRDIKPENLLLDHEGRLKIADFGWSVQSSNKRKTMCGTLDYLAPEMVENRDHDYAVDNWTLGILCYEFLYGNPPFEAESQKDTFKRILKIDLSFPLTPNVSEEAKNLISQLLVKDPSKRLSIEKIMQHPWIVKNADPKGVCASIDI

SEQ ID NO: 49105 - DNA, 818 bp, Arabidopsis thaliana
  misc_feature (1)..(818): Ceres Seq. ID no. 13592088
  misc_feature: MA Experiment ID: 20000286 Result: Down-regulated in Transcription
  misc_feature: MA Experiment 20000286 PARAMETER Experiment Name: At_Open_Flower_P Parameter: Age (day) Value: 21
  misc_feature: MA Experiment 20000286 PARAMETER Experiment Name: At_Open_Flower_P Parameter: Plant Line Value: WS
  misc_feature: MA Experiment 20000286 PARAMETER Experiment Name: At_Open_Flower_P Parameter: Tissue Value: Half Open vs. Whole Plant
  misc_feature: MA Experiment ID: 20000794 Result: Down-regulated in Transcription
  misc_feature: MA Experiment 20000794 PARAMETER Experiment Name: At_Petals_P Parameter: Age (day) Value: 23-25 days
  misc_feature: MA Experiment 20000794 PARAMETER Experiment Name: At_Petals_P Parameter: Plant Line Value: WS
  misc_feature: MA Experiment 20000794 PARAMETER Experiment Name: At_Petals_P Parameter: Tissue Value: Petals vs. Whole plant
  misc_feature: MA Experiment ID: 20001557 Result: Up-regulated in Transcription
  misc_feature: MA Experiment 20001557 PARAMETER Experiment Name: At_Drought_Soil_Dry_P Parameter: Age (day) Value: 27
  misc_feature: MA Experiment 20001557 PARAMETER Experiment Name: At_Drought_Soil_Dry_P Parameter: Organism Value: A. thaliana
  misc_feature: MA Experiment 20001557 PARAMETER Experiment Name: At_Drought_Soil_Dry_P Parameter: Plant Line Value: WS
  misc_feature: MA Experiment 20001557 PARAMETER Experiment Name: At_Drought_Soil_Dry_P Parameter: Post Timepoint (hr) Value: 3
  misc_feature: MA Experiment 20001557 PARAMETER Experiment Name: At_Drought_Soil_Dry_P Parameter: Post-Treatment Value: Re-Water vs. No Drought
  misc_feature: MA Experiment 20001557 PARAMETER Experiment Name: At_Drought_Soil_Dry_P Parameter: Timepoint (day) Value: 13
  misc_feature: MA Experiment 20001557 PARAMETER Experiment Name: At_Drought_Soil_Dry_P Parameter: Treatment Value: Drought vs. No Drought
  misc_feature: MA Experiment ID: 20001558 Result: Up-regulated in Transcription
  misc_feature: MA Experiment 20001558 PARAMETER Experiment Name: At_Drought_Soil_Dry_P Parameter: Age (day) Value: 27
  misc_feature: MA Experiment 20001558 PARAMETER Experiment Name: At_Drought_Soil_Dry_P Parameter: Organism Value: A. thaliana
  misc_feature: MA Experiment 20001558 PARAMETER Experiment Name: At_Drought_Soil_Dry_P Parameter: Plant Line Value: WS
  misc_feature: MA Experiment 20001558 PARAMETER Experiment Name: At_Drought_Soil_Dry_P Parameter: Post Timepoint (hr) Value: 6
  misc_feature: MA Experiment 20001558 PARAMETER Experiment Name: At_Drought_Soil_Dry_P Parameter: Post-Treatment Value: Re-Water vs. No Drought
  misc_feature: MA Experiment 20001558 PARAMETER Experiment Name: At_Drought_Soil_Dry_P Parameter: Timepoint (day) Value: 13
  misc_feature: MA Experiment 20001558 PARAMETER Experiment Name: At_Drought_Soil_Dry_P Parameter: Treatment Value: Drought vs. No Drought
  misc_feature: MA Experiment ID: 20001560 Result: Up-regulated in Transcription
  misc_feature: MA Experiment 20001560 PARAMETER Experiment Name: At_Drought_Soil_Dry_P Parameter: Age (day) Value: 28
  misc_feature: MA Experiment 20001560 PARAMETER Experiment Name: At_Drought_Soil_Dry_P Parameter: Organism Value: A. thaliana
  misc_feature: MA Experiment 20001560 PARAMETER Experiment Name: At_Drought_Soil_Dry_P Parameter: Plant Line Value: WS
  misc_feature: MA Experiment 20001560 PARAMETER Experiment Name: At_Drought_Soil_Dry_P Parameter: Post Timepoint (hr) Value: None
  misc_feature: MA Experiment 20001560 PARAMETER Experiment Name: At_Drought_Soil_Dry_P Parameter: Post-Treatment Value: None
  misc_feature: MA Experiment 20001560 PARAMETER Experiment Name: At_Drought_Soil_Dry_P Parameter: Timepoint (day) Value: 14
  misc_feature: MA Experiment 20001560 PARAMETER Experiment Name: At_Drought_Soil_Dry_P Parameter: Treatment Value: Drought vs. No Drought
  misc_feature: MA Experiment ID: 20001757 Result: Up-regulated in Transcription
  misc_feature: MA Experiment 20001757 PARAMETER Experiment Name: At_50mM_NH4NO3_L-to-H_P Parameter: Timepoint (hr) Value: 6
  misc_feature: MA Experiment 20001757 PARAMETER Experiment Name: At_50mM_NH4NO3_L-to-H_P Parameter: Tissue Value: Leaf
  misc_feature: MA Experiment 20001757 PARAMETER Experiment Name: At_50mM_NH4NO3_L-to-H_P Parameter: Treatment Value: 50mM NH4NO3 vs 100mM Mannitol
gaaaagtggcggcttcatcgaaattagggtttcgcgttaggagaagaagttaaagcaaaacacatacaaacgcagtcaccttctctatcgcctccttcttcaatctcatcgcaatcatgatcatatcagagactaaccgccgtgagatctccaagtacctcttcaaagagggtgttttgtttgctaaaaaggatttcaacttaccacaacatcctttgattgagagtgttccaaatctgcaagttatcaagttgatgcagagtttcaaatctaaggaatatgtgagagagacctttgcttggatgcattactactggttcctcacaaatgaaggtattgactttctcaggacttaccttaatctcccatctgagattgttcctgctactttgaagaagcaacagaagcctcttggtcgaccttttggaggtggtggtgaccgtccccgtggccctcctcgtggtgatggagagaggaggtttggtgacagagatggataccgtggaggtcctaaatcaggtggagagtatggtgacaaggctggagcacctgctgattaccagcctggcttcaggggtggagctggtggagctaggcaagggtttggtcgtggagctggtggtttcggtggtggtgctgctggatctgatcttccttgaaaaggactttcttgtttctttttggtcttatttaaggttacatagtacctttgatttgagaacgaatgtgtcttttggaactttgtttctttctctaaaaccatctcacaatatgattgttttttacgttagaattttatgaagaaatgttggatcgtt

SEQ ID NO: 49106 - protein, 180 aa, Arabidopsis thaliana
  peptide (1)..(180): Ceres Seq. ID no. 13592089
  misc_feature (3)..(99): Pfam Name: Plectin/S10 domain Pfam Description: Plectin/S10 domain
  misc_feature (1)..(160): Homolog of NCBI NO: 24266976 NR Description: ribosomal protein S10 [Branchiostoma belcheri]
  misc_feature (1)..(161): Homolog of NCBI NO: 20139984 NR Description: 40S ribosomal protein S10
  misc_feature (1)..(160): Homolog of NCBI NO: 40642980 NR Description: ribosomal protein S10 [Crassostrea gigas]
  misc_feature (1)..(179): Homolog of NCBI NO: 20140213 NR Description: 40S ribosomal protein S10
  misc_feature (1)..(179): Homolog of NCBI NO: 34897532 NR Description: OSJNBa0042L16.3 [Oryza sativa (japonica
  misc_feature (1)..(178): Homolog of NCBI NO: 34905824 NR Description: putative ribosomal protein S10
  misc_feature (1)..(180): Homolog of NCBI NO: 15237217 NR Description: 40S ribosomal protein S10 (RPS10C) [Arabidopsis
  misc_feature (1)..(180): Homolog of NCBI NO: 20139798 NR Description: 40S ribosomal protein S10-3
  misc_feature (1)..(180): Homolog of NCBI NO: 15235985 NR Description: 40S ribosomal protein S10 (RPS10A) [Arabidopsis
  misc_feature (1)..(180): Homolog of NCBI NO: 15238099 NR Description: expressed protein [Arabidopsis thaliana]
MIISETNRREISKYLFKEGVLFAKKDFNLPQHPLIESVPNLQVIKLMQSFKSKEYVRETFAWMHYYWFLTNEGIDFLRTYLNLPSEIVPATLKKQQKPLGRPFGGGGDRPRGPPRGDGERRFGDRDGYRGGPKSGGEYGDKAGAPADYQPGFRGGAGGARQGFGRGAGGFGGGAAGSDLP

SEQ ID NO: 49107 - protein, 134 aa, Arabidopsis thaliana
  peptide (1)..(134): Ceres Seq. ID no. 13592090
  misc_feature (1)..(53): Pfam Name: Plectin/S10 domain Pfam Description: Plectin/S10 domain
  misc_feature (1)..(114): Homolog of NCBI NO: 24266976 NR Description: ribosomal protein S10 [Branchiostoma belcheri]
  misc_feature (1)..(115): Homolog of NCBI NO: 20139984 NR Description: 40S ribosomal protein S10
  misc_feature (1)..(114): Homolog of NCBI NO: 40642980 NR Description: ribosomal protein S10 [Crassostrea gigas]
  misc_feature (1)..(133): Homolog of NCBI NO: 20140213 NR Description: 40S ribosomal protein S10
  misc_feature (1)..(133): Homolog of NCBI NO: 34897532 NR Description: OSJNBa0042L16.3 [Oryza sativa (japonica
  misc_feature (1)..(132): Homolog of NCBI NO: 34905824 NR Description: putative ribosomal protein S10
  misc_feature (1)..(134): Homolog of NCBI NO: 15237217 NR Description: 40S ribosomal protein S10 (RPS10C) [Arabidopsis
  misc_feature (1)..(134): Homolog of NCBI NO: 20139798 NR Description: 40S ribosomal protein S10-3
  misc_feature (1)..(134): Homolog of NCBI NO: 15235985 NR Description: 40S ribosomal protein S10 (RPS10A) [Arabidopsis
  misc_feature (1)..(134): Homolog of NCBI NO: 15238099 NR Description: expressed protein [Arabidopsis thaliana]
MQSFKSKEYVRETFAWMHYYWFLTNEGIDFLRTYLNLPSEIVPATLKKQQKPLGRPFGGGGDRPRGPPRGDGERRFGDRDGYRGGPKSGGEYGDKAGAPADYQPGFRGGAGGARQGFGRGAGGFGGGAAGSDLP

SEQ ID NO: 49108 - protein, 118 aa, Arabidopsis thaliana
  peptide (1)..(118): Ceres Seq. ID no. 13592091
  misc_feature (1)..(98): Homolog of NCBI NO: 24266976 NR Description: ribosomal protein S10 [Branchiostoma belcheri]
  misc_feature (1)..(99): Homolog of NCBI NO: 20139984 NR Description: 40S ribosomal protein S10
  misc_feature (1)..(98): Homolog of NCBI NO: 40642980 NR Description: ribosomal protein S10 [Crassostrea gigas]
  misc_feature (1)..(117): Homolog of NCBI NO: 20140213 NR Description: 40S ribosomal protein S10
  misc_feature (1)..(117): Homolog of NCBI NO: 34897532 NR Description: OSJNBa0042L16.3 [Oryza sativa (japonica
  misc_feature (1)..(116): Homolog of NCBI NO: 34905824 NR Description: putative ribosomal protein S10
  misc_feature (1)..(118): Homolog of NCBI NO: 15237217 NR Description: 40S ribosomal protein S10 (RPS10C) [Arabidopsis
  misc_feature (1)..(118): Homolog of NCBI NO: 20139798 NR Description: 40S ribosomal protein S10-3
  misc_feature (1)..(118): Homolog of NCBI NO: 15235985 NR Description: 40S ribosomal protein S10 (RPS10A) [Arabidopsis
  misc_feature (1)..(118): Homolog of NCBI NO: 15238099 NR Description: expressed protein [Arabidopsis thaliana]
MHYYWFLTNEGIDFLRTYLNLPSEIVPATLKKQQKPLGRPFGGGGDRPRGPPRGDGERRFGDRDGYRGGPKSGGEYGDKAGAPADYQPGFRGGAGGARQGFGRGAGGFGGGAAGSDLP

SEQ ID NO: 49109 - DNA, 1571 bp, Arabidopsis thaliana; identical to SEQ ID NO: 44608
  misc_feature (1)..(1571): Ceres Seq. ID no. 12488514
  misc_feature: MA Experiment ID: 20000180 Result: Down-regulated in Transcription
  misc_feature: MA Experiment 20000180 PARAMETER Experiment Name: At_Germinating_Seeds_P Parameter: Age (hr) Value: 24 vs. 0
  misc_feature: MA Experiment 20000180 PARAMETER Experiment Name: At_Germinating_Seeds_P Parameter: Tissue Value: Germinating Seeds
  misc_feature: MA Experiment ID: 20000460 Result: Up-regulated in Transcription
  misc_feature: MA Experiment 20000460 PARAMETER Experiment Name: At_10percent_PEG_P Parameter: Age (day) Value: 12
  misc_feature: MA Experiment 20000460 PARAMETER Experiment Name: At_10percent_PEG_P Parameter: Organism Value: A. thaliana
  misc_feature: MA Experiment 20000460 PARAMETER Experiment Name: At_10percent_PEG_P Parameter: Plant Line Value: WS
  misc_feature: MA Experiment 20000460 PARAMETER Experiment Name: At_10percent_PEG_P Parameter: Timepoint (day) Value: 12
  misc_feature: MA Experiment 20000460 PARAMETER Experiment Name: At_10percent_PEG_P Parameter: Tissue Value: Whole Plant
  misc_feature: MA Experiment 20000460 PARAMETER Experiment Name: At_10percent_PEG_P Parameter: Treatment Value: 10percent PEG vs. No Treatment
  misc_feature: MA Experiment ID: 20000527 Result: Up-regulated in Transcription
  misc_feature: MA Experiment 20000527 PARAMETER Experiment Name: At_10percent_PEG_P Parameter: Age (day) Value: 20
  misc_feature: MA Experiment 20000527 PARAMETER Experiment Name: At_10percent_PEG_P Parameter: Organism Value: A. thaliana
  misc_feature: MA Experiment 20000527 PARAMETER Experiment Name: At_10percent_PEG_P Parameter: Plant Line Value: WS
  misc_feature: MA Experiment 20000527 PARAMETER Experiment Name: At_10percent_PEG_P Parameter: Timepoint (day) Value: 20
  misc_feature: MA Experiment 20000527 PARAMETER Experiment Name: At_10percent_PEG_P Parameter: Tissue Value: Whole Plant
  misc_feature: MA Experiment 20000527 PARAMETER Experiment Name: At_10percent_PEG_P Parameter: Treatment Value: 10percent PEG vs. No Treatment
  misc_feature: MA Experiment ID: 20001248 Result: Up-regulated in Transcription
  misc_feature: MA Experiment 20001248 PARAMETER Experiment Name: At_Far-red-induction_P Parameter: Age (day) Value: 7
  misc_feature: MA Experiment 20001248 PARAMETER Experiment Name: At_Far-red-induction_P Parameter: Light Value: Far-red vs. White
  misc_feature: MA Experiment 20001248 PARAMETER Experiment Name: At_Far-red-induction_P Parameter: Organism Value: A. thaliana
  misc_feature: MA Experiment 20001248 PARAMETER Experiment Name: At_Far-red-induction_P Parameter: Plant Line Value: Columbia
  misc_feature: MA Experiment 20001248 PARAMETER Experiment Name: At_Far-red-induction_P Parameter: Timepoint (hr) Value: 4
  misc_feature: MA Experiment 20001248 PARAMETER Experiment Name: At_Far-red-induction_P Parameter: Tissue Value: Whole Plant
  misc_feature: MA Experiment ID: 20001451 Result: Down-regulated in Transcription
  misc_feature: MA Experiment 20001451 PARAMETER Experiment Name: At_Far-red-induction_P Parameter: Age (day) Value: 7
  misc_feature: MA Experiment 20001451 PARAMETER Experiment Name: At_Far-red-induction_P Parameter: Light Value: Far-red vs. White
  misc_feature: MA Experiment 20001451 PARAMETER Experiment Name: At_Far-red-induction_P Parameter: Organism Value: A. thaliana
  misc_feature: MA Experiment 20001451 PARAMETER Experiment Name: At_Far-red-induction_P Parameter: Plant Line Value: Columbia
  misc_feature: MA Experiment 20001451 PARAMETER Experiment Name: At_Far-red-induction_P Parameter: Timepoint (hr) Value: 24
  misc_feature: MA Experiment 20001451 PARAMETER Experiment Name: At_Far-red-induction_P Parameter: Tissue Value: Whole Plant
  misc_feature: MA Experiment ID: 20001554 Result: Down-regulated in Transcription
  misc_feature: MA Experiment 20001554 PARAMETER Experiment Name: At_Drought_Soil_Dry_P Parameter: Age (day) Value: 21
  misc_feature: MA Experiment 20001554 PARAMETER Experiment Name: At_Drought_Soil_Dry_P Parameter: Organism Value: A. thaliana
  misc_feature: MA Experiment 20001554 PARAMETER Experiment Name: At_Drought_Soil_Dry_P Parameter: Plant Line Value: WS
  misc_feature: MA Experiment 20001554 PARAMETER Experiment Name: At_Drought_Soil_Dry_P Parameter: Post Timepoint (hr) Value: None
  misc_feature: MA Experiment 20001554 PARAMETER Experiment Name: At_Drought_Soil_Dry_P Parameter: Post-Treatment Value: None
  misc_feature: MA Experiment 20001554 PARAMETER Experiment Name: At_Drought_Soil_Dry_P Parameter: Timepoint (day) Value: 7
  misc_feature: MA Experiment 20001554 PARAMETER Experiment Name: At_Drought_Soil_Dry_P Parameter: Treatment Value: Drought vs. No Drought
  misc_feature: MA Experiment ID: 20001555 Result: Down-regulated in Transcription
  misc_feature: MA Experiment 20001555 PARAMETER Experiment Name: At_Drought_Soil_Dry_P Parameter: Age (day) Value: 24
  misc_feature: MA Experiment 20001555 PARAMETER Experiment Name: At_Drought_Soil_Dry_P Parameter: Organism Value: A. thaliana
  misc_feature: MA Experiment 20001555 PARAMETER Experiment Name: At_Drought_Soil_Dry_P Parameter: Plant Line Value: WS
  misc_feature: MA Experiment 20001555 PARAMETER Experiment Name: At_Drought_Soil_Dry_P Parameter: Post Timepoint (hr) Value: None
  misc_feature: MA Experiment 20001555 PARAMETER Experiment Name: At_Drought_Soil_Dry_P Parameter: Post-Treatment Value: None
  misc_feature: MA Experiment 20001555 PARAMETER Experiment Name: At_Drought_Soil_Dry_P Parameter: Timepoint (day) Value: 10
  misc_feature: MA Experiment 20001555 PARAMETER Experiment Name: At_Drought_Soil_Dry_P Parameter: Treatment Value: Drought vs. No Drought
  misc_feature: MA Experiment ID: 20001556 Result: Down-regulated in Transcription
  misc_feature: MA Experiment 20001556 PARAMETER Experiment Name: At_Drought_Soil_Dry_P Parameter: Age (day) Value: 26
  misc_feature: MA Experiment 20001556 PARAMETER Experiment Name: At_Drought_Soil_Dry_P Parameter: Organism Value: A. thaliana
  misc_feature: MA Experiment 20001556 PARAMETER Experiment Name: At_Drought_Soil_Dry_P Parameter: Plant Line Value: WS
  misc_feature: MA Experiment 20001556 PARAMETER Experiment Name: At_Drought_Soil_Dry_P Parameter: Post Timepoint (hr) Value: None
  misc_feature: MA Experiment 20001556 PARAMETER Experiment Name: At_Drought_Soil_Dry_P Parameter: Post-Treatment Value: None
  misc_feature: MA Experiment 20001556 PARAMETER Experiment Name: At_Drought_Soil_Dry_P Parameter: Timepoint (day) Value: 12
  misc_feature: MA Experiment 20001556 PARAMETER Experiment Name: At_Drought_Soil_Dry_P Parameter: Treatment Value: Drought vs. No Drought
  misc_feature: MA Experiment ID: 20001557 Result: Up-regulated in Transcription
  misc_feature: MA Experiment 20001557 PARAMETER Experiment Name: At_Drought_Soil_Dry_P Parameter: Age (day) Value: 27
  misc_feature: MA Experiment 20001557 PARAMETER Experiment Name: At_Drought_Soil_Dry_P Parameter: Organism Value: A. thaliana
  misc_feature: MA Experiment 20001557 PARAMETER Experiment Name: At_Drought_Soil_Dry_P Parameter: Plant Line Value: WS
  misc_feature: MA Experiment 20001557 PARAMETER Experiment Name: At_Drought_Soil_Dry_P Parameter: Post Timepoint (hr) Value: 3
  misc_feature: MA Experiment 20001557 PARAMETER Experiment Name: At_Drought_Soil_Dry_P Parameter: Post-Treatment Value: Re-Water vs. No Drought
  misc_feature: MA Experiment 20001557 PARAMETER Experiment Name: At_Drought_Soil_Dry_P Parameter: Timepoint (day) Value: 13
  misc_feature: MA Experiment 20001557 PARAMETER Experiment Name: At_Drought_Soil_Dry_P Parameter: Treatment Value: Drought vs. No Drought
  misc_feature: MA Experiment ID: 20001911 Result: Down-regulated in Transcription
  misc_feature: MA Experiment 20001911 PARAMETER Experiment Name: At_Drought_Reproduction_P Parameter: Age (day) Value: 40
  misc_feature: MA Experiment 20001911 PARAMETER Experiment Name: At_Drought_Reproduction_P Parameter: Organism Value: A. thaliana
  misc_feature: MA Experiment 20001911 PARAMETER Experiment Name: At_Drought_Reproduction_P Parameter: Plant Line Value: WS
  misc_feature: MA Experiment 20001911 PARAMETER Experiment Name: At_Drought_Reproduction_P Parameter: Timepoint (day) Value: 10
  misc_feature: MA Experiment 20001911 PARAMETER Experiment Name: At_Drought_Reproduction_P Parameter: Tissue Value: Flowers
  misc_feature: MA Experiment 20001911 PARAMETER Experiment Name: At_Drought_Reproduction_P Parameter: Treatment Value: Drought vs. No Drought

SEQ ID NO: 49110 - protein, 330 aa, Arabidopsis thaliana; identical to SEQ ID NO: 44609
  peptide (1)..(330): Ceres Seq. ID no. 12488515
  misc_feature (229)..(264): Homolog of NCBI NO: 15228172 NR Description: putative protein; protein id: At3g55690.1
  misc_feature (28)..(177): Homolog of NCBI NO: 15228172 NR Description: putative protein; protein id: At3g55690.1
  misc_feature (1)..(330): Homolog of NCBI NO: 18405186 NR Description: expressed protein
  misc_feature (229)..(264): Homolog of NCBI NO: 15228172 NR Description: putative protein; protein id: At3g55690.1
  misc_feature (28)..(177): Homolog of NCBI NO: 15228172 NR Description: putative protein; protein id: At3g55690.1
  misc_feature (1)..(330): Homolog of NCBI NO: 18405186 NR Description: expressed protein

SEQ ID NO: 49111 - protein, 315 aa, Arabidopsis thaliana; identical to SEQ ID NO: 44610
  peptide (1)..(315): Ceres Seq. ID no. 12488516
  misc_feature (214)..(249): Homolog of NCBI NO: 15228172 NR Description: putative protein; protein id: At3g55690.1
  misc_feature (13)..(162): Homolog of NCBI NO: 15228172 NR Description: putative protein; protein id: At3g55690.1
  misc_feature (1)..(315): Homolog of NCBI NO: 18405186 NR Description: expressed protein
  misc_feature (214)..(249): Homolog of NCBI NO: 15228172 NR Description: putative protein; protein id: At3g55690.1
  misc_feature (13)..(162): Homolog of NCBI NO: 15228172 NR Description: putative protein; protein id: At3g55690.1
  misc_feature (1)..(315): Homolog of NCBI NO: 18405186 NR Description: expressed protein

SEQ ID NO: 49112 - DNA, 895 bp, Arabidopsis thaliana
  misc_feature (1)..(895): Ceres Seq. ID no. 12578273
  misc_feature: MA Experiment ID: 20000171 Result: Down-regulated in Transcription
  misc_feature: MA Experiment 20000171 PARAMETER Experiment Name: At_42deg_Heat_P Parameter: Age (day) Value: 14
  misc_feature: MA Experiment 20000171 PARAMETER Experiment Name: At_42deg_Heat_P Parameter: Organism Value: A. thaliana
  misc_feature: MA Experiment 20000171 PARAMETER Experiment Name: At_42deg_Heat_P Parameter: Plant Line Value: WS
  misc_feature: MA Experiment 20000171 PARAMETER Experiment Name: At_42deg_Heat_P Parameter: Temperature (deg C) Value: 42 vs. 22
  misc_feature: MA Experiment 20000171 PARAMETER Experiment Name: At_42deg_Heat_P Parameter: Timepoint (hr) Value: 1
  misc_feature: MA Experiment 20000171 PARAMETER Experiment Name: At_42deg_Heat_P Parameter: Tissue Value: Aerial
  misc_feature: MA Experiment ID: 20000185 Result: Down-regulated in Transcription
  misc_feature: MA Experiment 20000185 PARAMETER Experiment Name: At_Roots__P Parameter: Age (day) Value: 7 vs. 21
  misc_feature: MA Experiment 20000185 PARAMETER Experiment Name: At_Roots__P Parameter: Organism Value: A. thaliana
  misc_feature: MA Experiment 20000185 PARAMETER Experiment Name: At_Roots__P Parameter: Tissue Value: Roots vs. Whole Plant
  misc_feature: MA Experiment ID: 20000234 Result: Down-regulated in Transcription
  misc_feature: MA Experiment 20000234 PARAMETER Experiment Name: At_Siliques_P Parameter: Age (day) Value: 21
  misc_feature: MA Experiment 20000234 PARAMETER Experiment Name: At_Siliques_P Parameter: Organism Value: A. thaliana
  misc_feature: MA Experiment 20000234 PARAMETER Experiment Name: At_Siliques_P Parameter: Plant Line Value: WS
  misc_feature: MA Experiment 20000234 PARAMETER Experiment Name: At_Siliques_P Parameter: Tissue Value: Less Than 5mm Siliques vs. Whole Plant
  misc_feature: MA Experiment ID: 20000439 Result: Down-regulated in Transcription
  misc_feature: MA Experiment 20000439 PARAMETER Experiment Name: At_Roots__P Parameter: Age (day) Value: 14 vs. 21
  misc_feature: MA Experiment 20000439 PARAMETER Experiment Name: At_Roots__P Parameter: Organism Value: A. thaliana
  misc_feature: MA Experiment 20000439 PARAMETER Experiment Name: At_Roots__P Parameter: Tissue Value: Roots vs. Whole Plant
  misc_feature: MA Experiment ID: 20000445 Result: Down-regulated in Transcription
  misc_feature: MA Experiment 20000445 PARAMETER Experiment Name: At_100uM_NAA__P Parameter: Age (day) Value: 14
  misc_feature: MA Experiment 20000445 PARAMETER Experiment Name: At_100uM_NAA__P Parameter: Organism Value: A. thaliana
  misc_feature: MA Experiment 20000445 PARAMETER Experiment Name: At_100uM_NAA__P Parameter: Plant Line Value: WS
  misc_feature: MA Experiment 20000445 PARAMETER Experiment Name: At_100uM_NAA__P Parameter: Timepoint (hr) Value: 6
  misc_feature: MA Experiment 20000445 PARAMETER Experiment Name: At_100uM_NAA__P Parameter: Tissue Value: Aerial
  misc_feature: MA Experiment 20000445 PARAMETER Experiment Name: At_100uM_NAA__P Parameter: Treatment Value: 100uM NAA vs. No Treatment
  misc_feature: MA Experiment ID: 20000496 Result: Up-regulated in Transcription
  misc_feature: MA Experiment 20000496 PARAMETER Experiment Name: At_Guard_Cells_P Parameter: Harvest Date Value: 7/19/2002
  misc_feature: MA Experiment 20000496 PARAMETER Experiment Name: At_Guard_Cells_P Parameter: Organism Value: Canola
  misc_feature: MA Experiment 20000496 PARAMETER Experiment Name: At_Guard_Cells_P Parameter: Tissue Value: Guard Cells vs. Leaves
  misc_feature: MA Experiment ID: 20001248 Result: Down-regulated in Transcription
  misc_feature: MA Experiment 20001248 PARAMETER Experiment Name: At_Far-red-induction_P Parameter: Age (day) Value: 7
  misc_feature: MA Experiment 20001248 PARAMETER Experiment Name: At_Far-red-induction_P Parameter: Light Value: Far-red vs. White
  misc_feature: MA Experiment 20001248 PARAMETER Experiment Name: At_Far-red-induction_P Parameter: Organism Value: A. thaliana
  misc_feature: MA Experiment 20001248 PARAMETER Experiment Name: At_Far-red-induction_P Parameter: Plant Line Value: Columbia
  misc_feature: MA Experiment 20001248 PARAMETER Experiment Name: At_Far-red-induction_P Parameter: Timepoint (hr) Value: 4
  misc_feature: MA Experiment 20001248 PARAMETER Experiment Name: At_Far-red-induction_P Parameter: Tissue Value: Whole Plant
  misc_feature: MA Experiment ID: 20001557 Result: Up-regulated in Transcription
  misc_feature: MA Experiment 20001557 PARAMETER Experiment Name: At_Drought_Soil_Dry_P Parameter: Age (day) Value: 27
  misc_feature: MA Experiment 20001557 PARAMETER Experiment Name: At_Drought_Soil_Dry_P Parameter: Organism Value: A. thaliana
  misc_feature: MA Experiment 20001557 PARAMETER Experiment Name: At_Drought_Soil_Dry_P Parameter: Plant Line Value: WS
  misc_feature: MA Experiment 20001557 PARAMETER Experiment Name: At_Drought_Soil_Dry_P Parameter: Post Timepoint (hr) Value: 3
  misc_feature: MA Experiment 20001557 PARAMETER Experiment Name: At_Drought_Soil_Dry_P Parameter: Post-Treatment Value: Re-Water vs. No Drought
  misc_feature: MA Experiment 20001557 PARAMETER Experiment Name: At_Drought_Soil_Dry_P Parameter: Timepoint (day) Value: 13
  misc_feature: MA Experiment 20001557 PARAMETER Experiment Name: At_Drought_Soil_Dry_P Parameter: Treatment Value: Drought vs. No Drought
  misc_feature: MA Experiment ID: 20001558 Result: Up-regulated in Transcription
  misc_feature: MA Experiment 20001558 PARAMETER Experiment Name: At_Drought_Soil_Dry_P Parameter: Age (day) Value: 27
  misc_feature: MA Experiment 20001558 PARAMETER Experiment Name: At_Drought_Soil_Dry_P Parameter: Organism Value: A. thaliana
  misc_feature: MA Experiment 20001558 PARAMETER Experiment Name: At_Drought_Soil_Dry_P Parameter: Plant Line Value: WS
  misc_feature: MA Experiment 20001558 PARAMETER Experiment Name: At_Drought_Soil_Dry_P Parameter: Post Timepoint (hr) Value: 6
  misc_feature: MA Experiment 20001558 PARAMETER Experiment Name: At_Drought_Soil_Dry_P Parameter: Post-Treatment Value: Re-Water vs. No Drought
  misc_feature: MA Experiment 20001558 PARAMETER Experiment Name: At_Drought_Soil_Dry_P Parameter: Timepoint (day) Value: 13
  misc_feature: MA Experiment 20001558 PARAMETER Experiment Name: At_Drought_Soil_Dry_P Parameter: Treatment Value: Drought vs. No Drought
  misc_feature: MA Experiment ID: 20001906 Result: Up-regulated in Transcription
  misc_feature: MA Experiment 20001906 PARAMETER Experiment Name: At_Drought_Reproduction_P Parameter: Age (day) Value: 35
  misc_feature: MA Experiment 20001906 PARAMETER Experiment Name: At_Drought_Reproduction_P Parameter: Organism Value: A. thaliana
  misc_feature: MA Experiment 20001906 PARAMETER Experiment Name: At_Drought_Reproduction_P Parameter: Plant Line Value: WS
  misc_feature: MA Experiment 20001906 PARAMETER Experiment Name: At_Drought_Reproduction_P Parameter: Timepoint (day) Value: 5
  misc_feature: MA Experiment 20001906 PARAMETER Experiment Name: At_Drought_Reproduction_P Parameter: Tissue Value: Siliques
  misc_feature: MA Experiment 20001906 PARAMETER Experiment Name: At_Drought_Reproduction_P Parameter: Treatment Value: Drought vs. No Drought
  misc_feature: MA Experiment ID: 20001911 Result: Up-regulated in Transcription
  misc_feature: MA Experiment 20001911 PARAMETER Experiment Name: At_Drought_Reproduction_P Parameter: Age (day) Value: 40
  misc_feature: MA Experiment 20001911 PARAMETER Experiment Name: At_Drought_Reproduction_P Parameter: Organism Value: A. thaliana
  misc_feature: MA Experiment 20001911 PARAMETER Experiment Name: At_Drought_Reproduction_P Parameter: Plant Line Value: WS
  misc_feature: MA Experiment 20001911 PARAMETER Experiment Name: At_Drought_Reproduction_P Parameter: Timepoint (day) Value: 10
  misc_feature: MA Experiment 20001911 PARAMETER Experiment Name: At_Drought_Reproduction_P Parameter: Tissue Value: Flowers
  misc_feature: MA Experiment 20001911 PARAMETER Experiment Name: At_Drought_Reproduction_P Parameter: Treatment Value: Drought vs. No Drought
atactcttaactctcatgaattattggtctctctattatagttttttaagtaacaatctaattgtagtacggatgtctcttgagatgttcaagaattaagaaataaagaaagagggatcggagaatgaattttgaggatcaagaagaagatatggagatgtcaggtgttaatcccccctgcggttacgactctctaagcggtgagggagccacatctagtggtggtggaggagtaggaaggagtaaaggagttggagcgaagataaggtatagagagtgcttgaagaaccatgctgttaacataggtggccacgccgtggacggttgttgcgagtttatgccttccggtgaagatggaacgctcgacgctcttaagtgtgcagcttgcggctgccaccgcaacttccaccgcaaggaaaccgaaagcatcggcggtagagcccacagagttcccacgtactacaaccgcccgccgcagccgcatcagccgcctggatatcttcatctaacatctcccgcggcgccttacaggccacccgcggcatcgggggacgaggaggatacatcaaatcctagcagcagcggcgggaccacgaagaggtttagaacgaagttcacggcggaacagaaagagaagatgttagcctttgcggagaggttggggtggagaattcagaagcatgatgacgtggcggttgagcagttctgtgcggagactggtgttaggagacaagtgcttaaaatctggatgcataacaacaagaactctcttggtaagaaaccctaattttgctcgagacatgatttaaaacactagaggatcataattgtttctttttttggtatgactcttctgtaactacttctgcttattagttatgttattttttcctgg

SEQ ID NO: 49113 - protein, 220 aa, Arabidopsis thaliana
  peptide (1)..(220): Ceres Seq. ID no. 12578274
  misc_feature (44)..(103): Pfam Name: ZF-HD protein dimerisation region Pfam Description: ZF-HD protein dimerisation region
  misc_feature (47)..(121): Homolog of NCBI NO: 15223757 NR Description: hypothetical protein
  misc_feature (115)..(219): Homolog of NCBI NO: 15223757 NR Description: hypothetical protein
  misc_feature (152)..(220): Homolog of NCBI NO: 18410804 NR Description: expressed protein
  misc_feature (47)..(137): Homolog of NCBI NO: 18410804 NR Description: expressed protein
  misc_feature (149)..(219): Homolog of NCBI NO: 20148768 NR Description: hypothetical protein At2g02540/T822.16
  misc_feature (149)..(219): Homolog of NCBI NO: 15226993 NR Description: hypothetical protein
  misc_feature (47)..(123): Homolog of NCBI NO: 20148768 NR Description: hypothetical protein At2g02540/T822.16
  misc_feature (47)..(123): Homolog of NCBI NO: 15226993 NR Description: hypothetical protein
  misc_feature (1)..(220): Homolog of NCBI NO: 15238445 NR Description: hypothetical protein common family; protein id:
  misc_feature (1)..(220): Homolog of NCBI NO: 15233925 NR Description: putative protein
MNFEDQEEDMEMSGVNPPCGYDSLSGEGATSSGGGGVGRSKGVGAKIRYRECLKNHAVNIGGHAVDGCCEFMPSGEDGTLDALKCAACGCHRNFHRKETESIGGRAHRVPTYYNRPPQPHQPPGYLHLTSPAAPYRPPAASGDEEDTSNPSSSGGTTKRFRTKFTAEQKEKMLAFAERLGWRIQKHDDVAVEQFCAETGVRRQVLKIWMHNNKNSLGKKP

SEQ ID NO: 49114 - protein, 211 aa, Arabidopsis thaliana
  peptide (1)..(211): Ceres Seq. ID no. 12578275
  misc_feature (35)..(94): Pfam Name: ZF-HD protein dimerisation region Pfam Description: ZF-HD protein dimerisation region
  misc_feature (38)..(112): Homolog of NCBI NO: 15223757 NR Description: hypothetical protein
  misc_feature (106)..(210): Homolog of NCBI NO: 15223757 NR Description: hypothetical protein
  misc_feature (143)..(211): Homolog of NCBI NO: 18410804 NR Description: expressed protein
  misc_feature (38)..(128): Homolog of NCBI NO: 18410804 NR Description: expressed protein
  misc_feature (140)..(210): Homolog of NCBI NO: 20148768 NR Description: hypothetical protein At2g02540/T822.16
  misc_feature (140)..(210): Homolog of NCBI NO: 15226993 NR Description: hypothetical protein
  misc_feature (38)..(114): Homolog of NCBI NO: 20148768 NR Description: hypothetical protein At2g02540/T822.16
  misc_feature (38)..(114): Homolog of NCBI NO: 15226993 NR Description: hypothetical protein
  misc_feature (1)..(211): Homolog of NCBI NO: 15238445 NR Description: hypothetical protein common family; protein id:
  misc_feature (1)..(211): Homolog of NCBI NO: 15233925 NR Description: putative protein
MEMSGVNPPCGYDSLSGEGATSSGGGGVGRSKGVGAKIRYRECLKNHAVNIGGHAVDGCCEFMPSGEDGTLDALKCAACGCHRNFHRKETESIGGRAHRVPTYYNRPPQPHQPPGYLHLTSPAAPYRPPAASGDEEDTSNPSSSGGTTKRFRTKFTAEQKEKMLAFAERLGWRIQKHDDVAVEQFCAETGVRRQVLKIWMHNNKNSLGKKP

SEQ ID NO: 49115 - protein, 209 aa, Arabidopsis thaliana
  peptide (1)..(209): Ceres Seq. ID no. 12578276
  misc_feature (33)..(92): Pfam Name: ZF-HD protein dimerisation region Pfam Description: ZF-HD protein dimerisation region
  misc_feature (36)..(110): Homolog of NCBI NO: 15223757 NR Description: hypothetical protein
  misc_feature (104)..(208): Homolog of NCBI NO: 15223757 NR Description: hypothetical protein
  misc_feature (141)..(209): Homolog of NCBI NO: 18410804 NR Description: expressed protein
  misc_feature (36)..(126): Homolog of NCBI NO: 18410804 NR Description: expressed protein
  misc_feature (138)..(208): Homolog of NCBI NO: 20148768 NR Description: hypothetical protein At2g02540/T822.16
  misc_feature (138)..(208): Homolog of NCBI NO: 15226993 NR Description: hypothetical protein
  misc_feature (36)..(112): Homolog of NCBI NO: 20148768 NR Description: hypothetical protein At2g02540/T822.16
  misc_feature (36)..(112): Homolog of NCBI NO: 15226993 NR Description: hypothetical protein
  misc_feature (1)..(209): Homolog of NCBI NO: 15238445 NR Description: hypothetical protein common family; protein id:
  misc_feature (1)..(209): Homolog of NCBI NO: 15233925 NR Description: putative protein
MSGVNPPCGYDSLSGEGATSSGGGGVGRSKGVGAKIRYRECLKNHAVNIGGHAVDGCCEFMPSGEDGTLDALKCAACGCHRNFHRKETESIGGRAHRVPTYYNRPPQPHQPPGYLHLTSPAAPYRPPAASGDEEDTSNPSSSGGTTKRFRTKFTAEQKEKMLAFAERLGWRIQKHDDVAVEQFCAETGVRRQVLKIWMHNNKNSLGKKP

SEQ ID NO: 49116 - DNA, 1935 bp, Arabidopsis thaliana
  misc_feature (1)..(1935): Ceres Seq. ID no. 12578277
  misc_feature: MA Experiment ID: 20000087 Result: Up-regulated in Transcription
  misc_feature: MA Experiment 20000087 PARAMETER Experiment Name: At_100uM_ABA_Mutants_cDNA_P Parameter: Plant Line Value: WS
  misc_feature: MA Experiment 20000087 PARAMETER Experiment Name: At_100uM_ABA_Mutants_cDNA_P Parameter: Timepoint (hr) Value: 6
  misc_feature: MA Experiment 20000087 PARAMETER Experiment Name: At_100uM_ABA_Mutants_cDNA_P Parameter: Tissue Value: Aerial
  misc_feature: MA Experiment 20000087 PARAMETER Experiment Name: At_100uM_ABA_Mutants_cDNA_P Parameter: Treatment Value: 100uM ABA vs. No Treatment
  misc_feature: MA Experiment ID: 20000184 Result: Down-regulated in Transcription
  misc_feature: MA Experiment 20000184 PARAMETER Experiment Name: At_Shoots__P Parameter: Age (day) Value: 7
  misc_feature: MA Experiment 20000184 PARAMETER Experiment Name: At_Shoots__P Parameter: Tissue Value: Shoots vs. Whole Plant
  misc_feature: MA Experiment ID: 20000185 Result: Up-regulated in Transcription
  misc_feature: MA Experiment 20000185 PARAMETER Experiment Name: At_Roots__P Parameter: Age (day) Value: 7 vs. 21
  misc_feature: MA Experiment 20000185 PARAMETER Experiment Name: At_Roots__P Parameter: Organism Value: A. thaliana
  misc_feature: MA Experiment 20000185 PARAMETER Experiment Name: At_Roots__P Parameter: Tissue Value: Roots vs. Whole Plant
  misc_feature: MA Experiment ID: 20000439 Result: Up-regulated in Transcription
  misc_feature: MA Experiment 20000439 PARAMETER Experiment Name: At_Roots__P Parameter: Age (day) Value: 14 vs. 21
  misc_feature: MA Experiment 20000439 PARAMETER Experiment Name: At_Roots__P Parameter: Organism Value: A. thaliana
  misc_feature: MA Experiment 20000439 PARAMETER Experiment Name: At_Roots__P Parameter: Tissue Value: Roots vs. Whole Plant
  misc_feature: MA Experiment ID: 20000794 Result: Up-regulated in Transcription
  misc_feature: MA Experiment 20000794 PARAMETER Experiment Name: At_Petals_P Parameter: Age (day) Value: 23-25 days
  misc_feature: MA Experiment 20000794 PARAMETER Experiment Name: At_Petals_P Parameter: Plant Line Value: WS
  misc_feature: MA Experiment 20000794 PARAMETER Experiment Name: At_Petals_P Parameter: Tissue Value: Petals vs. Whole plant
  misc_feature: MA Experiment ID: 20001560 Result: Down-regulated in Transcription
  misc_feature: MA Experiment 20001560 PARAMETER Experiment Name: At_Drought_Soil_Dry_P Parameter: Age (day) Value: 28
  misc_feature: MA Experiment 20001560 PARAMETER Experiment Name: At_Drought_Soil_Dry_P Parameter: Organism Value: A. thaliana
  misc_feature: MA Experiment 20001560 PARAMETER Experiment Name: At_Drought_Soil_Dry_P Parameter: Plant Line Value: WS
  misc_feature: MA Experiment 20001560 PARAMETER Experiment Name: At_Drought_Soil_Dry_P Parameter: Post Timepoint (hr) Value: None
  misc_feature: MA Experiment 20001560 PARAMETER Experiment Name: At_Drought_Soil_Dry_P Parameter: Post-Treatment Value: None
  misc_feature: MA Experiment 20001560 PARAMETER Experiment Name: At_Drought_Soil_Dry_P Parameter: Timepoint (day) Value: 14
  misc_feature: MA Experiment 20001560 PARAMETER Experiment Name: At_Drought_Soil_Dry_P Parameter: Treatment Value: Drought vs. No Drought
gaagaaaaaatatcggcaacaagaacaaaacgctcttctatttttctccatcttccaatttccaggaacaagattggacgaaagctaaaggtattgcatccatttaaaaagttcatggataggtggtccagtaaaagagccatggaggcgagacctgactctaagaagaagggtggtgttgtttttagagatagatttaacagcaatagttgcaaggttcctatttgtagtgatgagaaaaaatcaatgaactttactaggtttgttggctcttcagataagaaagagaaatcagtgttgtctacataccgctcttcgccaaacgggaaggaagtaattggaacttcctctaagatttgtatctctagctcctcttctgtgaaaagtggtgagaagcaaccgttttctcagatagccattgattcatcagagagcagcagaggtagtgaagacgaggtagagtcagaaatcttgcaagttcctcttggaagagataaaagaagaatgaacaataaacttatttatggaaaagttataacacctgaagcggaatgctcaaagttgccatcaagctcaagaatcaagagaggttttaggcagagatttgggttgagcaagcaagagtttcatcctggtccatctggccagtcaacatctgctaaccggggatgcagcccgttgttgtcaggtgtcattccaagtggttttggattggacaaaagattaagtcggaaggcagatacaatcagtaagacaaaagtttacggagaaagcagttctagctcctcagctagggggaagaatgtaacagaacctccaccagttgaagtgagacgtcgtagttttaatccgagaggttctgtttctgatagtagacgggctagacactgcattttggatgatgacaacgatgttgcttcagttgggagtcagagattggcaaatagaaataatagtcgcattagagggagtggtagagacggtttatcctctgtcacggcagcagagatgtctcagactgaaacatcaaacaatctcaattctcctgtctctttggagctgttctctggttttccagaatttggcctctctggttccttattgagtcatgacagttttcgcagttataatttagatgggatctccgagattctgccagaacttgataggatcgaacaagatatcgaacttaattatgaggatctgcttatcatggaaacaggtttacttctcggtggactaagcttccatgaccaacaccgagacatgaggctagacatcgataacatgtcatatgaggaactattagctctagaagagaggattggtacagtaagcactgctttgacagaagaagcaatatcaaagtgcttgaaaacaagtatctatcagatgaaacctttgagttatgggtctatcaccaaaagtcctagtgataacaaggaagatgccaaatgcagcatctgccaggaagaatatacgattggagatgaagttgggaggctacactgtgagcacacataccatgtgaagtgtgtgcaagagtggttgcggataaagagttggtgcccaatctgcaaagccacagccgaaacctcctctaaataaccgtcttcttcttcttcctcgttcgttgtattagttctttcatctaaagcctgtgaacaacaatggaacctgcgtaaaaaaggcctcaccatttcctttgtgtacataccaattcacaccggctctgtctctctctcccttttgtctaatgacaaagctatcctgtgtttctcttgtcttttcctctctttactgttgacttccgtaatgtaaagtgggaaagacggaaacgatttcatttgaactttgaagatcaagtaaacatgatcttttaattcttaaaattggacaatttgttgaaaagcaacaaagagcgtggttctttgg

SEQ ID NO: 49117 - protein, 535 aa, Arabidopsis thaliana
  peptide (1)..(535): Ceres Seq. ID no. 12578278
  misc_feature (486)..(526): Pfam Name: Zinc finger, C3HC4 type (RING finger) Pfam Description: Zinc finger, C3HC4 type (RING finger)
  misc_feature (362)..(535): Homolog of NCBI NO: 15220067 NR Description: hypothetical protein; protein id: At1g45180.1
  misc_feature (416)..(530): Homolog of NCBI NO: 38344153 NR Description: OSJNBa0041A02.20 [Oryza sativa (japonica
  misc_feature (381)..(535): Homolog of NCBI NO: 11358785 NR Description: RING-H2 finger protein RHG1a
  misc_feature (465)..(535): Homolog of NCBI NO: 21593757 NR Description: unknown [Arabidopsis thaliana]
  misc_feature (221)..(531): Homolog of NCBI NO: 20466428 NR Description: Pspzf zinc finger protein-like [Arabidopsis
  misc_feature (221)..(531): Homolog of NCBI NO: 22326712 NR Description: Pspzf zinc finger protein - like
  misc_feature (221)..(531): Homolog of NCBI NO: 10129643 NR Description: Pspzf zinc finger protein-like [Arabidopsis
  misc_feature (130)..(532): Homolog of NCBI NO: 30689641 NR Description: RING finger-related protein [Arabidopsis
  misc_feature (48)..(535): Homolog of NCBI NO: 7486381 NR Description: hypothetical protein F3L17.20 - Arabidopsis
  misc_feature (39)..(535): Homolog of NCBI NO: 18417809 NR Description: putative protein
EEKISATRTKRSSIFLHLPISRNKIGRKLKVLHPFKKFMDRWSSKRAMEARPDSKKKGGVVFRDRFNSNSCKVPICSDEKKSMNFTRFVGSSDKKEKSVLSTYRSSPNGKEVIGTSSKICISSSSSVKSGEKQPFSQIAIDSSESSRGSEDEVESEILQVPLGRDKRRMNNKLIYGKVITPEAECSKLPSSSRIKRGFRQRFGLSKQEFHPGPSGQSTSANRGCSPLLSGVIPSGFGLDKRLSRKADTISKTKVYGESSSSSSARGKNVTEPPPVEVRRRSFNPRGSVSDSRRARHCILDDDNDVASVGSQRLANRNNSRIRGSGRDGLSSVTAAEMSQTETSNNLNSPVSLELFSGFPEFGLSGSLLSHDSFRSYNLDGISEILPELDRIEQDIELNYEDLLIMETGLLLGGLSFHDQHRDMRLDIDNMSYEELLALEERIGTVSTALTEEAISKCLKTSIYQMKPLSYGSITKSPSDNKEDAKCSICQEEYTIGDEVGRLHCEHTYHVKCVQEWLRIKSWCPICKATAETSSK

SEQ ID NO: 49118 - protein, 497 aa, Arabidopsis thaliana
  peptide (1)..(497): Ceres Seq. ID no. 12578279
  misc_feature (448)..(488): Pfam Name: Zinc finger, C3HC4 type (RING finger) Pfam Description: Zinc finger, C3HC4 type (RING finger)
  misc_feature (324)..(497): Homolog of NCBI NO: 15220067 NR Description: hypothetical protein; protein id: At1g45180.1
  misc_feature (378)..(492): Homolog of NCBI NO: 38344153 NR Description: OSJNBa0041A02.20 [Oryza sativa (japonica
  misc_feature (343)..(497): Homolog of NCBI NO: 11358785 NR Description: RING-H2 finger protein RHG1a
  misc_feature (427)..(497): Homolog of NCBI NO: 21593757 NR Description: unknown [Arabidopsis thaliana]
  misc_feature (183)..(493): Homolog of NCBI NO: 22326712 NR Description: Pspzf zinc finger protein - like
  misc_feature (183)..(493): Homolog of NCBI NO: 20466428 NR Description: Pspzf zinc finger protein-like [Arabidopsis
  misc_feature (183)..(493): Homolog of NCBI NO: 10129643 NR Description: Pspzf zinc finger protein-like [Arabidopsis
  misc_feature (92)..(494): Homolog of NCBI NO: 30689641 NR Description: RING finger-related protein [Arabidopsis
  misc_feature (10)..(497): Homolog of NCBI NO: 7486381 NR Description: hypothetical protein F3L17.20 - Arabidopsis
  misc_feature (1)..(497): Homolog of NCBI NO: 18417809 NR Description: putative protein
MDRWSSKRAMEARPDSKKKGGVVFRDRFNSNSCKVPICSDEKKSMNFTRFVGSSDKKEKSVLSTYRSSPNGKEVIGTSSKICISSSSSVKSGEKQPFSQIAIDSSESSRGSEDEVESEILQVPLGRDKRRMNNKLIYGKVITPEAECSKLPSSSRIKRGFRQRFGLSKQEFHPGPSGQSTSANRGCSPLLSGVIPSGFGLDKRLSRKADTISKTKVYGESSSSSSARGKNVTEPPPVEVRRRSFNPRGSVSDSRRARHCILDDDNDVASVGSQRLANRNNSRIRGSGRDGLSSVTAAEMSQTETSNNLNSPVSLELFSGFPEFGLSGSLLSHDSFRSYNLDGISEILPELDRIEQDIELNYEDLLIMETGLLLGGLSFHDQHRDMRLDIDNMSYEELLALEERIGTVSTALTEEAISKCLKTSIYQMKPLSYGSITKSPSDNKEDAKCSICQEEYTIGDEVGRLHCEHTYHVKCVQEWLRIKSWCPICKATAETSSK

SEQ ID NO: 49119 - protein, 488 aa, Arabidopsis thaliana
  peptide (1)..(488): Ceres Seq. ID no. 12578280
  misc_feature (439)..(479): Pfam Name: Zinc finger, C3HC4 type (RING finger) Pfam Description: Zinc finger, C3HC4 type (RING finger)
  misc_feature (315)..(488): Homolog of NCBI NO: 15220067 NR Description: hypothetical protein; protein id: At1g45180.1
  misc_feature (369)..(483): Homolog of NCBI NO: 38344153 NR Description: OSJNBa0041A02.20 [Oryza sativa (japonica
  misc_feature (334)..(488): Homolog of NCBI NO: 11358785 NR Description: RING-H2 finger protein RHG1a
  misc_feature (418)..(488): Homolog of NCBI NO: 21593757 NR Description: unknown [Arabidopsis thaliana]
  misc_feature (174)..(484): Homolog of NCBI NO: 22326712 NR Description: Pspzf zinc finger protein - like
  misc_feature (174)..(484): Homolog of NCBI NO: 20466428 NR Description: Pspzf zinc finger protein-like [Arabidopsis
  misc_feature (174)..(484): Homolog of NCBI NO: 10129643 NR Description: Pspzf zinc finger protein-like [Arabidopsis
  misc_feature (83)..(485): Homolog of NCBI NO: 30689641 NR Description: RING finger-related protein [Arabidopsis
  misc_feature (1)..(488): Homolog of NCBI NO: 7486381 NR Description: hypothetical protein F3L17.20 - Arabidopsis
  misc_feature (1)..(488): Homolog of NCBI NO: 18417809 NR Description: putative protein
MEARPDSKKKGGVVFRDRFNSNSCKVPICSDEKKSMNFTRFVGSSDKKEKSVLSTYRSSPNGKEVIGTSSKICISSSSSVKSGEKQPFSQIAIDSSESSRGSEDEVESEILQVPLGRDKRRMNNKLIYGKVITPEAECSKLPSSSRIKRGFRQRFGLSKQEFHPGPSGQSTSANRGCSPLLSGVIPSGFGLDKRLSRKADTISKTKVYGESSSSSSARGKNVTEPPPVEVRRRSFNPRGSVSDSRRARHCILDDDNDVASVGSQRLANRNNSRIRGSGRDGLSSVTAAEMSQTETSNNLNSPVSLELFSGFPEFGLSGSLLSHDSFRSYNLDGISEILPELDRIEQDIELNYEDLLIMETGLLLGGLSFHDQHRDMRLDIDNMSYEELLALEERIGTVSTALTEEAISKCLKTSIYQMKPLSYGSITKSPSDNKEDAKCSICQEEYTIGDEVGRLHCEHTYHVKCVQEWLRIKSWCPICKATAETSSK

SEQ ID NO: 49120 - DNA, 1919 bp, Arabidopsis thaliana
  misc_feature (1)..(1919): Ceres Seq. ID no. 13592095
  misc_feature: MA Experiment ID: 20000185 Result: Down-regulated in Transcription
  misc_feature: MA Experiment 20000185 PARAMETER Experiment Name: At_Roots__P Parameter: Age (day) Value: 7 vs. 21
  misc_feature: MA Experiment 20000185 PARAMETER Experiment Name: At_Roots__P Parameter: Organism Value: A. thaliana
  misc_feature: MA Experiment 20000185 PARAMETER Experiment Name: At_Roots__P Parameter: Tissue Value: Roots vs. Whole Plant
  misc_feature: MA Experiment ID: 20000234 Result: Up-regulated in Transcription
  misc_feature: MA Experiment 20000234 PARAMETER Experiment Name: At_Siliques_P Parameter: Age (day) Value: 21
  misc_feature: MA Experiment 20000234 PARAMETER Experiment Name: At_Siliques_P Parameter: Organism Value: A. thaliana
  misc_feature: MA Experiment 20000234 PARAMETER Experiment Name: At_Siliques_P Parameter: Plant Line Value: WS
  misc_feature: MA Experiment 20000234 PARAMETER Experiment Name: At_Siliques_P Parameter: Tissue Value: Less Than 5mm Siliques vs. Whole Plant
  misc_feature: MA Experiment ID: 20000437 Result: Down-regulated in Transcription
  misc_feature: MA Experiment 20000437 PARAMETER Experiment Name: At_Drought_P Parameter: Age (day) Value: 8
  misc_feature: MA Experiment 20000437 PARAMETER Experiment Name: At_Drought_P Parameter: Organism Value: A. thaliana
  misc_feature: MA Experiment 20000437 PARAMETER Experiment Name: At_Drought_P Parameter: Plant Line Value: WS
  misc_feature: MA Experiment 20000437 PARAMETER Experiment Name: At_Drought_P Parameter: Timepoint (hr) Value: 24
  misc_feature: MA Experiment 20000437 PARAMETER Experiment Name: At_Drought_P Parameter: Tissue Value: Whole Plant
  misc_feature: MA Experiment 20000437 PARAMETER Experiment Name: At_Drought_P Parameter: Treatment Value: Drought vs. No Drought
  misc_feature: MA Experiment ID: 20001248 Result: Down-regulated in Transcription
  misc_feature: MA Experiment 20001248 PARAMETER Experiment Name: At_Far-red-induction_P Parameter: Age (day) Value: 7
  misc_feature: MA Experiment 20001248 PARAMETER Experiment Name: At_Far-red-induction_P Parameter: Light Value: Far-red vs. White
  misc_feature: MA Experiment 20001248 PARAMETER Experiment Name: At_Far-red-induction_P Parameter: Organism Value: A. thaliana
  misc_feature: MA Experiment 20001248 PARAMETER Experiment Name: At_Far-red-induction_P Parameter: Plant Line Value: Columbia
  misc_feature: MA Experiment 20001248 PARAMETER Experiment Name: At_Far-red-induction_P Parameter: Timepoint (hr) Value: 4
  misc_feature: MA Experiment 20001248 PARAMETER Experiment Name: At_Far-red-induction_P Parameter: Tissue Value: Whole Plant
  misc_feature: MA Experiment ID: 20001450 Result: Down-regulated in Transcription
  misc_feature: MA Experiment 20001450 PARAMETER Experiment Name: At_Far-red-induction_P Parameter: Age (day) Value: 7
  misc_feature: MA Experiment 20001450 PARAMETER Experiment Name: At_Far-red-induction_P Parameter: Light Value: Far-red vs. White
  misc_feature: MA Experiment 20001450 PARAMETER Experiment Name: At_Far-red-induction_P Parameter: Organism Value: A. thaliana
  misc_feature: MA Experiment 20001450 PARAMETER Experiment Name: At_Far-red-induction_P Parameter: Plant Line Value: Columbia
  misc_feature: MA Experiment 20001450 PARAMETER Experiment Name: At_Far-red-induction_P Parameter: Timepoint (hr) Value: 8
  misc_feature: MA Experiment 20001450 PARAMETER Experiment Name: At_Far-red-induction_P Parameter: Tissue Value: Whole Plant
  misc_feature: MA Experiment ID: 20001451 Result: Down-regulated in Transcription
  misc_feature: MA Experiment 20001451 PARAMETER Experiment Name: At_Far-red-induction_P Parameter: Age (day) Value: 7
  misc_feature: MA Experiment 20001451 PARAMETER Experiment Name: At_Far-red-induction_P Parameter: Light Value: Far-red vs. White
  misc_feature: MA Experiment 20001451 PARAMETER Experiment Name: At_Far-red-induction_P Parameter: Organism Value: A. thaliana
  misc_feature: MA Experiment 20001451 PARAMETER Experiment Name: At_Far-red-induction_P Parameter: Plant Line Value: Columbia
  misc_feature: MA Experiment 20001451 PARAMETER Experiment Name: At_Far-red-induction_P Parameter: Timepoint (hr) Value: 24
  misc_feature: MA Experiment 20001451 PARAMETER Experiment Name: At_Far-red-induction_P Parameter: Tissue Value: Whole Plant
  misc_feature: MA Experiment ID: 20001556 Result: Up-regulated in Transcription
  misc_feature: MA Experiment 20001556 PARAMETER Experiment Name: At_Drought_Soil_Dry_P Parameter: Age (day) Value: 26
  misc_feature: MA Experiment 20001556 PARAMETER Experiment Name: At_Drought_Soil_Dry_P Parameter: Organism Value: A. thaliana
  misc_feature: MA Experiment 20001556 PARAMETER Experiment Name: At_Drought_Soil_Dry_P Parameter: Plant Line Value: WS
  misc_feature: MA Experiment 20001556 PARAMETER Experiment Name: At_Drought_Soil_Dry_P Parameter: Post Timepoint (hr) Value: None
  misc_feature: MA Experiment 20001556 PARAMETER Experiment Name: At_Drought_Soil_Dry_P Parameter: Post-Treatment Value: None
  misc_feature: MA Experiment 20001556 PARAMETER Experiment Name: At_Drought_Soil_Dry_P Parameter: Timepoint (day) Value: 12
  misc_feature: MA Experiment 20001556 PARAMETER Experiment Name: At_Drought_Soil_Dry_P Parameter: Treatment Value: Drought vs. No Drought
  misc_feature: MA Experiment ID: 20001557 Result: Up-regulated in Transcription
  misc_feature: MA Experiment 20001557 PARAMETER Experiment Name: At_Drought_Soil_Dry_P Parameter: Age (day) Value: 27
  misc_feature: MA Experiment 20001557 PARAMETER Experiment Name: At_Drought_Soil_Dry_P Parameter: Organism Value: A. thaliana
  misc_feature: MA Experiment 20001557 PARAMETER Experiment Name: At_Drought_Soil_Dry_P Parameter: Plant Line Value: WS
  misc_feature: MA Experiment 20001557 PARAMETER Experiment Name: At_Drought_Soil_Dry_P Parameter: Post Timepoint (hr) Value: 3
  misc_feature: MA Experiment 20001557 PARAMETER Experiment Name: At_Drought_Soil_Dry_P Parameter: Post-Treatment Value: Re-Water vs. No Drought
  misc_feature: MA Experiment 20001557 PARAMETER Experiment Name: At_Drought_Soil_Dry_P Parameter: Timepoint (day) Value: 13
  misc_feature: MA Experiment 20001557 PARAMETER Experiment Name: At_Drought_Soil_Dry_P Parameter: Treatment Value: Drought vs. No Drought
  misc_feature: MA Experiment ID: 20001558 Result: Up-regulated in Transcription
  misc_feature: MA Experiment 20001558 PARAMETER Experiment Name: At_Drought_Soil_Dry_P Parameter: Age (day) Value: 27
  misc_feature: MA Experiment 20001558 PARAMETER Experiment Name: At_Drought_Soil_Dry_P Parameter: Organism Value: A. thaliana
  misc_feature: MA Experiment 20001558 PARAMETER Experiment Name: At_Drought_Soil_Dry_P Parameter: Plant Line Value: WS
  misc_feature: MA Experiment 20001558 PARAMETER Experiment Name: At_Drought_Soil_Dry_P Parameter: Post Timepoint (hr) Value: 6
  misc_feature: MA Experiment 20001558 PARAMETER Experiment Name: At_Drought_Soil_Dry_P Parameter: Post-Treatment Value: Re-Water vs. No Drought
  misc_feature: MA Experiment 20001558 PARAMETER Experiment Name: At_Drought_Soil_Dry_P Parameter: Timepoint (day) Value: 13
  misc_feature: MA Experiment 20001558 PARAMETER Experiment Name: At_Drought_Soil_Dry_P Parameter: Treatment Value: Drought vs. No Drought
  misc_feature: MA Experiment ID: 20001560 Result: Up-regulated in Transcription
  misc_feature: MA Experiment 20001560 PARAMETER Experiment Name: At_Drought_Soil_Dry_P Parameter: Age (day) Value: 28
  misc_feature: MA Experiment 20001560 PARAMETER Experiment Name: At_Drought_Soil_Dry_P Parameter: Organism Value: A. thaliana
  misc_feature: MA Experiment 20001560 PARAMETER Experiment Name: At_Drought_Soil_Dry_P Parameter: Plant Line Value: WS
  misc_feature: MA Experiment 20001560 PARAMETER Experiment Name: At_Drought_Soil_Dry_P Parameter: Post Timepoint (hr) Value: None
  misc_feature: MA Experiment 20001560 PARAMETER Experiment Name: At_Drought_Soil_Dry_P Parameter: Post-Treatment Value: None
  misc_feature: MA Experiment 20001560 PARAMETER Experiment Name: At_Drought_Soil_Dry_P Parameter: Timepoint (day) Value: 14
  misc_feature: MA Experiment 20001560 PARAMETER Experiment Name: At_Drought_Soil_Dry_P Parameter: Treatment Value: Drought vs. No Drought
gatccgagatttcatcatcttcttcggaaggagcttatcgttccacaccaatggcttcttctgtccttaatctcttcaaatcatgtagacccttcactccaatacgcttctcttctcttcccaagtctcaattcagaatccaatttcccctcagacccggaaaagaaactcaactacgtcgctgtttcacgactctgtcatcattaacggacggtggagcaccaatttccggtgggaaggagctgtggctgcacaacacgatgagccggaagaaggagctgtttaagcctaaggtcgaaggtaaagttggaatgtacgtttgcggtgtcactgcttacgatctcagtcacattggacacgcacgagtctacgtcactttcgatgtactcttgaggtaccttaagcatctaggatatgaagtgtcttacgttcgaaatttcacggatgtggatgacaagattattgccagagcgaaagaattagaggaagatccaatcagtttgagcagacgtttctgtgaggaatttaatcgagatatggaacagcttcaatgtttagatccgtctgtccaaccacgagtttcagatcatatacctcaaatcatcgacctgatcaagcagattcttgataatggctatgcctacaaagttgatggagacatttacttctcagtcgacaaatttccaacatatggaaaattgtctgggcgaaaattagaagataaccgtgcaggtgagagagtcgcagttgacacgaggaagaaacatcccgcagattttgctctgtggaaagctgcaaaagaaggggaacccttttgggagagtccgtggggaagaggaaggcccggttggcacatagagtgcagtgcgatgagcgcggcttatctcggttatagttttgacatacatggtggcggaatggatcttgtgttccctcaccatgaaaatgaaattgctcagagttgtgctgcatgtgatagcagcaacattagctattggatccataatggttttgttactgttgactccgagaagatgtcaaaatccttggggaatttcttcactatcagacaggttatagacctttatcatcctcttgctctgagacttttcctaatgggaactcattatcggtctcctatcaattactccgatttcctcctcgagagtgcttcggagcgcattttttatatttatcagacgttacacgactgtgaaagcgctttaggcgagaaagattcgacatttgagaatggttctgttccttcagacactttgacaagcatcaacacattccgtactgaatttgtcgcctcgatgtctgatgatcttctcacacctgtaactctggctgcaatgtcagaaccactgaaaactatcaacgatctcattcacacccgaaaggggaaaaaacaagcaagaagagaagagtcacttaaggctctagagacaacaatcagagatgttcttactatcttagggcttatgcccacaagttactcagaggttctcgagcagctaaaagagaaggcactaaagcgagctggactaaaagaggaagatgtgttgcagagagtgcaagagagaacagacgcaaggaagaataaagaatacgaaagatctgatgcaattaggaaagatttggcaaaagttgggatcgctttgatggatagtcctgagggaacaacttggagaccagccattcctcttgcacttcaagaacctgtaactactacaccttgagtttttaatcctatactacaatatctattctttttcttagtggttcatagtatttttgtatcagttttgttgaattcgaccaaaagattaaagaagtaacattggattcttgtactattcgtttttgtgtaagtccagcgaacttgttatacaatgcctatgctcaataatcagagg

SEQ ID NO: 49121 - protein, 579 aa, Arabidopsis thaliana
  peptide (1)..(579): Ceres Seq. ID no. 13592096
  misc_feature (116)..(195): Pfam Name: tRNA synthetases class I (I, L, M and V) Pfam Description: tRNA synthetases class I (I, L, M and V)
  misc_feature (81)..(564): Homolog of NCBI NO: 39998454 NR Description: cysteinyl-tRNA synthetase [Geobacter
  misc_feature (83)..(563): Homolog of NCBI NO: 23474637 NR Description: hypothetical protein [Desulfovibrio desulfuricans
  misc_feature (81)..(564): Homolog of NCBI NO: 23055378 NR Description: hypothetical protein [Geobacter metallireducens]
  misc_feature (422)..(579): Homolog of NCBI NO: 15228880 NR Description: cysteine-tRNA ligase-related protein [Arabidopsis
  misc_feature (80)..(416): Homolog of NCBI NO: 15228880 NR Description: cysteine-tRNA ligase-related protein [Arabidopsis
  misc_feature (80)..(568): Homolog of NCBI NO: 9758060 NR Description: cysteine-tRNA ligase [Arabidopsis thaliana]
  misc_feature (80)..(568): Homolog of NCBI NO: 15241557 NR Description: cysteine-tRNA ligase -related protein
  misc_feature (80)..(568): Homolog of NCBI NO: 37535144 NR Description: putative cysteinyl-tRNA synthetase
  misc_feature (87)..(579): Homolog of NCBI NO: 18402580 NR Description: cysteinyl-tRNA synthetase -related [Arabidopsis
  misc_feature (17)..(579): Homolog of NCBI NO: 25293240 NR Description: probable cysteinyl-tRNA synthetase
SEISSSSSEGAYRSTPMASSVLNLFKSCRPFTPIRFSSLPKSQFRIQFPLRPGKETQLRRCFTTLSSLTDGGAPISGGKELWLHNTMSRKKELFKPKVEGKVGMYVCGVTAYDLSHIGHARVYVTFDVLLRYLKHLGYEVSYVRNFTDVDDKIIARAKELEEDPISLSRRFCEEFNRDMEQLQCLDPSVQPRVSDHIPQIIDLIKQILDNGYAYKVDGDIYFSVDKFPTYGKLSGRKLEDNRAGERVAVDTRKKHPADFALWKAAKEGEPFWESPWGRGRPGWHIECSAMSAAYLGYSFDIHGGGMDLVFPHHENEIAQSCAACDSSNISYWIHNGFVTVDSEKMSKSLGNFFTIRQVIDLYHPLALRLFLMGTHYRSPINYSDFLLESASERIFYIYQTLHDCESALGEKDSTFENGSVPSDTLTSINTFRTEFVASMSDDLLTPVTLAAMSEPLKTINDLIHTRKGKKQARREESLKALETTIRDVLTILGLMPTSYSEVLEQLKEKALKRAGLKEEDVLQRVQERTDARKNKEYERSDAIRKDLAKVGIALMDSPEGTTWRPAIPLALQEPVTTTP

SEQ ID NO: 49122 - protein, 563 aa, Arabidopsis thaliana
  peptide (1)..(563): Ceres Seq. ID no. 13592097
  misc_feature (100)..(179): Pfam Name: tRNA synthetases class I (I, L, M and V) Pfam Description: tRNA synthetases class I (I, L, M and V)
  misc_feature (65)..(548): Homolog of NCBI NO: 39998454 NR Description: cysteinyl-tRNA synthetase [Geobacter
  misc_feature (67)..(547): Homolog of NCBI NO: 23474637 NR Description: hypothetical protein [Desulfovibrio desulfuricans
  misc_feature (65)..(548): Homolog of NCBI NO: 23055378 NR Description: hypothetical protein [Geobacter metallireducens]
  misc_feature (406)..(563): Homolog of NCBI NO: 15228880 NR Description: cysteine-tRNA ligase-related protein [Arabidopsis
  misc_feature (64)..(400): Homolog of NCBI NO: 15228880 NR Description: cysteine-tRNA ligase-related protein [Arabidopsis
  misc_feature (64)..(552): Homolog of NCBI NO: 9758060 NR Description: cysteine-tRNA ligase [Arabidopsis thaliana]
  misc_feature (64)..(552): Homolog of NCBI NO: 15241557 NR Description: cysteine-tRNA ligase -related protein
  misc_feature (64)..(552): Homolog of NCBI NO: 37535144 NR Description: putative cysteinyl-tRNA synthetase
  misc_feature (71)..(563): Homolog of NCBI NO: 18402580 NR Description: cysteinyl-tRNA synthetase -related [Arabidopsis
  misc_feature (1)..(563): Homolog of NCBI NO: 25293240 NR Description: probable cysteinyl-tRNA synthetase
MASSVLNLFKSCRPFTPIRFSSLPKSQFRIQFPLRPGKETQLRRCFTTLSSLTDGGAPISGGKELWLHNTMSRKKELFKPKVEGKVGMYVCGVTAYDLSHIGHARVYVTFDVLLRYLKHLGYEVSYVRNFTDVDDKIIARAKELEEDPISLSRRFCEEFNRDMEQLQCLDPSVQPRVSDHIPQIIDLIKQILDNGYAYKVDGDIYFSVDKFPTYGKLSGRKLEDNRAGERVAVDTRKKHPADFALWKAAKEGEPFWESPWGRGRPGWHIECSAMSAAYLGYSFDIHGGGMDLVFPHHENEIAQSCAACDSSNISYWIHNGFVTVDSEKMSKSLGNFFTIRQVIDLYHPLALRLFLMGTHYRSPINYSDFLLESASERIFYIYQTLHDCESALGEKDSTFENGSVPSDTLTSINTFRTEFVASMSDDLLTPVTLAAMSEPLKTINDLIHTRKGKKQARREESLKALETTIRDVLTILGLMPTSYSEVLEQLKEKALKRAGLKEEDVLQRVQERTDARKNKEYERSDAIRKDLAKVGIALMDSPEGTTWRPAIPLALQEPVTTTP

SEQ ID NO: 49123 - protein, 493 aa, Arabidopsis thaliana
  peptide (1)..(493): Ceres Seq. ID no. 13592098
  misc_feature (30)..(109): Pfam Name: tRNA synthetases class I (I, L, M and V) Pfam Description: tRNA synthetases class I (I, L, M and V)
  misc_feature (1)..(478): Homolog of NCBI NO: 39998454 NR Description: cysteinyl-tRNA synthetase [Geobacter
  misc_feature (1)..(477): Homolog of NCBI NO: 23474637 NR Description: hypothetical protein [Desulfovibrio desulfuricans
  misc_feature (1)..(478): Homolog of NCBI NO: 23055378 NR Description: hypothetical protein [Geobacter metallireducens]
  misc_feature (336)..(493): Homolog of NCBI NO: 15228880 NR Description: cysteine-tRNA ligase-related protein [Arabidopsis
  misc_feature (1)..(330): Homolog of NCBI NO: 15228880 NR Description: cysteine-tRNA ligase-related protein [Arabidopsis
  misc_feature (1)..(482): Homolog of NCBI NO: 9758060 NR Description: cysteine-tRNA ligase [Arabidopsis thaliana]
  misc_feature (1)..(482): Homolog of NCBI NO: 15241557 NR Description: cysteine-tRNA ligase -related protein
  misc_feature (1)..(482): Homolog of NCBI NO: 37535144 NR Description: putative cysteinyl-tRNA synthetase
  misc_feature (1)..(493): Homolog of NCBI NO: 18402580 NR Description: cysteinyl-tRNA synthetase -related [Arabidopsis
  misc_feature (1)..(493): Homolog of NCBI NO: 25293240 NR Description: probable cysteinyl-tRNA synthetase
MSRKKELFKPKVEGKVGMYVCGVTAYDLSHIGHARVYVTFDVLLRYLKHLGYEVSYVRNFTDVDDKIIARAKELEEDPISLSRRFCEEFNRDMEQLQCLDPSVQPRVSDHIPQIIDLIKQILDNGYAYKVDGDIYFSVDKFPTYGKLSGRKLEDNRAGERVAVDTRKKHPADFALWKAAKEGEPFWESPWGRGRPGWHIECSAMSAAYLGYSFDIHGGGMDLVFPHHENEIAQSCAACDSSNISYWIHNGFVTVDSEKMSKSLGNFFTIRQVIDLYHPLALRLFLMGTHYRSPINYSDFLLESASERIFYIYQTLHDCESALGEKDSTFENGSVPSDTLTSINTFRTEFVASMSDDLLTPVTLAAMSEPLKTINDLIHTRKGKKQARREESLKALETTIRDVLTILGLMPTSYSEVLEQLKEKALKRAGLKEEDVLQRVQERTDARKNKEYERSDAIRKDLAKVGIALMDSPEGTTWRPAIPLALQEPVTTTP

SEQ ID NO: 49124 - DNA, 2438 bp, Arabidopsis thaliana; identical to SEQ ID NO: 47996
  misc_feature (1)..(2438): Ceres Seq. ID no. 13593104
  misc_feature: MA Experiment ID: 20000171 Result: Up-regulated in Transcription
  misc_feature: MA Experiment 20000171 PARAMETER Experiment Name: At_42deg_Heat_P Parameter: Age (day) Value: 14
  misc_feature: MA Experiment 20000171 PARAMETER Experiment Name: At_42deg_Heat_P Parameter: Organism Value: A. thaliana
  misc_feature: MA Experiment 20000171 PARAMETER Experiment Name: At_42deg_Heat_P Parameter: Plant Line Value: WS
  misc_feature: MA Experiment 20000171 PARAMETER Experiment Name: At_42deg_Heat_P Parameter: Temperature (deg C) Value: 42 vs. 22
  misc_feature: MA Experiment 20000171 PARAMETER Experiment Name: At_42deg_Heat_P Parameter: Timepoint (hr) Value: 1
  misc_feature: MA Experiment 20000171 PARAMETER Experiment Name: At_42deg_Heat_P Parameter: Tissue Value: Aerial
  misc_feature: MA Experiment ID: 20000173 Result: Up-regulated in Transcription
  misc_feature: MA Experiment 20000173 PARAMETER Experiment Name: At_42deg_Heat_P Parameter: Age (day) Value: 14
  misc_feature: MA Experiment 20000173 PARAMETER Experiment Name: At_42deg_Heat_P Parameter: Organism Value: A. thaliana
  misc_feature: MA Experiment 20000173 PARAMETER Experiment Name: At_42deg_Heat_P Parameter: Plant Line Value: WS
  misc_feature: MA Experiment 20000173 PARAMETER Experiment Name: At_42deg_Heat_P Parameter: Temperature (deg C) Value: 42 vs. 22
  misc_feature: MA Experiment 20000173 PARAMETER Experiment Name: At_42deg_Heat_P Parameter: Timepoint (hr) Value: 6
  misc_feature: MA Experiment 20000173 PARAMETER Experiment Name: At_42deg_Heat_P Parameter: Tissue Value: Aerial
  misc_feature: MA Experiment ID: 20000227 Result: Up-regulated in Transcription
  misc_feature: MA Experiment 20000227 PARAMETER Experiment Name: At_Root-Tips-vs-Tops_P Parameter: Tissue Value: Root Tips vs. Root Tops
  misc_feature: MA Experiment ID: 20000234 Result: Up-regulated in Transcription
  misc_feature: MA Experiment 20000234 PARAMETER Experiment Name: At_Siliques_P Parameter: Age (day) Value: 21
  misc_feature: MA Experiment 20000234 PARAMETER Experiment Name: At_Siliques_P Parameter: Organism Value: A. thaliana
  misc_feature: MA Experiment 20000234 PARAMETER Experiment Name: At_Siliques_P Parameter: Plant Line Value: WS
  misc_feature: MA Experiment 20000234 PARAMETER Experiment Name: At_Siliques_P Parameter: Tissue Value: Less Than 5mm Siliques vs. Whole Plant
  misc_feature: MA Experiment ID: 20000264 Result: Up-regulated in Transcription
  misc_feature: MA Experiment 20000264 PARAMETER Experiment Name: At_Open_Flower_P Parameter: Age (day) Value: 21
  misc_feature: MA Experiment 20000264 PARAMETER Experiment Name: At_Open_Flower_P Parameter: Plant Line Value: WS
  misc_feature: MA Experiment 20000264 PARAMETER Experiment Name: At_Open_Flower_P Parameter: Tissue Value: Open Flower vs. Whole Plant
  misc_feature: MA Experiment ID: 20000286 Result: Up-regulated in Transcription
  misc_feature: MA Experiment 20000286 PARAMETER Experiment Name: At_Open_Flower_P Parameter: Age (day) Value: 21
  misc_feature: MA Experiment 20000286 PARAMETER Experiment Name: At_Open_Flower_P Parameter: Plant Line Value: WS
  misc_feature: MA Experiment 20000286 PARAMETER Experiment Name: At_Open_Flower_P Parameter: Tissue Value: Half Open vs. Whole Plant
  misc_feature: MA Experiment ID: 20000439 Result: Up-regulated in Transcription
  misc_feature: MA Experiment 20000439 PARAMETER Experiment Name: At_Roots__P Parameter: Age (day) Value: 14 vs. 21
  misc_feature: MA Experiment 20000439 PARAMETER Experiment Name: At_Roots__P Parameter: Organism Value: A. thaliana
  misc_feature: MA Experiment 20000439 PARAMETER Experiment Name: At_Roots__P Parameter: Tissue Value: Roots vs. Whole Plant
  misc_feature: MA Experiment ID: 20000443 Result: Up-regulated in Transcription
  misc_feature: MA Experiment 20000443 PARAMETER Experiment Name: At_1uM_BR-BRZ__P Parameter: Tissue Value: Shoot Apices
  misc_feature: MA Experiment 20000443 PARAMETER Experiment Name: At_1uM_BR-BRZ__P Parameter: Treatment Value: 1uM BRZ vs. No Treatment
  misc_feature: MA Experiment ID: 20001248 Result: Down-regulated in Transcription
  misc_feature: MA Experiment 20001248 PARAMETER Experiment Name: At_Far-red-induction_P Parameter: Age (day) Value: 7
  misc_feature: MA Experiment 20001248 PARAMETER Experiment Name: At_Far-red-induction_P Parameter: Light Value: Far-red vs. White
  misc_feature: MA Experiment 20001248 PARAMETER Experiment Name: At_Far-red-induction_P Parameter: Organism Value: A. thaliana
  misc_feature: MA Experiment 20001248 PARAMETER Experiment Name: At_Far-red-induction_P Parameter: Plant Line Value: Columbia
  misc_feature: MA Experiment 20001248 PARAMETER Experiment Name: At_Far-red-induction_P Parameter: Timepoint (hr) Value: 4
  misc_feature: MA Experiment 20001248 PARAMETER Experiment Name: At_Far-red-induction_P Parameter: Tissue Value: Whole Plant
  misc_feature: MA Experiment ID: 20001450 Result: Down-regulated in Transcription
  misc_feature: MA Experiment 20001450 PARAMETER Experiment Name: At_Far-red-induction_P Parameter: Age (day) Value: 7
  misc_feature: MA Experiment 20001450 PARAMETER Experiment Name: At_Far-red-induction_P Parameter: Light Value: Far-red vs. White
  misc_feature: MA Experiment 20001450 PARAMETER Experiment Name: At_Far-red-induction_P Parameter: Organism Value: A. thaliana
  misc_feature: MA Experiment 20001450 PARAMETER Experiment Name: At_Far-red-induction_P Parameter: Plant Line Value: Columbia
  misc_feature: MA Experiment 20001450 PARAMETER Experiment Name: At_Far-red-induction_P Parameter: Timepoint (hr) Value: 8
  misc_feature: MA Experiment 20001450 PARAMETER Experiment Name: At_Far-red-induction_P Parameter: Tissue Value: Whole Plant
  misc_feature: MA Experiment ID: 20001451 Result: Down-regulated in Transcription
  misc_feature: MA Experiment 20001451 PARAMETER Experiment Name: At_Far-red-induction_P Parameter: Age (day) Value: 7
  misc_feature: MA Experiment 20001451 PARAMETER Experiment Name: At_Far-red-induction_P Parameter: Light Value: Far-red vs. White
  misc_feature: MA Experiment 20001451 PARAMETER Experiment Name: At_Far-red-induction_P Parameter: Organism Value: A. thaliana
  misc_feature: MA Experiment 20001451 PARAMETER Experiment Name: At_Far-red-induction_P Parameter: Plant Line Value: Columbia
  misc_feature: MA Experiment 20001451 PARAMETER Experiment Name: At_Far-red-induction_P Parameter: Timepoint (hr) Value: 24
  misc_feature: MA Experiment 20001451 PARAMETER Experiment Name: At_Far-red-induction_P Parameter: Tissue Value: Whole Plant
  misc_feature: MA Experiment ID: 20001555 Result: Up-regulated in Transcription
  misc_feature: MA Experiment 20001555 PARAMETER Experiment Name: At_Drought_Soil_Dry_P Parameter: Age (day) Value: 24
  misc_feature: MA Experiment 20001555 PARAMETER Experiment Name: At_Drought_Soil_Dry_P Parameter: Organism Value: A. thaliana
  misc_feature: MA Experiment 20001555 PARAMETER Experiment Name: At_Drought_Soil_Dry_P Parameter: Plant Line Value: WS
  misc_feature: MA Experiment 20001555 PARAMETER Experiment Name: At_Drought_Soil_Dry_P Parameter: Post Timepoint (hr) Value: None
  misc_feature: MA Experiment 20001555 PARAMETER Experiment Name: At_Drought_Soil_Dry_P Parameter: Post-Treatment Value: None
  misc_feature: MA Experiment 20001555 PARAMETER Experiment Name: At_Drought_Soil_Dry_P Parameter: Timepoint (day) Value: 10
  misc_feature: MA Experiment 20001555 PARAMETER Experiment Name: At_Drought_Soil_Dry_P Parameter: Treatment Value: Drought vs. No Drought
  misc_feature: MA Experiment ID: 20001556 Result: Up-regulated in Transcription
  misc_feature: MA Experiment 20001556 PARAMETER Experiment Name: At_Drought_Soil_Dry_P Parameter: Age (day) Value: 26
  misc_feature: MA Experiment 20001556 PARAMETER Experiment Name: At_Drought_Soil_Dry_P Parameter: Organism Value: A. thaliana
  misc_feature: MA Experiment 20001556 PARAMETER Experiment Name: At_Drought_Soil_Dry_P Parameter: Plant Line Value: WS
  misc_feature: MA Experiment 20001556 PARAMETER Experiment Name: At_Drought_Soil_Dry_P Parameter: Post Timepoint (hr) Value: None
  misc_feature: MA Experiment 20001556 PARAMETER Experiment Name: At_Drought_Soil_Dry_P Parameter: Post-Treatment Value: None
  misc_feature: MA Experiment 20001556 PARAMETER Experiment Name: At_Drought_Soil_Dry_P Parameter: Timepoint (day) Value: 12
  misc_feature: MA Experiment 20001556 PARAMETER Experiment Name: At_Drought_Soil_Dry_P Parameter: Treatment Value: Drought vs. No Drought
  misc_feature: MA Experiment ID: 20001557 Result: Up-regulated in Transcription
  misc_feature: MA Experiment 20001557 PARAMETER Experiment Name: At_Drought_Soil_Dry_P Parameter: Age (day) Value: 27
  misc_feature: MA Experiment 20001557 PARAMETER Experiment Name: At_Drought_Soil_Dry_P Parameter: Organism Value: A. thaliana
  misc_feature: MA Experiment 20001557 PARAMETER Experiment Name: At_Drought_Soil_Dry_P Parameter: Plant Line Value: WS
  misc_feature: MA Experiment 20001557 PARAMETER Experiment Name: At_Drought_Soil_Dry_P Parameter: Post Timepoint (hr) Value: 3
  misc_feature: MA Experiment 20001557 PARAMETER Experiment Name: At_Drought_Soil_Dry_P Parameter: Post-Treatment Value: Re-Water vs. No Drought
  misc_feature: MA Experiment 20001557 PARAMETER Experiment Name: At_Drought_Soil_Dry_P Parameter: Timepoint (day) Value: 13
  misc_feature: MA Experiment 20001557 PARAMETER Experiment Name: At_Drought_Soil_Dry_P Parameter: Treatment Value: Drought vs. No Drought
  misc_feature: MA Experiment ID: 20001559 Result: Up-regulated in Transcription
  misc_feature: MA Experiment 20001559 PARAMETER Experiment Name: At_Drought_Soil_Dry_P Parameter: Age (day) Value: 28
  misc_feature: MA Experiment 20001559 PARAMETER Experiment Name: At_Drought_Soil_Dry_P Parameter: Organism Value: A. thaliana
  misc_feature: MA Experiment 20001559 PARAMETER Experiment Name: At_Drought_Soil_Dry_P Parameter: Plant Line Value: WS
  misc_feature: MA Experiment 20001559 PARAMETER Experiment Name: At_Drought_Soil_Dry_P Parameter: Post Timepoint (hr) Value: 29
  misc_feature: MA Experiment 20001559 PARAMETER Experiment Name: At_Drought_Soil_Dry_P Parameter: Post-Treatment Value: Re-Water vs. No Drought
  misc_feature: MA Experiment 20001559 PARAMETER Experiment Name: At_Drought_Soil_Dry_P Parameter: Timepoint (day) Value: 14
  misc_feature: MA Experiment 20001559 PARAMETER Experiment Name: At_Drought_Soil_Dry_P Parameter: Treatment Value: Drought vs. No Drought
  misc_feature: MA Experiment ID: 20001908 Result: Up-regulated in Transcription
  misc_feature: MA Experiment 20001908 PARAMETER Experiment Name: At_Drought_Reproduction_P Parameter: Age (day) Value: 40
  misc_feature: MA Experiment 20001908 PARAMETER Experiment Name: At_Drought_Reproduction_P Parameter: Organism Value: A. thaliana
  misc_feature: MA Experiment 20001908 PARAMETER Experiment Name: At_Drought_Reproduction_P Parameter: Plant Line Value: WS
  misc_feature: MA Experiment 20001908 PARAMETER Experiment Name: At_Drought_Reproduction_P Parameter: Timepoint (day) Value: 10
  misc_feature: MA Experiment 20001908 PARAMETER Experiment Name: At_Drought_Reproduction_P Parameter: Tissue Value: Siliques
  misc_feature: MA Experiment 20001908 PARAMETER Experiment Name: At_Drought_Reproduction_P Parameter: Treatment Value: Drought vs. No Drought

SEQ ID NO: 49125 - protein, 682 aa, Arabidopsis thaliana; identical to SEQ ID NO: 47997
  peptide (1)..(682): Ceres Seq. ID no. 13593105
  misc_feature (59)..(653): Pfam Name: Hsp70 protein Pfam Description: Hsp70 protein
  misc_feature (59)..(653): Pfam Name: Hsp70 protein Pfam Description: Hsp70 protein
  misc_feature (59)..(682): Homolog of NCBI NO: 13473986 NR Description: heat shock protein dnaK (70) [Mesorhizobium loti]
  misc_feature (21)..(679): Homolog of NCBI NO: 7441874 NR Description: dnaK-type molecular chaperone F20D10.30 -
  misc_feature (1)..(679): Homolog of NCBI NO: 30691626 NR Description: heat shock protein mtHsc70-1 [Arabidopsis
  misc_feature (46)..(682): Homolog of NCBI NO: 27476086 NR Description: Putative heat shock 70 KD protein, mitochondrial
  misc_feature (1)..(682): Homolog of NCBI NO: 7441881 NR Description: dnaK-type molecular chaperone HSC70-10,
  misc_feature (59)..(682): Homolog of NCBI NO: 13473986 NR Description: heat shock protein dnaK (70) [Mesorhizobium loti]
  misc_feature (1)..(679): Homolog of NCBI NO: 30691626 NR Description: heat shock protein mtHsc70-1 [Arabidopsis
  misc_feature (1)..(682): Homolog of NCBI NO: 7441881 NR Description: dnaK-type molecular chaperone HSC70-10,
  misc_feature (4)..(682): Homolog of NCBI NO: 399940 NR Description: HEAT SHOCK 70 KD PROTEIN, MITOCHONDRIAL PRECURSOR
  misc_feature (4)..(682): Homolog of NCBI NO: 7441844 NR Description: dnaK-type molecular chaperone PHSP1 precursor,
  misc_feature (4)..(682): Homolog of NCBI NO: 585272 NR Description: HEAT SHOCK 70 KD PROTEIN, MITOCHONDRIAL PRECURSOR
  misc_feature (1)..(682): Homolog of NCBI NO: 585273 NR Description: Heat shock 70 kDa protein, mitochondrial
  misc_feature (1)..(682): Homolog of NCBI NO: 7441879 NR Description: dnaK-type molecular chaperone HSC70-11,
  misc_feature (46)..(682): Homolog of NCBI NO: 27476086 NR Description: Putative heat shock 70 KD protein, mitochondrial
  misc_feature (21)..(679): Homolog of NCBI NO: 7441874 NR Description: dnaK-type molecular chaperone F20D10.30 -
  misc_feature (1)..(682): Homolog of NCBI NO: 7441879 NR Description: dnaK-type molecular chaperone HSC70-11,
  misc_feature (1)..(682): Homolog of NCBI NO: 585273 NR Description: Heat shock 70 kDa protein, mitochondrial
  misc_feature (4)..(682): Homolog of NCBI NO: 585272 NR Description: HEAT SHOCK 70 KD PROTEIN, MITOCHONDRIAL PRECURSOR
  misc_feature (4)..(682): Homolog of NCBI NO: 7441844 NR Description: dnaK-type molecular chaperone PHSP1 precursor,
  misc_feature (4)..(682): Homolog of NCBI NO: 399940 NR Description: HEAT SHOCK 70 KD PROTEIN, MITOCHONDRIAL PRECURSOR

SEQ ID NO: 49126 - protein, 609 aa, Arabidopsis thaliana; identical to SEQ ID NO: 47998
  peptide (1)..(609): Ceres Seq. ID no. 13593106
  misc_feature (1)..(580): Pfam Name: Hsp70 protein Pfam Description: Hsp70 protein
  misc_feature (1)..(580): Pfam Name: Hsp70 protein Pfam Description: Hsp70 protein
  misc_feature (1)..(609): Homolog of NCBI NO: 13473986 NR Description: heat shock protein dnaK (70) [Mesorhizobium loti]
  misc_feature (1)..(606): Homolog of NCBI NO: 7441874 NR Description: dnaK-type molecular chaperone F20D10.30 -
  misc_feature (1)..(606): Homolog of NCBI NO: 30691626 NR Description: heat shock protein mtHsc70-1 [Arabidopsis
  misc_feature (1)..(609): Homolog of NCBI NO: 27476086 NR Description: Putative heat shock 70 KD protein, mitochondrial
  misc_feature (1)..(609): Homolog of NCBI NO: 7441881 NR Description: dnaK-type molecular chaperone HSC70-10,
  misc_feature (1)..(609): Homolog of NCBI NO: 13473986 NR Description: heat shock protein dnaK (70) [Mesorhizobium loti]
  misc_feature (1)..(606): Homolog of NCBI NO: 30691626 NR Description: heat shock protein mtHsc70-1 [Arabidopsis
  misc_feature (1)..(609): Homolog of NCBI NO: 7441881 NR Description: dnaK-type molecular chaperone HSC70-10,
  misc_feature (1)..(609): Homolog of NCBI NO: 399940 NR Description: HEAT SHOCK 70 KD PROTEIN, MITOCHONDRIAL PRECURSOR
  misc_feature (1)..(609): Homolog of NCBI NO: 7441844 NR Description: dnaK-type molecular chaperone PHSP1 precursor,
  misc_feature (1)..(609): Homolog of NCBI NO: 585272 NR Description: HEAT SHOCK 70 KD PROTEIN, MITOCHONDRIAL PRECURSOR
  misc_feature (1)..(609): Homolog of NCBI NO: 585273 NR Description: Heat shock 70 kDa protein, mitochondrial
  misc_feature (1)..(609): Homolog of NCBI NO: 7441879 NR Description: dnaK-type molecular chaperone HSC70-11,
  misc_feature (1)..(609): Homolog of NCBI NO: 27476086 NR Description: Putative heat shock 70 KD protein, mitochondrial
  misc_feature (1)..(606): Homolog of NCBI NO: 7441874 NR Description: dnaK-type molecular chaperone F20D10.30 -
  misc_feature (1)..(609): Homolog of NCBI NO: 7441879 NR Description: dnaK-type molecular chaperone HSC70-11,
  misc_feature (1)..(609): Homolog of NCBI NO: 585273 NR Description: Heat shock 70 kDa protein, mitochondrial
  misc_feature (1)..(609): Homolog of NCBI NO: 585272 NR Description: HEAT SHOCK 70 KD PROTEIN, MITOCHONDRIAL PRECURSOR
  misc_feature (1)..(609): Homolog of NCBI NO: 7441844 NR Description: dnaK-type molecular chaperone PHSP1 precursor,
  misc_feature (1)..(609): Homolog of NCBI NO: 399940 NR Description: HEAT SHOCK 70 KD PROTEIN, MITOCHONDRIAL PRECURSOR

SEQ ID NO: 49127 - protein, 542 aa, Arabidopsis thaliana; identical to SEQ ID NO: 47999
  peptide (1)..(542): Ceres Seq. ID no. 13593107
  misc_feature (1)..(513): Pfam Name: Hsp70 protein Pfam Description: Hsp70 protein
  misc_feature (1)..(513): Pfam Name: Hsp70 protein Pfam Description: Hsp70 protein
  misc_feature (1)..(542): Homolog of NCBI NO: 13473986 NR Description: heat shock protein dnaK (70) [Mesorhizobium loti]
  misc_feature (1)..(539): Homolog of NCBI NO: 7441874 NR Description: dnaK-type molecular chaperone F20D10.30 -
  misc_feature (1)..(539): Homolog of NCBI NO: 30691626 NR Description: heat shock protein mtHsc70-1 [Arabidopsis
  misc_feature (1)..(542): Homolog of NCBI NO: 27476086 NR Description: Putative heat shock 70 KD protein, mitochondrial
  misc_feature (1)..(542): Homolog of NCBI NO: 7441881 NR Description: dnaK-type molecular chaperone HSC70-10,
  misc_feature (1)..(542): Homolog of NCBI NO: 13473986 NR Description: heat shock protein dnaK (70) [Mesorhizobium loti]
  misc_feature (1)..(539): Homolog of NCBI NO: 30691626 NR Description: heat shock protein mtHsc70-1 [Arabidopsis
  misc_feature (1)..(542): Homolog of NCBI NO: 7441881 NR Description: dnaK-type molecular chaperone HSC70-10,
  misc_feature (1)..(542): Homolog of NCBI NO: 399940 NR Description: HEAT SHOCK 70 KD PROTEIN, MITOCHONDRIAL PRECURSOR
  misc_feature (1)..(542): Homolog of NCBI NO: 7441844 NR Description: dnaK-type molecular chaperone PHSP1 precursor,
  misc_feature (1)..(542): Homolog of NCBI NO: 585272 NR Description: HEAT SHOCK 70 KD PROTEIN, MITOCHONDRIAL PRECURSOR
  misc_feature (1)..(542): Homolog of NCBI NO: 585273 NR Description: Heat shock 70 kDa protein, mitochondrial
  misc_feature (1)..(542): Homolog of NCBI NO: 7441879 NR Description: dnaK-type molecular chaperone HSC70-11,
  misc_feature (1)..(542): Homolog of NCBI NO: 27476086 NR Description: Putative heat shock 70 KD protein, mitochondrial
  misc_feature (1)..(539): Homolog of NCBI NO: 7441874 NR Description: dnaK-type molecular chaperone F20D10.30 -
  misc_feature (1)..(542): Homolog of NCBI NO: 7441879 NR Description: dnaK-type molecular chaperone HSC70-11,
  misc_feature (1)..(542): Homolog of NCBI NO: 585273 NR Description: Heat shock 70 kDa protein, mitochondrial
  misc_feature (1)..(542): Homolog of NCBI NO: 585272 NR Description: HEAT SHOCK 70 KD PROTEIN, MITOCHONDRIAL PRECURSOR
  misc_feature (1)..(542): Homolog of NCBI NO: 7441844 NR Description: dnaK-type molecular chaperone PHSP1 precursor,
  misc_feature (1)..(542): Homolog of NCBI NO: 399940 NR Description: HEAT SHOCK 70 KD PROTEIN, MITOCHONDRIAL PRECURSOR

SEQ ID NO: 49128 - DNA, 1182 bp, Arabidopsis thaliana
  misc_feature (1)..(1182): Ceres Seq. ID no. 12601515
  misc_feature: MA Experiment ID: 20000180 Result: Down-regulated in Transcription
  misc_feature: MA Experiment 20000180 PARAMETER Experiment Name: At_Germinating_Seeds_P Parameter: Age (hr) Value: 24 vs. 0
  misc_feature: MA Experiment 20000180 PARAMETER Experiment Name: At_Germinating_Seeds_P Parameter: Tissue Value: Germinating Seeds
  misc_feature: MA Experiment ID: 20000227 Result: Down-regulated in Transcription
  misc_feature: MA Experiment 20000227 PARAMETER Experiment Name: At_Root-Tips-vs-Tops_P Parameter: Tissue Value: Root Tips vs. Root Tops
  misc_feature: MA Experiment ID: 20000234 Result: Up-regulated in Transcription
  misc_feature: MA Experiment 20000234 PARAMETER Experiment Name: At_Siliques_P Parameter: Age (day) Value: 21
  misc_feature: MA Experiment 20000234 PARAMETER Experiment Name: At_Siliques_P Parameter: Organism Value: A. thaliana
  misc_feature: MA Experiment 20000234 PARAMETER Experiment Name: At_Siliques_P Parameter: Plant Line Value: WS
  misc_feature: MA Experiment 20000234 PARAMETER Experiment Name: At_Siliques_P Parameter: Tissue Value: Less Than 5mm Siliques vs. Whole Plant
  misc_feature: MA Experiment ID: 20000264 Result: Up-regulated in Transcription
  misc_feature: MA Experiment 20000264 PARAMETER Experiment Name: At_Open_Flower_P Parameter: Age (day) Value: 21
  misc_feature: MA Experiment 20000264 PARAMETER Experiment Name: At_Open_Flower_P Parameter: Plant Line Value: WS
  misc_feature: MA Experiment 20000264 PARAMETER Experiment Name: At_Open_Flower_P Parameter: Tissue Value: Open Flower vs. Whole Plant
  misc_feature: MA Experiment ID: 20000265 Result: Up-regulated in Transcription
  misc_feature: MA Experiment 20000265 PARAMETER Experiment Name: At_Open_Flower_P Parameter: Age (day) Value: 21
  misc_feature: MA Experiment 20000265 PARAMETER Experiment Name: At_Open_Flower_P Parameter: Plant Line Value: WS
  misc_feature: MA Experiment 20000265 PARAMETER Experiment Name: At_Open_Flower_P Parameter: Tissue Value: Closed Flower vs. Whole Plant
acttcatcgtcccaaaaaacgcctctgtttcaccggtacgttcctgcagctctctcttaccaatactctcttagatattctcacgcggattcgtttgccatcttagttcttcgccgtgtaagctcgtctctagccatggctcttccgctcgggaagctcaccatcctcatcggtgcaggtcttattggatcagcattttctaaagaagggggcttaccagatgtctccaatttggtttctggtgcttttaagatggtattcaggcaactgaaacaagacgaacctagcaaatcagctagcaaaccccacgatgatgtacttgtggcccaggttaacagtcttaggcatgagatacagttgctggggtcaaacagacctatcaccattgtttcaccttcaggatcaggtggtagaaactatggtttgatcattatcgttggggtgataggctacggatatgtgtggtggaagggctggaaacttccagattttatgtttgcaacaaggcgtagcttatcagatgcatgtaataatgttggcaaccagatcgatggtttttactcatcactcaagggtacaaaacgagagttaagttcagaaattgatatgatgggtcgtcgtttggatgcaaatacagaagtaattcaagaaacaatacaagaggtggctaagctacaggatggtacatcatttataaaggatgacgttaaggctgttttcgatgcttttgaaaatctggcaagcaaagtgtgtcgtatagagggaaatcaggatatcacacttagaggagttggggctctgcatgctcagtgtcaggagaaccaaagaattcaagagtccaataaggctttgccatcaacttcatcactgccagcccttgaggcagctcctatggcaccctcttcaaagactctgtctttacctcctgcttctcccgatgaatcccagtccccgtcaacccctaatgtagctcaaaagtcacggggcctacttcagcacactcaatctatgtctggtttgaaggacataaatgaaagctctagtagccacaacacgtcttcaaatggaatatattttgggggaaacggtgcatcaggatcgagttcgggcgtgcttggtaggttctcaatagcaagaataatgaggactcgtactgtggtcaacacagtgtctactaactga

SEQ ID NO: 49129 - protein, 393 aa, Arabidopsis thaliana
  peptide (1)..(393): Ceres Seq. ID no. 12601516
  misc_feature (96)..(374): Homolog of NCBI NO: 15128438 NR Description: contains EST D16001(C2001)~similar to Oryza
  misc_feature (191)..(372): Homolog of NCBI NO: 7486368 NR Description: hypothetical protein F3I6.20 - Arabidopsis
  misc_feature (50)..(377): Homolog of NCBI NO: 34894218 NR Description: P0439B06.30 [Oryza sativa (japonica
  misc_feature (80)..(223): Homolog of NCBI NO: 7486369 NR Description: hypothetical protein F3I6.21 - Arabidopsis
  misc_feature (191)..(283): Homolog of NCBI NO: 7486369 NR Description: hypothetical protein F3I6.21 - Arabidopsis
  misc_feature (46)..(390): Homolog of NCBI NO: 7208775 NR Description: hypothetical protein [Cicer arietinum]
  misc_feature (279)..(376): Homolog of NCBI NO: 7486368 NR Description: hypothetical protein F3I6.20 - Arabidopsis
  misc_feature (46)..(198): Homolog of NCBI NO: 7486368 NR Description: hypothetical protein F3I6.20 - Arabidopsis
  misc_feature (46)..(393): Homolog of NCBI NO: 30688826 NR Description: expressed protein [Arabidopsis thaliana]
  misc_feature (46)..(393): Homolog of NCBI NO: 22329773 NR Description: Expressed protein
TSSSQKTPLFHRYVPAALSYQYSLRYSHADSFAILVLRRVSSSLAMALPLGKLTILIGAGLIGSAFSKEGGLPDVSNLVSGAFKMVFRQLKQDEPSKSASKPHDDVLVAQVNSLRHEIQLLGSNRPITIVSPSGSGGRNYGLIIIVGVIGYGYVWWKGWKLPDFMFATRRSLSDACNNVGNQIDGFYSSLKGTKRELSSEIDMMGRRLDANTEVIQETIQEVAKLQDGTSFIKDDVKAVFDAFENLASKVCRIEGNQDITLRGVGALHAQCQENQRIQESNKALPSTSSLPALEAAPMAPSSKTLSLPPASPDESQSPSTPNVAQKSRGLLQHTQSMSGLKDINESSSSHNTSSNGIYFGGNGASGSSSGVLGRFSIARIMRTRTVVNTVSTN

SEQ ID NO: 49130 - protein, 348 aa, Arabidopsis thaliana
  peptide (1)..(348): Ceres Seq. ID no. 12601517
  misc_feature (51)..(329): Homolog of NCBI NO: 15128438 NR Description: contains EST D16001(C2001)~similar to Oryza
  misc_feature (146)..(327): Homolog of NCBI NO: 7486368 NR Description: hypothetical protein F3I6.20 - Arabidopsis
  misc_feature (5)..(332): Homolog of NCBI NO: 34894218 NR Description: P0439B06.30 [Oryza sativa (japonica
  misc_feature (35)..(178): Homolog of NCBI NO: 7486369 NR Description: hypothetical protein F3I6.21 - Arabidopsis
  misc_feature (146)..(238): Homolog of NCBI NO: 7486369 NR Description: hypothetical protein F3I6.21 - Arabidopsis
  misc_feature (1)..(345): Homolog of NCBI NO: 7208775 NR Description: hypothetical protein [Cicer arietinum]
  misc_feature (234)..(331): Homolog of NCBI NO: 7486368 NR Description: hypothetical protein F3I6.20 - Arabidopsis
  misc_feature (1)..(153): Homolog of NCBI NO: 7486368 NR Description: hypothetical protein F3I6.20 - Arabidopsis
  misc_feature (1)..(348): Homolog of NCBI NO: 30688826 NR Description: expressed protein [Arabidopsis thaliana]
  misc_feature (1)..(348): Homolog of NCBI NO: 22329773 NR Description: Expressed protein
MALPLGKLTILIGAGLIGSAFSKEGGLPDVSNLVSGAFKMVFRQLKQDEPSKSASKPHDDVLVAQVNSLRHEIQLLGSNRPITIVSPSGSGGRNYGLIIIVGVIGYGYVWWKGWKLPDFMFATRRSLSDACNNVGNQIDGFYSSLKGTKRELSSEIDMMGRRLDANTEVIQETIQEVAKLQDGTSFIKDDVKAVFDAFENLASKVCRIEGNQDITLRGVGALHAQCQENQRIQESNKALPSTSSLPALEAAPMAPSSKTLSLPPASPDESQSPSTPNVAQKSRGLLQHTQSMSGLKDINESSSSHNTSSNGIYFGGNGASGSSSGVLGRFSIARIMRTRTVVNTVSTN

SEQ ID NO: 49131 - protein, 309 aa, Arabidopsis thaliana
  peptide (1)..(309): Ceres Seq. ID no. 12601518
  misc_feature (12)..(290): Homolog of NCBI NO: 15128438 NR Description: contains EST D16001(C2001)~similar to Oryza
  misc_feature (107)..(288): Homolog of NCBI NO: 7486368 NR Description: hypothetical protein F3I6.20 - Arabidopsis
  misc_feature (1)..(293): Homolog of NCBI NO: 34894218 NR Description: P0439B06.30 [Oryza sativa (japonica
  misc_feature (1)..(139): Homolog of NCBI NO: 7486369 NR Description: hypothetical protein F3I6.21 - Arabidopsis
  misc_feature (107)..(199): Homolog of NCBI NO: 7486369 NR Description: hypothetical protein F3I6.21 - Arabidopsis
  misc_feature (1)..(306): Homolog of NCBI NO: 7208775 NR Description: hypothetical protein [Cicer arietinum]
  misc_feature (195)..(292): Homolog of NCBI NO: 7486368 NR Description: hypothetical protein F3I6.20 - Arabidopsis
  misc_feature (1)..(114): Homolog of NCBI NO: 7486368 NR Description: hypothetical protein F3I6.20 - Arabidopsis
  misc_feature (1)..(309): Homolog of NCBI NO: 30688826 NR Description: expressed protein [Arabidopsis thaliana]
  misc_feature (1)..(309): Homolog of NCBI NO: 22329773 NR Description: Expressed protein
MVFRQLKQDEPSKSASKPHDDVLVAQVNSLRHEIQLLGSNRPITIVSPSGSGGRNYGLIIIVGVIGYGYVWWKGWKLPDFMFATRRSLSDACNNVGNQIDGFYSSLKGTKRELSSEIDMMGRRLDANTEVIQETIQEVAKLQDGTSFIKDDVKAVFDAFENLASKVCRIEGNQDITLRGVGALHAQCQENQRIQESNKALPSTSSLPALEAAPMAPSSKTLSLPPASPDESQSPSTPNVAQKSRGLLQHTQSMSGLKDINESSSSHNTSSNGIYFGGNGASGSSSGVLGRFSIARIMRTRTVVNTVSTN

SEQ ID NO: 49132 - DNA, 1681 bp, Arabidopsis thaliana
  misc_feature (1)..(1681): Ceres Seq. ID no. 12601473
  misc_feature: MA Experiment ID: 20000495 Result: Down-regulated in Transcription
  misc_feature: MA Experiment 20000495 PARAMETER Experiment Name: At_Guard_Cells_P Parameter: Harvest Date Value: 8/2/2002
  misc_feature: MA Experiment 20000495 PARAMETER Experiment Name: At_Guard_Cells_P Parameter: Organism Value: A. thaliana
  misc_feature: MA Experiment 20000495 PARAMETER Experiment Name: At_Guard_Cells_P Parameter: Tissue Value: Guard Cells vs. Leaves
  misc_feature: MA Experiment ID: 20000496 Result: Down-regulated in Transcription
  misc_feature: MA Experiment 20000496 PARAMETER Experiment Name: At_Guard_Cells_P Parameter: Harvest Date Value: 7/19/2002
  misc_feature: MA Experiment 20000496 PARAMETER Experiment Name: At_Guard_Cells_P Parameter: Organism Value: Canola
  misc_feature: MA Experiment 20000496 PARAMETER Experiment Name: At_Guard_Cells_P Parameter: Tissue Value: Guard Cells vs. Leaves
  misc_feature: MA Experiment ID: 20001451 Result: Down-regulated in Transcription
  misc_feature: MA Experiment 20001451 PARAMETER Experiment Name: At_Far-red-induction_P Parameter: Age (day) Value: 7
  misc_feature: MA Experiment 20001451 PARAMETER Experiment Name: At_Far-red-induction_P Parameter: Light Value: Far-red vs. White
  misc_feature: MA Experiment 20001451 PARAMETER Experiment Name: At_Far-red-induction_P Parameter: Organism Value: A. thaliana
  misc_feature: MA Experiment 20001451 PARAMETER Experiment Name: At_Far-red-induction_P Parameter: Plant Line Value: Columbia
  misc_feature: MA Experiment 20001451 PARAMETER Experiment Name: At_Far-red-induction_P Parameter: Timepoint (hr) Value: 24
  misc_feature: MA Experiment 20001451 PARAMETER Experiment Name: At_Far-red-induction_P Parameter: Tissue Value: Whole Plant
aaagtgtcacattcattcctccgattcttcttcttcacctccccttcttcgaatttctctccttcccttttcatccttttgaaatttctcgtctttcttcttcgaaattggaaactcacagcagcacctgaaaaataacatcataagcttcaagatccaatttgggtcgttctgtgttttcttctgatgggtctcgtcgaaatgtagaacaagtttggagatgttgacaatggacaaggaatttgattcaaagcttactcttcaagggaattcatcttcaaatggtgaaactatttccagaagcaaaagcttcgcctttaaggctcctcaggagaatttcacttaccatgatttcgagctcggcaagatctatggcgttggctcttattctaaggttgttagggcgaagaagaaggataatggaactgtgtatgccttgaagatcatggacaaaaagtttatcaccaaggagaataaaacagcttatgtcaaattggagaggattgttcttgatcaactcgaacatcccgggattgtgaaactcttctttacgtttcaggatacacaatcactatacatggcgcttgagtcttgtgaaggtggggaacttttcgaccaaatcaccagaaaaggtcgtctatctgaggatgaagctcggttctacagtgcagaagttgttgatgctcttgagtatatacataatatgggactgatacatcgagatattaagccggagaatctgttgttaactttagatgggcacataaagattgctgattttggtagcgtaaagccaatgcaagacagccaaatcacagtgcttcctaatgcggcttctgatgataaggcgtgcacttttgtcgggacggctgcatatgttcctcctgaagttctaaactcctctccagcaacgttcggaaatgatctctgggcactcggctgcactctgtaccaaatgctttcaggaacttccccattcaaggatgcaagtgaatggctgattttccaaagaattatagctagagatataaagtttccaaatcatttctcagaagcagcaagagacctcatcgaccgattgctagatacagatcctagtagaagaccaggagctggatcagaaggttatgattctctcaagagacatcctttcttcaagggagttgactggaagaacctaaggtcacaaactcctccaaaactagctccagatcctgcgtctcaatcagcatctcctgagagggacggttctccatggaatccaacacatgttggagatacctcagtcttgcagaacgatggacacaatggactctctgaatcctcaggttccataactcggcttgcctccatagactctttcgattcaagatggcaacagtttctagaaccgggagaatcggttctaatgatatcagcagtgaagaagctacagaaaatcacaagtaagaaggtgcagctaatactcaccaacaaaccaagactgatatacgttgacccatcaaagcttgtagtaaaagggaatattatctggtctgataactccaacgacctcaacgttcaagtctcaagtccttcccatttcaagatttgcacaccgaagaaagttttatcgtttgaagatgcgaagcaaagagctttgcagtggaaaaaggcaatcgaaactcttcaaaaccgttga

SEQ ID NO: 49133 - protein, 486 aa, Arabidopsis thaliana
  peptide (1)..(486): Ceres Seq. ID no. 12601474
  misc_feature (45)..(312): Pfam Name: Protein kinase domain Pfam Description: Protein kinase domain
  misc_feature (44)..(328): Homolog of NCBI NO: 13592023 NR Description: 3-phosphoinositide dependent protein kinase-1
  misc_feature (333)..(481): Homolog of NCBI NO: 4505695 NR Description: 3-phosphoinositide dependent protein kinase-1;
  misc_feature (44)..(368): Homolog of NCBI NO: 4505695 NR Description: 3-phosphoinositide dependent protein kinase-1;
  misc_feature (14)..(481): Homolog of NCBI NO: 38524443 NR Description: phosphoinositide dependent kinase-1 [Asterina
  misc_feature (145)..(484): Homolog of NCBI NO: 5001830 NR Description: 3-phosphoinositide-dependent protein kinase-1
  misc_feature (4)..(484): Homolog of NCBI NO: 34908708 NR Description: putative 3-phosphoinositide-dependent protein
  misc_feature (4)..(486): Homolog of NCBI NO: 11357147 NR Description: 3-phosphoinositide-dependent protein kinase-1
  misc_feature (1)..(486): Homolog of NCBI NO: 18414583 NR Description: 3-phosphoinositide-dependent protein kinase-1 PDK1
  misc_feature (4)..(486): Homolog of NCBI NO: 8567784 NR Description: 3-phosphoinositide-dependent protein kinase-1,
  misc_feature (1)..(486): Homolog of NCBI NO: 30681369 NR Description: 3-phosphoinositide-dependent protein kinase,
MLTMDKEFDSKLTLQGNSSSNGETISRSKSFAFKAPQENFTYHDFELGKIYGVGSYSKVVRAKKKDNGTVYALKIMDKKFITKENKTAYVKLERIVLDQLEHPGIVKLFFTFQDTQSLYMALESCEGGELFDQITRKGRLSEDEARFYSAEVVDALEYIHNMGLIHRDIKPENLLLTLDGHIKIADFGSVKPMQDSQITVLPNAASDDKACTFVGTAAYVPPEVLNSSPATFGNDLWALGCTLYQMLSGTSPFKDASEWLIFQRIIARDIKFPNHFSEAARDLIDRLLDTDPSRRPGAGSEGYDSLKRHPFFKGVDWKNLRSQTPPKLAPDPASQSASPERDGSPWNPTHVGDTSVLQNDGHNGLSESSGSITRLASIDSFDSRWQQFLEPGESVLMISAVKKLQKITSKKVQLILTNKPRLIYVDPSKLVVKGNIIWSDNSNDLNVQVSSPSHFKICTPKKVLSFEDAKQRALQWKKAIETLQNR

SEQ ID NO: 49134 - protein, 483 aa, Arabidopsis thaliana
  peptide (1)..(483): Ceres Seq. ID no. 12601475
  misc_feature (42)..(309): Pfam Name: Protein kinase domain Pfam Description: Protein kinase domain
  misc_feature (41)..(325): Homolog of NCBI NO: 13592023 NR Description: 3-phosphoinositide dependent protein kinase-1
  misc_feature (330)..(478): Homolog of NCBI NO: 4505695 NR Description: 3-phosphoinositide dependent protein kinase-1;
  misc_feature (41)..(365): Homolog of NCBI NO: 4505695 NR Description: 3-phosphoinositide dependent protein kinase-1;
  misc_feature (11)..(478): Homolog of NCBI NO: 38524443 NR Description: phosphoinositide dependent kinase-1 [Asterina
  misc_feature (142)..(481): Homolog of NCBI NO: 5001830 NR Description: 3-phosphoinositide-dependent protein kinase-1
  misc_feature (1)..(481): Homolog of NCBI NO: 34908708 NR Description: putative 3-phosphoinositide-dependent protein
  misc_feature (1)..(483): Homolog of NCBI NO: 11357147 NR Description: 3-phosphoinositide-dependent protein kinase-1
  misc_feature (1)..(483): Homolog of NCBI NO: 18414583 NR Description: 3-phosphoinositide-dependent protein kinase-1 PDK1
  misc_feature (1)..(483): Homolog of NCBI NO: 8567784 NR Description: 3-phosphoinositide-dependent protein kinase-1,
  misc_feature (1)..(483): Homolog of NCBI NO: 30681369 NR Description: 3-phosphoinositide-dependent protein kinase,
MDKEFDSKLTLQGNSSSNGETISRSKSFAFKAPQENFTYHDFELGKIYGVGSYSKVVRAKKKDNGTVYALKIMDKKFITKENKTAYVKLERIVLDQLEHPGIVKLFFTFQDTQSLYMALESCEGGELFDQITRKGRLSEDEARFYSAEVVDALEYIHNMGLIHRDIKPENLLLTLDGHIKIADFGSVKPMQDSQITVLPNAASDDKACTFVGTAAYVPPEVLNSSPATFGNDLWALGCTLYQMLSGTSPFKDASEWLIFQRIIARDIKFPNHFSEAARDLIDRLLDTDPSRRPGAGSEGYDSLKRHPFFKGVDWKNLRSQTPPKLAPDPASQSASPERDGSPWNPTHVGDTSVLQNDGHNGLSESSGSITRLASIDSFDSRWQQFLEPGESVLMISAVKKLQKITSKKVQLILTNKPRLIYVDPSKLVVKGNIIWSDNSNDLNVQVSSPSHFKICTPKKVLSFEDAKQRALQWKKAIETLQNR

SEQ ID NO: 49135 - protein, 411 aa, Arabidopsis thaliana
  peptide (1)..(411): Ceres Seq. ID no. 12601476
  misc_feature (1)..(237): Pfam Name: Protein kinase domain Pfam Description: Protein kinase domain
  misc_feature (1)..(253): Homolog of NCBI NO: 13592023 NR Description: 3-phosphoinositide dependent protein kinase-1
  misc_feature (258)..(406): Homolog of NCBI NO: 4505695 NR Description: 3-phosphoinositide dependent protein kinase-1;
  misc_feature (1)..(293): Homolog of NCBI NO: 4505695 NR Description: 3-phosphoinositide dependent protein kinase-1;
  misc_feature (1)..(406): Homolog of NCBI NO: 38524443 NR Description: phosphoinositide dependent kinase-1 [Asterina
  misc_feature (70)..(409): Homolog of NCBI NO: 5001830 NR Description: 3-phosphoinositide-dependent protein kinase-1
  misc_feature (1)..(409): Homolog of NCBI NO: 34908708 NR Description: putative 3-phosphoinositide-dependent protein
  misc_feature (1)..(411): Homolog of NCBI NO: 11357147 NR Description: 3-phosphoinositide-dependent protein kinase-1
  misc_feature (1)..(411): Homolog of NCBI NO: 18414583 NR Description: 3-phosphoinositide-dependent protein kinase-1 PDK1
  misc_feature (1)..(411): Homolog of NCBI NO: 8567784 NR Description: 3-phosphoinositide-dependent protein kinase-1,
  misc_feature (1)..(411): Homolog of NCBI NO: 30681369 NR Description: 3-phosphoinositide-dependent protein kinase,
MDKKFITKENKTAYVKLERIVLDQLEHPGIVKLFFTFQDTQSLYMALESCEGGELFDQITRKGRLSEDEARFYSAEVVDALEYIHNMGLIHRDIKPENLLLTLDGHIKIADFGSVKPMQDSQITVLPNAASDDKACTFVGTAAYVPPEVLNSSPATFGNDLWALGCTLYQMLSGTSPFKDASEWLIFQRIIARDIKFPNHFSEAARDLIDRLLDTDPSRRPGAGSEGYDSLKRHPFFKGVDWKNLRSQTPPKLAPDPASQSASPERDGSPWNPTHVGDTSVLQNDGHNGLSESSGSITRLASIDSFDSRWQQFLEPGESVLMISAVKKLQKITSKKVQLILTNKPRLIYVDPSKLVVKGNIIWSDNSNDLNVQVSSPSHFKICTPKKVLSFEDAKQRALQWKKAIETLQNR

SEQ ID NO: 49136 - DNA, 831 bp, Arabidopsis thaliana
  misc_feature (1)..(831): Ceres Seq. ID no. 13579836
  misc_feature: MA Experiment ID: 20000171 Result: Up-regulated in Transcription
  misc_feature: MA Experiment 20000171 PARAMETER Experiment Name: At_42deg_Heat_P Parameter: Age (day) Value: 14
  misc_feature: MA Experiment 20000171 PARAMETER Experiment Name: At_42deg_Heat_P Parameter: Organism Value: A. thaliana
  misc_feature: MA Experiment 20000171 PARAMETER Experiment Name: At_42deg_Heat_P Parameter: Plant Line Value: WS
  misc_feature: MA Experiment 20000171 PARAMETER Experiment Name: At_42deg_Heat_P Parameter: Temperature (deg C) Value: 42 vs. 22
  misc_feature: MA Experiment 20000171 PARAMETER Experiment Name: At_42deg_Heat_P Parameter: Timepoint (hr) Value: 1
  misc_feature: MA Experiment 20000171 PARAMETER Experiment Name: At_42deg_Heat_P Parameter: Tissue Value: Aerial
  misc_feature: MA Experiment ID: 20000173 Result: Up-regulated in Transcription
  misc_feature: MA Experiment 20000173 PARAMETER Experiment Name: At_42deg_Heat_P Parameter: Age (day) Value: 14
  misc_feature: MA Experiment 20000173 PARAMETER Experiment Name: At_42deg_Heat_P Parameter: Organism Value: A. thaliana
  misc_feature: MA Experiment 20000173 PARAMETER Experiment Name: At_42deg_Heat_P Parameter: Plant Line Value: WS
  misc_feature: MA Experiment 20000173 PARAMETER Experiment Name: At_42deg_Heat_P Parameter: Temperature (deg C) Value: 42 vs. 22
  misc_feature: MA Experiment 20000173 PARAMETER Experiment Name: At_42deg_Heat_P Parameter: Timepoint (hr) Value: 6
  misc_feature: MA Experiment 20000173 PARAMETER Experiment Name: At_42deg_Heat_P Parameter: Tissue Value: Aerial
  misc_feature: MA Experiment ID: 20000227 Result: Down-regulated in Transcription
  misc_feature: MA Experiment 20000227 PARAMETER Experiment Name: At_Root-Tips-vs-Tops_P Parameter: Tissue Value: Root Tips vs. Root Tops
  misc_feature: MA Experiment ID: 20000437 Result: Up-regulated in Transcription
  misc_feature: MA Experiment 20000437 PARAMETER Experiment Name: At_Drought_P Parameter: Age (day) Value: 8
  misc_feature: MA Experiment 20000437 PARAMETER Experiment Name: At_Drought_P Parameter: Organism Value: A. thaliana
  misc_feature: MA Experiment 20000437 PARAMETER Experiment Name: At_Drought_P Parameter: Plant Line Value: WS
  misc_feature: MA Experiment 20000437 PARAMETER Experiment Name: At_Drought_P Parameter: Timepoint (hr) Value: 24
  misc_feature: MA Experiment 20000437 PARAMETER Experiment Name: At_Drought_P Parameter: Tissue Value: Whole Plant
  misc_feature: MA Experiment 20000437 PARAMETER Experiment Name: At_Drought_P Parameter: Treatment Value: Drought vs. No Drought
atcgctcggtgaattcgaggatcctcgagcttyttgatcggagactttttctctcatcgtcgttgtttgaattctccggctgagagatgcttgcttgacgacgaatctccaccgatcttttaccttttcgcacaacaagtaagagaaggatgtcgacgccagcaaggaagaggttaatgagggatttcaagaggttgcagcaagacccacctgcgggtattagtggtgctccacaggacaacaacattatgctctggaatgctgtcatatttgggcctgatgacacaccatgggatggaggtactttcaaactctcactgcagttctctgaagattatcccaataaaccaccaacagttcggtttgtgtcacggatgtttcatcctaatatttatgcagatgggagtatctgcttggacattctacaaaaccagtggagtccaatctatgatgttgctgctatacttacctccatccagtccttgctctgtgaccctaatccgaattctcctgcaaactcggaagctgctcggatgtacagcgaaagcaagcgcgagtacaacaggagagtgcgtgatgttgttgagcaaagctggactgctgactagtaattatatcattgtagcatttgtcttcaaataacattaaacctcctctcttgtatctgatttcgaccactcacatctctgagagaagtttactctccctaccactctcttttatgtctttctgtgtttttcaaactctgtgatttgttgctcttcatgttttttttctttgtattttcgtaaccacattcatcttcataattatcatatgtatttcagtcgy

SEQ ID NO: 49137 - protein, 152 aa, Arabidopsis thaliana; identical to SEQ ID NO: 30521
  peptide (1)..(152): Ceres Seq. ID no. 15222703
  misc_feature (1)..(149): Homolog of NCBI NO: 18424601 NR Description: ubiquitin-conjugating enzyme 3 (UBC3)
  misc_feature (1)..(152): Homolog of NCBI NO: 18844990 NR Description: Rad6 [Oryza sativa (japonica cultivar-group)]
  misc_feature (1)..(152): Homolog of NCBI NO: 33146810 NR Description: OsRad6 [Oryza sativa (japonica cultivar-group)]
  misc_feature (1)..(152): Homolog of NCBI NO: 13516453 NR Description: ubiquitin-conjugating enzyme (E2) [Nicotiana
  misc_feature (1)..(152): Homolog of NCBI NO: 136640 NR Description: Ubiquitin-conjugating enzyme E2-17 kDa
  misc_feature (1)..(152): Homolog of NCBI NO: 13516451 NR Description: ubiquitin-conjugating enzyme (E2) [Nicotiana
  misc_feature (1)..(152): Homolog of NCBI NO: 8118527 NR Description: ubiquitin conjugating protein [Avicennia marina]
  misc_feature (1)..(152): Homolog of NCBI NO: 464980 NR Description: Ubiquitin-conjugating enzyme E2-17 kDa
  misc_feature (1)..(152): Homolog of NCBI NO: 18395424 NR Description: ubiquitin-conjugating enzyme 2 (UBC2)
  misc_feature (1)..(152): Homolog of NCBI NO: 18394114 NR Description: ubiquitin-conjugating enzyme 1 (UBC1)

SEQ ID NO: 49138 - protein, 143 aa, Arabidopsis thaliana; identical to SEQ ID NO: 30522
  peptide (1)..(143): Ceres Seq. ID no. 15222704
  misc_feature (1)..(140): Homolog of NCBI NO: 18424601 NR Description: ubiquitin-conjugating enzyme 3 (UBC3)
  misc_feature (1)..(143): Homolog of NCBI NO: 18844990 NR Description: Rad6 [Oryza sativa (japonica cultivar-group)]
  misc_feature (1)..(143): Homolog of NCBI NO: 33146810 NR Description: OsRad6 [Oryza sativa (japonica cultivar-group)]
  misc_feature (1)..(143): Homolog of NCBI NO: 13516453 NR Description: ubiquitin-conjugating enzyme (E2) [Nicotiana
  misc_feature (1)..(143): Homolog of NCBI NO: 136640 NR Description: Ubiquitin-conjugating enzyme E2-17 kDa
  misc_feature (1)..(143): Homolog of NCBI NO: 13516451 NR Description: ubiquitin-conjugating enzyme (E2) [Nicotiana
  misc_feature (1)..(143): Homolog of NCBI NO: 8118527 NR Description: ubiquitin conjugating protein [Avicennia marina]
  misc_feature (1)..(143): Homolog of NCBI NO: 464980 NR Description: Ubiquitin-conjugating enzyme E2-17 kDa
  misc_feature (1)..(143): Homolog of NCBI NO: 18395424 NR Description: ubiquitin-conjugating enzyme 2 (UBC2)
  misc_feature (1)..(143): Homolog of NCBI NO: 18394114 NR Description: ubiquitin-conjugating enzyme 1 (UBC1)

SEQ ID NO: 49139 - protein, 127 aa, Arabidopsis thaliana
  peptide (1)..(127): Ceres Seq. ID no. 15222705
MLSYLGLMTHHGMEVLSNSHCSSLKIIPINHQQFGLCHGCFILIFMQMGVSAWTFYKTSGVQSMMLLLYLPPSSPCSVTLIRILLQTRKLLGCTAKASASTTGECVMLLSKAGLLTSNYIIVAFVFK

SEQ ID NO: 49140 - DNA, 1500 bp, Arabidopsis thaliana
  misc_feature (1)..(1500): Ceres Seq. ID no. 12601477
  misc_feature: MA Experiment ID: 20000437 Result: Down-regulated in Transcription
  misc_feature: MA Experiment 20000437 PARAMETER Experiment Name: At_Drought_P Parameter: Age (day) Value: 8
  misc_feature: MA Experiment 20000437 PARAMETER Experiment Name: At_Drought_P Parameter: Organism Value: A. thaliana
  misc_feature: MA Experiment 20000437 PARAMETER Experiment Name: At_Drought_P Parameter: Plant Line Value: WS
  misc_feature: MA Experiment 20000437 PARAMETER Experiment Name: At_Drought_P Parameter: Timepoint (hr) Value: 24
  misc_feature: MA Experiment 20000437 PARAMETER Experiment Name: At_Drought_P Parameter: Tissue Value: Whole Plant
  misc_feature: MA Experiment 20000437 PARAMETER Experiment Name: At_Drought_P Parameter: Treatment Value: Drought vs. No Drought
  misc_feature: MA Experiment ID: 20001558 Result: Up-regulated in Transcription
  misc_feature: MA Experiment 20001558 PARAMETER Experiment Name: At_Drought_Soil_Dry_P Parameter: Age (day) Value: 27
  misc_feature: MA Experiment 20001558 PARAMETER Experiment Name: At_Drought_Soil_Dry_P Parameter: Organism Value: A. thaliana
  misc_feature: MA Experiment 20001558 PARAMETER Experiment Name: At_Drought_Soil_Dry_P Parameter: Plant Line Value: WS
  misc_feature: MA Experiment 20001558 PARAMETER Experiment Name: At_Drought_Soil_Dry_P Parameter: Post Timepoint (hr) Value: 6
  misc_feature: MA Experiment 20001558 PARAMETER Experiment Name: At_Drought_Soil_Dry_P Parameter: Post-Treatment Value: Re-Water vs. No Drought
  misc_feature: MA Experiment 20001558 PARAMETER Experiment Name: At_Drought_Soil_Dry_P Parameter: Timepoint (day) Value: 13
  misc_feature: MA Experiment 20001558 PARAMETER Experiment Name: At_Drought_Soil_Dry_P Parameter: Treatment Value: Drought vs. No Drought
gggaacttttcctctctctctctctctacttcgaacaggaagaagatagattctctcagttctttcaaatccataaaaatatacctggaatcttgtttctatacttcttctgtttctcatactctccactaatactaacatttttccagaattttgttaaaccctacaaaaatttgaactttttaaaaccctagaaatttccaaattcgtaaaaccctagccaagttcctctattgngtgaggggaactcatcagaacccacgaatcgaaatgaagaatccagaaaaacccttacttctgtttctaattttagcttcaagcttagcatcaatggcgactgcaaaatccacaatagagccttgctccagtaaagacacttgtaactcattgctaggctacactctctacaccgacctcaaagtcacagaagtcgcttctctcttccaagtagacccagtttcaatgcttttgtctaactccattgatatctcttacccagacgtcgagaaccatgtccttcccgctaagctcttcctcaagatcccaatcacttgctcctgtgtcgacggaatcagaaaatccctctcgactcattacaagactcgtacttctgacacactaggatcgattgctgactctgtttacggtggtctggtctctccggagcagattcaggtcgcgaattcagagactgacctttcggttctcgatgtaggtacaaagcttgtgattccattgccttgcgcttgcttcaatggtaccgatgaatctcttccggcgctttatctatcttacgttgtgagaggaatcgacactatggctggaatcgcaaagagattctcgacctctgttactgatttaacaaacgtgaatgctatgggagctcctgatatcaatcctggtgatatcctcgctgtcccattgctagcttgtagttcaaatttccccaaatacgctacggattacggattaatcattccaaatggaagctatgctctcactgcaggccactgtgtacaatgcagctgtgttctcggaagccgaagtatgagatgtagaaacagcaacttcatgcttggtaacattacttcgcagcagagtagctccggttgtaaacttactacttgtagttacaacggtttcgctagcggcactatcttgaccacgttgtccatgtctcttcaacctcgatgccctggaccgcaacaattagcaccgcttatagccccgcctgataatgttccaaaggaactgatgtatctaccttcaccttcaccttcgccatcaccagagtttgatgatattgctggtggaggatcatctatagccgcagtccccgcggcttcacctggaggagctacggtttcttcaagcaattcaatcccgggtaatccagctaatggtccaggcggaagtatttctatagcttcttgtccattgagctattactcattcattgcgttactcatccccattggttcttgcttttttgttttctaa

SEQ ID NO: 49141 - protein, 409 aa, Arabidopsis thaliana
  peptide (1)..(409): Ceres Seq. ID no. 12601478
  misc_feature (109)..(155): Pfam Name: LysM domain Pfam Description: LysM domain
  misc_feature (8)..(204): Homolog of NCBI NO: 37651074 NR Description: Nod-factor receptor 5 [Lotus corniculatus var.
  misc_feature (1)..(308): Homolog of NCBI NO: 22758281 NR Description: Unknown protein [Oryza sativa (japonica
  misc_feature (8)..(265): Homolog of NCBI NO: 28207683 NR Description: Erwinia induced protein 1 [Solanum tuberosum]
  misc_feature (9)..(319): Homolog of NCBI NO: 21593990 NR Description: unknown [Arabidopsis thaliana]
  misc_feature (9)..(323): Homolog of NCBI NO: 18398317 NR Description: expressed protein
  misc_feature (1)..(298): Homolog of NCBI NO: 30687570 NR Description: expressed protein [Arabidopsis thaliana]
  misc_feature (1)..(404): Homolog of NCBI NO: 18395044 NR Description: expressed protein
  misc_feature (1)..(409): Homolog of NCBI NO: 30699276 NR Description: expressed protein [Arabidopsis thaliana]
  misc_feature (1)..(409): Homolog of NCBI NO: 25406518 NR Description: unknown protein T5M16.22 [imported] - Arabidopsis
MKNPEKPLLLFLILASSLASMATAKSTIEPCSSKDTCNSLLGYTLYTDLKVTEVASLFQVDPVSMLLSNSIDISYPDVENHVLPAKLFLKIPITCSCVDGIRKSLSTHYKTRTSDTLGSIADSVYGGLVSPEQIQVANSETDLSVLDVGTKLVIPLPCACFNGTDESLPALYLSYVVRGIDTMAGIAKRFSTSVTDLTNVNAMGAPDINPGDILAVPLLACSSNFPKYATDYGLIIPNGSYALTAGHCVQCSCVLGSRSMRCRNSNFMLGNITSQQSSSGCKLTTCSYNGFASGTILTTLSMSLQPRCPGPQQLAPLIAPPDNVPKELMYLPSPSPSPSPEFDDIAGGGSSIAAVPAASPGGATVSSSNSIPGNPANGPGGSISIASCPLSYYSFIALLIPIGSCFFVF

SEQ ID NO: 49142 - protein, 389 aa, Arabidopsis thaliana
  peptide (1)..(389): Ceres Seq. ID no. 12601479
  misc_feature (89)..(135): Pfam Name: LysM domain Pfam Description: LysM domain
  misc_feature (1)..(184): Homolog of NCBI NO: 37651074 NR Description: Nod-factor receptor 5 [Lotus corniculatus var.
  misc_feature (1)..(288): Homolog of NCBI NO: 22758281 NR Description: Unknown protein [Oryza sativa (japonica
  misc_feature (1)..(245): Homolog of NCBI NO: 28207683 NR Description: Erwinia induced protein 1 [Solanum tuberosum]
  misc_feature (1)..(299): Homolog of NCBI NO: 21593990 NR Description: unknown [Arabidopsis thaliana]
  misc_feature (1)..(303): Homolog of NCBI NO: 18398317 NR Description: expressed protein
  misc_feature (1)..(278): Homolog of NCBI NO: 30687570 NR Description: expressed protein [Arabidopsis thaliana]
  misc_feature (1)..(384): Homolog of NCBI NO: 18395044 NR Description: expressed protein
  misc_feature (1)..(389): Homolog of NCBI NO: 30699276 NR Description: expressed protein [Arabidopsis thaliana]
  misc_feature (1)..(389): Homolog of NCBI NO: 25406518 NR Description: unknown protein T5M16.22 [imported] - Arabidopsis
MATAKSTIEPCSSKDTCNSLLGYTLYTDLKVTEVASLFQVDPVSMLLSNSIDISYPDVENHVLPAKLFLKIPITCSCVDGIRKSLSTHYKTRTSDTLGSIADSVYGGLVSPEQIQVANSETDLSVLDVGTKLVIPLPCACFNGTDESLPALYLSYVVRGIDTMAGIAKRFSTSVTDLTNVNAMGAPDINPGDILAVPLLACSSNFPKYATDYGLIIPNGSYALTAGHCVQCSCVLGSRSMRCRNSNFMLGNITSQQSSSGCKLTTCSYNGFASGTILTTLSMSLQPRCPGPQQLAPLIAPPDNVPKELMYLPSPSPSPSPEFDDIAGGGSSIAAVPAASPGGATVSSSNSIPGNPANGPGGSISIASCPLSYYSFIALLIPIGSCFFVF

SEQ ID NO: 49143 - protein, 345 aa, Arabidopsis thaliana
  peptide (1)..(345): Ceres Seq. ID no. 12601480
  misc_feature (45)..(91): Pfam Name: LysM domain Pfam Description: LysM domain
  misc_feature (1)..(140): Homolog of NCBI NO: 37651074 NR Description: Nod-factor receptor 5 [Lotus corniculatus var.
  misc_feature (1)..(244): Homolog of NCBI NO: 22758281 NR Description: Unknown protein [Oryza sativa (japonica
  misc_feature (1)..(201): Homolog of NCBI NO: 28207683 NR Description: Erwinia induced protein 1 [Solanum tuberosum]
  misc_feature (1)..(255): Homolog of NCBI NO: 21593990 NR Description: unknown [Arabidopsis thaliana]
  misc_feature (1)..(259): Homolog of NCBI NO: 18398317 NR Description: expressed protein
  misc_feature (1)..(234): Homolog of NCBI NO: 30687570 NR Description: expressed protein [Arabidopsis thaliana]
  misc_feature (1)..(340): Homolog of NCBI NO: 18395044 NR Description: expressed protein
  misc_feature (1)..(345): Homolog of NCBI NO: 30699276 NR Description: expressed protein [Arabidopsis thaliana]
  misc_feature (1)..(345): Homolog of NCBI NO: 25406518 NR Description: unknown protein T5M16.22 [imported] - Arabidopsis
MLLSNSIDISYPDVENHVLPAKLFLKIPITCSCVDGIRKSLSTHYKTRTSDTLGSIADSVYGGLVSPEQIQVANSETDLSVLDVGTKLVIPLPCACFNGTDESLPALYLSYVVRGIDTMAGIAKRFSTSVTDLTNVNAMGAPDINPGDILAVPLLACSSNFPKYATDYGLIIPNGSYALTAGHCVQCSCVLGSRSMRCRNSNFMLGNITSQQSSSGCKLTTCSYNGFASGTILTTLSMSLQPRCPGPQQLAPLIAPPDNVPKELMYLPSPSPSPSPEFDDIAGGGSSIAAVPAASPGGATVSSSNSIPGNPANGPGGSISIASCPLSYYSFIALLIPIGSCFFVF

SEQ ID NO: 49144 - DNA, 1228 bp, Arabidopsis thaliana
  misc_feature (1)..(1228): Ceres Seq. ID no. 12601521
  misc_feature: MA Experiment ID: 20000179 Result: Up-regulated in Transcription
  misc_feature: MA Experiment 20000179 PARAMETER Experiment Name: At_Germinating_Seeds_P Parameter: Age (hr) Value: 6 vs. 0
  misc_feature: MA Experiment 20000179 PARAMETER Experiment Name: At_Germinating_Seeds_P Parameter: Tissue Value: Germinating Seeds
  misc_feature: MA Experiment ID: 20000180 Result: Up-regulated in Transcription
  misc_feature: MA Experiment 20000180 PARAMETER Experiment Name: At_Germinating_Seeds_P Parameter: Age (hr) Value: 24 vs. 0
  misc_feature: MA Experiment 20000180 PARAMETER Experiment Name: At_Germinating_Seeds_P Parameter: Tissue Value: Germinating Seeds
  misc_feature: MA Experiment ID: 20000185 Result: Down-regulated in Transcription
  misc_feature: MA Experiment 20000185 PARAMETER Experiment Name: At_Roots__P Parameter: Age (day) Value: 7 vs. 21
  misc_feature: MA Experiment 20000185 PARAMETER Experiment Name: At_Roots__P Parameter: Organism Value: A. thaliana
  misc_feature: MA Experiment 20000185 PARAMETER Experiment Name: At_Roots__P Parameter: Tissue Value: Roots vs. Whole Plant
  misc_feature: MA Experiment ID: 20000227 Result: Down-regulated in Transcription
  misc_feature: MA Experiment 20000227 PARAMETER Experiment Name: At_Root-Tips-vs-Tops_P Parameter: Tissue Value: Root Tips vs. Root Tops
  misc_feature: MA Experiment ID: 20000436 Result: Down-regulated in Transcription
  misc_feature: MA Experiment 20000436 PARAMETER Experiment Name: At_Drought_P Parameter: Age (day) Value: 7
  misc_feature: MA Experiment 20000436 PARAMETER Experiment Name: At_Drought_P Parameter: Organism Value: A. thaliana
  misc_feature: MA Experiment 20000436 PARAMETER Experiment Name: At_Drought_P Parameter: Plant Line Value: WS
  misc_feature: MA Experiment 20000436 PARAMETER Experiment Name: At_Drought_P Parameter: Timepoint (hr) Value: 12
  misc_feature: MA Experiment 20000436 PARAMETER Experiment Name: At_Drought_P Parameter: Tissue Value: Whole Plant
  misc_feature: MA Experiment 20000436 PARAMETER Experiment Name: At_Drought_P Parameter: Treatment Value: Drought vs. No Drought
  misc_feature: MA Experiment ID: 20000437 Result: Down-regulated in Transcription
  misc_feature: MA Experiment 20000437 PARAMETER Experiment Name: At_Drought_P Parameter: Age (day) Value: 8
  misc_feature: MA Experiment 20000437 PARAMETER Experiment Name: At_Drought_P Parameter: Organism Value: A. thaliana
  misc_feature: MA Experiment 20000437 PARAMETER Experiment Name: At_Drought_P Parameter: Plant Line Value: WS
  misc_feature: MA Experiment 20000437 PARAMETER Experiment Name: At_Drought_P Parameter: Timepoint (hr) Value: 24
  misc_feature: MA Experiment 20000437 PARAMETER Experiment Name: At_Drought_P Parameter: Tissue Value: Whole Plant
  misc_feature: MA Experiment 20000437 PARAMETER Experiment Name: At_Drought_P Parameter: Treatment Value: Drought vs. No Drought
  misc_feature: MA Experiment ID: 20000439 Result: Down-regulated in Transcription
  misc_feature: MA Experiment 20000439 PARAMETER Experiment Name: At_Roots__P Parameter: Age (day) Value: 14 vs. 21
  misc_feature: MA Experiment 20000439 PARAMETER Experiment Name: At_Roots__P Parameter: Organism Value: A. thaliana
  misc_feature: MA Experiment 20000439 PARAMETER Experiment Name: At_Roots__P Parameter: Tissue Value: Roots vs. Whole Plant
  misc_feature: MA Experiment ID: 20001451 Result: Down-regulated in Transcription
  misc_feature: MA Experiment 20001451 PARAMETER Experiment Name: At_Far-red-induction_P Parameter: Age (day) Value: 7
  misc_feature: MA Experiment 20001451 PARAMETER Experiment Name: At_Far-red-induction_P Parameter: Light Value: Far-red vs. White
  misc_feature: MA Experiment 20001451 PARAMETER Experiment Name: At_Far-red-induction_P Parameter: Organism Value: A. thaliana
  misc_feature: MA Experiment 20001451 PARAMETER Experiment Name: At_Far-red-induction_P Parameter: Plant Line Value: Columbia
  misc_feature: MA Experiment 20001451 PARAMETER Experiment Name: At_Far-red-induction_P Parameter: Timepoint (hr) Value: 24
  misc_feature: MA Experiment 20001451 PARAMETER Experiment Name: At_Far-red-induction_P Parameter: Tissue Value: Whole Plant
  misc_feature: MA Experiment ID: 20001557 Result: Down-regulated in Transcription
  misc_feature: MA Experiment 20001557 PARAMETER Experiment Name: At_Drought_Soil_Dry_P Parameter: Age (day) Value: 27
  misc_feature: MA Experiment 20001557 PARAMETER Experiment Name: At_Drought_Soil_Dry_P Parameter: Organism Value: A. thaliana
  misc_feature: MA Experiment 20001557 PARAMETER Experiment Name: At_Drought_Soil_Dry_P Parameter: Plant Line Value: WS
  misc_feature: MA Experiment 20001557 PARAMETER Experiment Name: At_Drought_Soil_Dry_P Parameter: Post Timepoint (hr) Value: 3
  misc_feature: MA Experiment 20001557 PARAMETER Experiment Name: At_Drought_Soil_Dry_P Parameter: Post-Treatment Value: Re-Water vs. No Drought
  misc_feature: MA Experiment 20001557 PARAMETER Experiment Name: At_Drought_Soil_Dry_P Parameter: Timepoint (day) Value: 13
  misc_feature: MA Experiment 20001557 PARAMETER Experiment Name: At_Drought_Soil_Dry_P Parameter: Treatment Value: Drought vs. No Drought
  misc_feature: MA Experiment ID: 20001906 Result: Down-regulated in Transcription
  misc_feature: MA Experiment 20001906 PARAMETER Experiment Name: At_Drought_Reproduction_P Parameter: Age (day) Value: 35
  misc_feature: MA Experiment 20001906 PARAMETER Experiment Name: At_Drought_Reproduction_P Parameter: Organism Value: A. thaliana
  misc_feature: MA Experiment 20001906 PARAMETER Experiment Name: At_Drought_Reproduction_P Parameter: Plant Line Value: WS
  misc_feature: MA Experiment 20001906 PARAMETER Experiment Name: At_Drought_Reproduction_P Parameter: Timepoint (day) Value: 5
  misc_feature: MA Experiment 20001906 PARAMETER Experiment Name: At_Drought_Reproduction_P Parameter: Tissue Value: Siliques
  misc_feature: MA Experiment 20001906 PARAMETER Experiment Name: At_Drought_Reproduction_P Parameter: Treatment Value: Drought vs. No Drought
  misc_feature: MA Experiment ID: 20001908 Result: Down-regulated in Transcription
  misc_feature: MA Experiment 20001908 PARAMETER Experiment Name: At_Drought_Reproduction_P Parameter: Age (day) Value: 40
  misc_feature: MA Experiment 20001908 PARAMETER Experiment Name: At_Drought_Reproduction_P Parameter: Organism Value: A. thaliana
  misc_feature: MA Experiment 20001908 PARAMETER Experiment Name: At_Drought_Reproduction_P Parameter: Plant Line Value: WS
  misc_feature: MA Experiment 20001908 PARAMETER Experiment Name: At_Drought_Reproduction_P Parameter: Timepoint (day) Value: 10
  misc_feature: MA Experiment 20001908 PARAMETER Experiment Name: At_Drought_Reproduction_P Parameter: Tissue Value: Siliques
  misc_feature: MA Experiment 20001908 PARAMETER Experiment Name: At_Drought_Reproduction_P Parameter: Treatment Value: Drought vs. No Drought
gagagaaatggcgatctaacgttgaagataataagaaggacgaaacgggcattttttttttgtgtgtgtgtgtcacatcttttttattatcctctcatggcggataacacgagacctgtccaaaggctcttcttcttcttcgtcatcactactactactcctctctaacgttttcctcattcttcttaattccgatttttgagtgatggctatggcctctgcttctggttctgctctttgcttcactgatgcatctagctctcttgctttaagacgcgattgtggagctctttgcttgcctcctaggacagttacgtttggatttgtcgataaacctcttgtcaatctcgagcgattaagattatccactttgaagattagagcatcaaatgctactgctgtggagaatggaaagcaagaaggaagtgctgctgattctgataaagttccaactccagttgttataatcgaccaagattctgaccctgatgcaaccgttcttgaagttacattcggagatcgtcttggagctttacttgacactatgaatgcgctcaaaaacttgggattgaatgtcgtcaaggcaaatgtttaccttgattcttccggcaagcacaacaaatttgccattactagagcagatagtggaagaaaagtagaagaccctgaattgcttgaggccattcgtctcacagtcataaacaatctgcttgagtttcatcctgaatcaagttctcagttggcaatgggagcagcttttggtgttcttcctccaactgaaccgattgacgtggacatagcaacacatataaccattgaagatgatggaccagaccgcagtttactcttcatagaatcagcggatagacctggactattagttgagctggtgaagatcatttcagatatcagcgtcgctgttgaatctggagaattcgacaccgagggtttgttggctaaggtgaagtttcatgtaagctacaggaacaaagccctaatcaagcctctccagcaggtccttgctaatagtctgaggtacttcttgaggcgtccatcaactgacgagtcaagtttctgattatgcccatttttcaaaatctcaagtctcattcctcgtgactactatttttaccacttttttttttttttacatttgaccaaaataagctgcttcatacacctgtaatagtaacattatgcatcattcatccaatttactttgattcac

SEQ ID NO: 49145 - protein, 290 aa, Arabidopsis thaliana
  peptide (1)..(290): Ceres Seq. ID no. 12601522
  misc_feature (212)..(281): Pfam Name: ACT domain Pfam Description: ACT domain
  misc_feature (212)..(281): Pfam Name: ACT domain Pfam Description: ACT domain
  misc_feature (74)..(290): Homolog of NCBI NO: 21592963 NR Description: unknown [Arabidopsis thaliana]
  misc_feature (74)..(290): Homolog of NCBI NO: 15238305 NR Description: putative protein
  misc_feature (74)..(290): Homolog of NCBI NO: 15238305 NR Description: putative protein
  misc_feature (1)..(290): Homolog of NCBI NO: 18394414 NR Description: expressed protein
  misc_feature (74)..(290): Homolog of NCBI NO: 21592963 NR Description: unknown [Arabidopsis thaliana]
  misc_feature (1)..(290): Homolog of NCBI NO: 18394414 NR Description: expressed protein
MAMASASGSALCFTDASSSLALRRDCGALCLPPRTVTFGFVDKPLVNLERLRLSTLKIRASNATAVENGKQEGSAADSDKVPTPVVIIDQDSDPDATVLEVTFGDRLGALLDTMNALKNLGLNVVKANVYLDSSGKHNKFAITRADSGRKVEDPELLEAIRLTVINNLLEFHPESSSQLAMGAAFGVLPPTEPIDVDIATHITIEDDGPDRSLLFIESADRPGLLVELVKIISDISVAVESGEFDTEGLLAKVKFHVSYRNKALIKPLQQVLANSLRYFLRRPSTDESSF

SEQ ID NO: 49146 - protein, 288 aa, Arabidopsis thaliana
  peptide (1)..(288): Ceres Seq. ID no. 12601523
  misc_feature (210)..(279): Pfam Name: ACT domain Pfam Description: ACT domain
  misc_feature (210)..(279): Pfam Name: ACT domain Pfam Description: ACT domain
  misc_feature (72)..(288): Homolog of NCBI NO: 21592963 NR Description: unknown [Arabidopsis thaliana]
  misc_feature (72)..(288): Homolog of NCBI NO: 15238305 NR Description: putative protein
  misc_feature (72)..(288): Homolog of NCBI NO: 15238305 NR Description: putative protein
  misc_feature (1)..(288): Homolog of NCBI NO: 18394414 NR Description: expressed protein
  misc_feature (72)..(288): Homolog of NCBI NO: 21592963 NR Description: unknown [Arabidopsis thaliana]
  misc_feature (1)..(288): Homolog of NCBI NO: 18394414 NR Description: expressed protein
MASASGSALCFTDASSSLALRRDCGALCLPPRTVTFGFVDKPLVNLERLRLSTLKIRASNATAVENGKQEGSAADSDKVPTPVVIIDQDSDPDATVLEVTFGDRLGALLDTMNALKNLGLNVVKANVYLDSSGKHNKFAITRADSGRKVEDPELLEAIRLTVINNLLEFHPESSSQLAMGAAFGVLPPTEPIDVDIATHITIEDDGPDRSLLFIESADRPGLLVELVKIISDISVAVESGEFDTEGLLAKVKFHVSYRNKALIKPLQQVLANSLRYFLRRPSTDESSF

SEQ ID NO: 49147 - protein, 177 aa, Arabidopsis thaliana
  peptide (1)..(177): Ceres Seq. ID no. 12601524
  misc_feature (99)..(168): Pfam Name: ACT domain Pfam Description: ACT domain
  misc_feature (99)..(168): Pfam Name: ACT domain Pfam Description: ACT domain
  misc_feature (1)..(177): Homolog of NCBI NO: 21592963 NR Description: unknown [Arabidopsis thaliana]
  misc_feature (1)..(177): Homolog of NCBI NO: 15238305 NR Description: putative protein
  misc_feature (1)..(177): Homolog of NCBI NO: 15238305 NR Description: putative protein
  misc_feature (1)..(177): Homolog of NCBI NO: 18394414 NR Description: expressed protein
  misc_feature (1)..(177): Homolog of NCBI NO: 21592963 NR Description: unknown [Arabidopsis thaliana]
  misc_feature (1)..(177): Homolog of NCBI NO: 18394414 NR Description: expressed protein
MNALKNLGLNVVKANVYLDSSGKHNKFAITRADSGRKVEDPELLEAIRLTVINNLLEFHPESSSQLAMGAAFGVLPPTEPIDVDIATHITIEDDGPDRSLLFIESADRPGLLVELVKIISDISVAVESGEFDTEGLLAKVKFHVSYRNKALIKPLQQVLANSLRYFLRRPSTDESSF

SEQ ID NO: 49148 - DNA, 1821 bp, Arabidopsis thaliana; identical to SEQ ID NO: 45461
  misc_feature (1)..(1821): Ceres Seq. ID no. 12600449
  misc_feature: MA Experiment ID: 20000437 Result: Down-regulated in Transcription
  misc_feature: MA Experiment 20000437 PARAMETER Experiment Name: At_Drought_P Parameter: Age (day) Value: 8
  misc_feature: MA Experiment 20000437 PARAMETER Experiment Name: At_Drought_P Parameter: Organism Value: A. thaliana
  misc_feature: MA Experiment 20000437 PARAMETER Experiment Name: At_Drought_P Parameter: Plant Line Value: WS
  misc_feature: MA Experiment 20000437 PARAMETER Experiment Name: At_Drought_P Parameter: Timepoint (hr) Value: 24
  misc_feature: MA Experiment 20000437 PARAMETER Experiment Name: At_Drought_P Parameter: Tissue Value: Whole Plant
  misc_feature: MA Experiment 20000437 PARAMETER Experiment Name: At_Drought_P Parameter: Treatment Value: Drought vs. No Drought
  misc_feature: MA Experiment ID: 20000439 Result: Down-regulated in Transcription
  misc_feature: MA Experiment 20000439 PARAMETER Experiment Name: At_Roots__P Parameter: Age (day) Value: 14 vs. 21
  misc_feature: MA Experiment 20000439 PARAMETER Experiment Name: At_Roots__P Parameter: Organism Value: A. thaliana
  misc_feature: MA Experiment 20000439 PARAMETER Experiment Name: At_Roots__P Parameter: Tissue Value: Roots vs. Whole Plant
  misc_feature: MA Experiment ID: 20001450 Result: Down-regulated in Transcription
  misc_feature: MA Experiment 20001450 PARAMETER Experiment Name: At_Far-red-induction_P Parameter: Age (day) Value: 7
  misc_feature: MA Experiment 20001450 PARAMETER Experiment Name: At_Far-red-induction_P Parameter: Light Value: Far-red vs. White
  misc_feature: MA Experiment 20001450 PARAMETER Experiment Name: At_Far-red-induction_P Parameter: Organism Value: A. thaliana
  misc_feature: MA Experiment 20001450 PARAMETER Experiment Name: At_Far-red-induction_P Parameter: Plant Line Value: Columbia
  misc_feature: MA Experiment 20001450 PARAMETER Experiment Name: At_Far-red-induction_P Parameter: Timepoint (hr) Value: 8
  misc_feature: MA Experiment 20001450 PARAMETER Experiment Name: At_Far-red-induction_P Parameter: Tissue Value: Whole Plant
  misc_feature: MA Experiment ID: 20001557 Result: Up-regulated in Transcription
  misc_feature: MA Experiment 20001557 PARAMETER Experiment Name: At_Drought_Soil_Dry_P Parameter: Age (day) Value: 27
  misc_feature: MA Experiment 20001557 PARAMETER Experiment Name: At_Drought_Soil_Dry_P Parameter: Organism Value: A. thaliana
  misc_feature: MA Experiment 20001557 PARAMETER Experiment Name: At_Drought_Soil_Dry_P Parameter: Plant Line Value: WS
  misc_feature: MA Experiment 20001557 PARAMETER Experiment Name: At_Drought_Soil_Dry_P Parameter: Post Timepoint (hr) Value: 3
  misc_feature: MA Experiment 20001557 PARAMETER Experiment Name: At_Drought_Soil_Dry_P Parameter: Post-Treatment Value: Re-Water vs. No Drought
  misc_feature: MA Experiment 20001557 PARAMETER Experiment Name: At_Drought_Soil_Dry_P Parameter: Timepoint (day) Value: 13
  misc_feature: MA Experiment 20001557 PARAMETER Experiment Name: At_Drought_Soil_Dry_P Parameter: Treatment Value: Drought vs. No Drought
  misc_feature: MA Experiment ID: 20001757 Result: Up-regulated in Transcription
  misc_feature: MA Experiment 20001757 PARAMETER Experiment Name: At_50mM_NH4NO3_L-to-H_P Parameter: Timepoint (hr) Value: 6
  misc_feature: MA Experiment 20001757 PARAMETER Experiment Name: At_50mM_NH4NO3_L-to-H_P Parameter: Tissue Value: Leaf
  misc_feature: MA Experiment 20001757 PARAMETER Experiment Name: At_50mM_NH4NO3_L-to-H_P Parameter: Treatment Value: 50mM NH4NO3 vs 100mM Mannitol
  misc_feature: MA Experiment ID: 20001905 Result: Down-regulated in Transcription
  misc_feature: MA Experiment 20001905 PARAMETER Experiment Name: At_Drought_Reproduction_P Parameter: Age (day) Value: 40
  misc_feature: MA Experiment 20001905 PARAMETER Experiment Name: At_Drought_Reproduction_P Parameter: Organism Value: A. thaliana
  misc_feature: MA Experiment 20001905 PARAMETER Experiment Name: At_Drought_Reproduction_P Parameter: Plant Line Value: WS
  misc_feature: MA Experiment 20001905 PARAMETER Experiment Name: At_Drought_Reproduction_P Parameter: Timepoint (day) Value: 10
  misc_feature: MA Experiment 20001905 PARAMETER Experiment Name: At_Drought_Reproduction_P Parameter: Tissue Value: Rosettes
  misc_feature: MA Experiment 20001905 PARAMETER Experiment Name: At_Drought_Reproduction_P Parameter: Treatment Value: Drought vs. No Drought
  misc_feature: MA Experiment ID: 20001906 Result: Down-regulated in Transcription
  misc_feature: MA Experiment 20001906 PARAMETER Experiment Name: At_Drought_Reproduction_P Parameter: Age (day) Value: 35
  misc_feature: MA Experiment 20001906 PARAMETER Experiment Name: At_Drought_Reproduction_P Parameter: Organism Value: A. thaliana
  misc_feature: MA Experiment 20001906 PARAMETER Experiment Name: At_Drought_Reproduction_P Parameter: Plant Line Value: WS
  misc_feature: MA Experiment 20001906 PARAMETER Experiment Name: At_Drought_Reproduction_P Parameter: Timepoint (day) Value: 5
  misc_feature: MA Experiment 20001906 PARAMETER Experiment Name: At_Drought_Reproduction_P Parameter: Tissue Value: Siliques
  misc_feature: MA Experiment 20001906 PARAMETER Experiment Name: At_Drought_Reproduction_P Parameter: Treatment Value: Drought vs. No Drought

SEQ ID NO: 49149 - protein, 446 aa, Arabidopsis thaliana; identical to SEQ ID NO: 45462
  peptide (1)..(446): Ceres Seq. ID no. 12600450
  misc_feature (147)..(391): Pfam Name: Fatty acid desaturase Pfam Description: Fatty acid desaturase
  misc_feature (147)..(391): Pfam Name: Fatty acid desaturase Pfam Description: Fatty acid desaturase
  misc_feature (1)..(437): Homolog of NCBI NO: 1754795 NR Description: omega-3 fatty acid desaturase
  misc_feature (1)..(442): Homolog of NCBI NO: 1345970 NR Description: Omega-3 fatty acid desaturase, chloroplast
  misc_feature (1)..(439): Homolog of NCBI NO: 7433276 NR Description: omega-3 fatty acid desaturase (EC 1.14.99.-) FAD7
  misc_feature (1)..(439): Homolog of NCBI NO: 1345969 NR Description: Omega-3 fatty acid desaturase, chloroplast
  misc_feature (1)..(440): Homolog of NCBI NO: 17064784 NR Description: temperature-sensitive omega-3 fatty acid
  misc_feature (1)..(437): Homolog of NCBI NO: 1754795 NR Description: omega-3 fatty acid desaturase
  misc_feature (1)..(439): Homolog of NCBI NO: 7433276 NR Description: omega-3 fatty acid desaturase (EC 1.14.99.-) FAD7
  misc_feature (1)..(440): Homolog of NCBI NO: 17064784 NR Description: temperature-sensitive omega-3 fatty acid
  misc_feature (1)..(446): Homolog of NCBI NO: 15229692 NR Description: omega-3 fatty acid desaturase, chloroplast
  misc_feature (1)..(446): Homolog of NCBI NO: 14488094 NR Description: AT3g11170/F9F8_4 [Arabidopsis thaliana]
  misc_feature (1)..(443): Homolog of NCBI NO: 7378667 NR Description: chloroplast omega-3 fatty acid desaturase
  misc_feature (41)..(446): Homolog of NCBI NO: 1345968 NR Description: Omega-3 fatty acid desaturase, chloroplast
  misc_feature (1)..(440): Homolog of NCBI NO: 15239175 NR Description: omega-3 fatty acid desaturase, chloroplast
  misc_feature (1)..(439): Homolog of NCBI NO: 1345969 NR Description: Omega-3 fatty acid desaturase, chloroplast
  misc_feature (1)..(442): Homolog of NCBI NO: 1345970 NR Description: Omega-3 fatty acid desaturase, chloroplast
  misc_feature (1)..(440): Homolog of NCBI NO: 15239175 NR Description: omega-3 fatty acid desaturase, chloroplast
  misc_feature (41)..(446): Homolog of NCBI NO: 1345968 NR Description: Omega-3 fatty acid desaturase, chloroplast
  misc_feature (1)..(443): Homolog of NCBI NO: 7378667 NR Description: chloroplast omega-3 fatty acid desaturase
  misc_feature (1)..(446): Homolog of NCBI NO: 14488094 NR Description: AT3g11170/F9F8_4 [Arabidopsis thaliana]
  misc_feature (1)..(446): Homolog of NCBI NO: 15229692 NR Description: omega-3 fatty acid desaturase, chloroplast

SEQ ID NO: 49150 - protein, 293 aa, Arabidopsis thaliana; identical to SEQ ID NO: 45463
  peptide (1)..(293): Ceres Seq. ID no. 12600451
  misc_feature (1)..(238): Pfam Name: Fatty acid desaturase Pfam Description: Fatty acid desaturase
  misc_feature (1)..(238): Pfam Name: Fatty acid desaturase Pfam Description: Fatty acid desaturase
  misc_feature (1)..(284): Homolog of NCBI NO: 1754795 NR Description: omega-3 fatty acid desaturase
  misc_feature (1)..(289): Homolog of NCBI NO: 1345970 NR Description: Omega-3 fatty acid desaturase, chloroplast
  misc_feature (1)..(286): Homolog of NCBI NO: 7433276 NR Description: omega-3 fatty acid desaturase (EC 1.14.99.-) FAD7
  misc_feature (1)..(286): Homolog of NCBI NO: 1345969 NR Description: Omega-3 fatty acid desaturase, chloroplast
  misc_feature (1)..(287): Homolog of NCBI NO: 17064784 NR Description: temperature-sensitive omega-3 fatty acid
  misc_feature (1)..(284): Homolog of NCBI NO: 1754795 NR Description: omega-3 fatty acid desaturase
  misc_feature (1)..(286): Homolog of NCBI NO: 7433276 NR Description: omega-3 fatty acid desaturase (EC 1.14.99.-) FAD7
  misc_feature (1)..(287): Homolog of NCBI NO: 17064784 NR Description: temperature-sensitive omega-3 fatty acid
  misc_feature (1)..(293): Homolog of NCBI NO: 15229692 NR Description: omega-3 fatty acid desaturase, chloroplast
  misc_feature (1)..(293): Homolog of NCBI NO: 14488094 NR Description: AT3g11170/F9F8_4 [Arabidopsis thaliana]
  misc_feature (1)..(290): Homolog of NCBI NO: 7378667 NR Description: chloroplast omega-3 fatty acid desaturase
  misc_feature (1)..(293): Homolog of NCBI NO: 1345968 NR Description: Omega-3 fatty acid desaturase, chloroplast
  misc_feature (1)..(287): Homolog of NCBI NO: 15239175 NR Description: omega-3 fatty acid desaturase, chloroplast
  misc_feature (1)..(286): Homolog of NCBI NO: 1345969 NR Description: Omega-3 fatty acid desaturase, chloroplast
  misc_feature (1)..(289): Homolog of NCBI NO: 1345970 NR Description: Omega-3 fatty acid desaturase, chloroplast
  misc_feature (1)..(287): Homolog of NCBI NO: 15239175 NR Description: omega-3 fatty acid desaturase, chloroplast
  misc_feature (1)..(293): Homolog of NCBI NO: 1345968 NR Description: Omega-3 fatty acid desaturase, chloroplast
  misc_feature (1)..(290): Homolog of NCBI NO: 7378667 NR Description: chloroplast omega-3 fatty acid desaturase
  misc_feature (1)..(293): Homolog of NCBI NO: 14488094 NR Description: AT3g11170/F9F8_4 [Arabidopsis thaliana]
  misc_feature (1)..(293): Homolog of NCBI NO: 15229692 NR Description: omega-3 fatty acid desaturase, chloroplast

SEQ ID NO: 49151 - protein, 229 aa, Arabidopsis thaliana; identical to SEQ ID NO: 45464
  peptide (1)..(229): Ceres Seq. ID no. 12600452
  misc_feature (1)..(174): Pfam Name: Fatty acid desaturase Pfam Description: Fatty acid desaturase
  misc_feature (1)..(174): Pfam Name: Fatty acid desaturase Pfam Description: Fatty acid desaturase
  misc_feature (1)..(220): Homolog of NCBI NO: 1754795 NR Description: omega-3 fatty acid desaturase
  misc_feature (1)..(225): Homolog of NCBI NO: 1345970 NR Description: Omega-3 fatty acid desaturase, chloroplast
  misc_feature (1)..(222): Homolog of NCBI NO: 7433276 NR Description: omega-3 fatty acid desaturase (EC 1.14.99.-) FAD7
  misc_feature (1)..(222): Homolog of NCBI NO: 1345969 NR Description: Omega-3 fatty acid desaturase, chloroplast
  misc_feature (1)..(223): Homolog of NCBI NO: 17064784 NR Description: temperature-sensitive omega-3 fatty acid
  misc_feature (1)..(220): Homolog of NCBI NO: 1754795 NR Description: omega-3 fatty acid desaturase
  misc_feature (1)..(222): Homolog of NCBI NO: 7433276 NR Description: omega-3 fatty acid desaturase (EC 1.14.99.-) FAD7
  misc_feature (1)..(223): Homolog of NCBI NO: 17064784 NR Description: temperature-sensitive omega-3 fatty acid
  misc_feature (1)..(229): Homolog of NCBI NO: 15229692 NR Description: omega-3 fatty acid desaturase, chloroplast
  misc_feature (1)..(229): Homolog of NCBI NO: 14488094 NR Description: AT3g11170/F9F8_4 [Arabidopsis thaliana]
  misc_feature (1)..(226): Homolog of NCBI NO: 7378667 NR Description: chloroplast omega-3 fatty acid desaturase
  misc_feature (1)..(229): Homolog of NCBI NO: 1345968 NR Description: Omega-3 fatty acid desaturase, chloroplast
  misc_feature (1)..(223): Homolog of NCBI NO: 15239175 NR Description: omega-3 fatty acid desaturase, chloroplast
  misc_feature (1)..(222): Homolog of NCBI NO: 1345969 NR Description: Omega-3 fatty acid desaturase, chloroplast
  misc_feature (1)..(225): Homolog of NCBI NO: 1345970 NR Description: Omega-3 fatty acid desaturase, chloroplast
  misc_feature (1)..(223): Homolog of NCBI NO: 15239175 NR Description: omega-3 fatty acid desaturase, chloroplast
  misc_feature (1)..(229): Homolog of NCBI NO: 1345968 NR Description: Omega-3 fatty acid desaturase, chloroplast
  misc_feature (1)..(226): Homolog of NCBI NO: 7378667 NR Description: chloroplast omega-3 fatty acid desaturase
  misc_feature (1)..(229): Homolog of NCBI NO: 14488094 NR Description: AT3g11170/F9F8_4 [Arabidopsis thaliana]
  misc_feature (1)..(229): Homolog of NCBI NO: 15229692 NR Description: omega-3 fatty acid desaturase, chloroplast

SEQ ID NO: 49152 - DNA, 1443 bp, Arabidopsis thaliana
  misc_feature (1)..(1443): Ceres Seq. ID no. 12578173
  misc_feature: MA Experiment ID: 20000179 Result: Up-regulated in Transcription
  misc_feature: MA Experiment 20000179 PARAMETER Experiment Name: At_Germinating_Seeds_P Parameter: Age (hr) Value: 6 vs. 0
  misc_feature: MA Experiment 20000179 PARAMETER Experiment Name: At_Germinating_Seeds_P Parameter: Tissue Value: Germinating Seeds
  misc_feature: MA Experiment ID: 20000234 Result: Down-regulated in Transcription
  misc_feature: MA Experiment 20000234 PARAMETER Experiment Name: At_Siliques_P Parameter: Age (day) Value: 21
  misc_feature: MA Experiment 20000234 PARAMETER Experiment Name: At_Siliques_P Parameter: Organism Value: A. thaliana
  misc_feature: MA Experiment 20000234 PARAMETER Experiment Name: At_Siliques_P Parameter: Plant Line Value: WS
  misc_feature: MA Experiment 20000234 PARAMETER Experiment Name: At_Siliques_P Parameter: Tissue Value: Less Than 5mm Siliques vs. Whole Plant
  misc_feature: MA Experiment ID: 20000495 Result: Down-regulated in Transcription
  misc_feature: MA Experiment 20000495 PARAMETER Experiment Name: At_Guard_Cells_P Parameter: Harvest Date Value: 8/2/2002
  misc_feature: MA Experiment 20000495 PARAMETER Experiment Name: At_Guard_Cells_P Parameter: Organism Value: A. thaliana
  misc_feature: MA Experiment 20000495 PARAMETER Experiment Name: At_Guard_Cells_P Parameter: Tissue Value: Guard Cells vs. Leaves
  misc_feature: MA Experiment ID: 20001559 Result: Down-regulated in Transcription
  misc_feature: MA Experiment 20001559 PARAMETER Experiment Name: At_Drought_Soil_Dry_P Parameter: Age (day) Value: 28
  misc_feature: MA Experiment 20001559 PARAMETER Experiment Name: At_Drought_Soil_Dry_P Parameter: Organism Value: A. thaliana
  misc_feature: MA Experiment 20001559 PARAMETER Experiment Name: At_Drought_Soil_Dry_P Parameter: Plant Line Value: WS
  misc_feature: MA Experiment 20001559 PARAMETER Experiment Name: At_Drought_Soil_Dry_P Parameter: Post Timepoint (hr) Value: 29
  misc_feature: MA Experiment 20001559 PARAMETER Experiment Name: At_Drought_Soil_Dry_P Parameter: Post-Treatment Value: Re-Water vs. No Drought
  misc_feature: MA Experiment 20001559 PARAMETER Experiment Name: At_Drought_Soil_Dry_P Parameter: Timepoint (day) Value: 14
  misc_feature: MA Experiment 20001559 PARAMETER Experiment Name: At_Drought_Soil_Dry_P Parameter: Treatment Value: Drought vs. No Drought
  misc_feature: MA Experiment ID: 20001560 Result: Down-regulated in Transcription
  misc_feature: MA Experiment 20001560 PARAMETER Experiment Name: At_Drought_Soil_Dry_P Parameter: Age (day) Value: 28
  misc_feature: MA Experiment 20001560 PARAMETER Experiment Name: At_Drought_Soil_Dry_P Parameter: Organism Value: A. thaliana
  misc_feature: MA Experiment 20001560 PARAMETER Experiment Name: At_Drought_Soil_Dry_P Parameter: Plant Line Value: WS
  misc_feature: MA Experiment 20001560 PARAMETER Experiment Name: At_Drought_Soil_Dry_P Parameter: Post Timepoint (hr) Value: None
  misc_feature: MA Experiment 20001560 PARAMETER Experiment Name: At_Drought_Soil_Dry_P Parameter: Post-Treatment Value: None
  misc_feature: MA Experiment 20001560 PARAMETER Experiment Name: At_Drought_Soil_Dry_P Parameter: Timepoint (day) Value: 14
  misc_feature: MA Experiment 20001560 PARAMETER Experiment Name: At_Drought_Soil_Dry_P Parameter: Treatment Value: Drought vs. No Drought
acctccaccaattcctcattcttccaatcgcacttcctttaccagatcagacgtcaatttcaactcttcagtgaagagatttctttcaccgaattttctactccgatcgatcaattgaagattgaaatggaagctaattcaggcggaggaggaggagctgaaggcggaagagcggtaaccggaggaggaggaggaggaggagggagcgatgtggaattggtgagcaagacgttgcaagtggagcataagctattctattttgatcttaaggagaatcctcgtggaaggtatctaaagatatcggagaagacgtcggcgacgaggtcaaccatcattgttccttcctccggcatctcttggttccttgatctcttcaactactatgtcaattctgaggaacacgagctttttagcaaagaattgcagcttgattccaaggtgttttacttcgatatcggtgagaacagaagaggacgcttcttgaaggtgtcagaagcatcggttagtagaaatcgaagtaccattattgttccagctggaagctctcctgatgaaggatgggcagctttcaggaatatattggctgagatacatgaagcatcaggactttttgtgatgccaaatcaggtgaaaccttctgatggacaggaacacttggttgatgatgttggagctggttttatacctggacatggtagtcagcagccatcttcttcagaacataatgtggatcgaacaattgactcgccaggccaggaagaaaccggaatgactggtgtttctaaagtaatcagagctgaccagaaacggttcttctttgatcttgggaacaataacaggggccatttcttaaggatatctgaggtggcaggttctgacaggtcttccatcattctaccgttatcgggtcttaagcagtttcacgaagtaattggtcactttgtggagatcaccaaagataaaattgaaggtatgacaggtgcaaatgtcaggacagttgatcctcctcagagataagtattgattctcttagaggatggaaattttcaatcctctaaccatttgaatctggcaacttcaagtcgactgcctgatcgcggtgtgcaatagtttcacgtaatatctctcgccccttcacatcttctaaaaataattcagcaggatcatcatttgccttaatagtagataaaacaaactttggagtctgcaactgggaataagctgaaaatcatccaccatgtgtatctctctctctctctctctctctccctccctccctcatttgcttctgttctgttttaactttttttgtttttgttcagtttgggtcattgggtgtatatctgttgacggcttgatgcatttcaattgtaaaagaatattggggtttatatgtttgggctaatgcctgttggaataaaagatgaagtgtaagttctatac

SEQ ID NO: 49153 - protein, 338 aa, Arabidopsis thaliana
  peptide (1)..(338): Ceres Seq. ID no. 12578174
  misc_feature (70)..(318): Pfam Name: PurA ssDNA and RNA-binding protein Pfam Description: PurA ssDNA and RNA-binding protein
  misc_feature (65)..(202): Homolog of NCBI NO: 24638638 NR Description: Purine-rich binding protein-alpha CG1507-PA
  misc_feature (264)..(326): Homolog of NCBI NO: 24638642 NR Description: Purine-rich binding protein-alpha CG1507-PD
  misc_feature (65)..(202): Homolog of NCBI NO: 24638642 NR Description: Purine-rich binding protein-alpha CG1507-PD
  misc_feature (264)..(328): Homolog of NCBI NO: 31211141 NR Description: ENSANGP00000016990 [Anopheles gambiae]
  misc_feature (44)..(234): Homolog of NCBI NO: 31211141 NR Description: ENSANGP00000016990 [Anopheles gambiae]
  misc_feature (48)..(338): Homolog of NCBI NO: 34902984 NR Description: unnamed protein product [Oryza sativa (japonica
  misc_feature (285)..(338): Homolog of NCBI NO: 25408208 NR Description: hypothetical protein At2g32080 [imported] -
  misc_feature (43)..(257): Homolog of NCBI NO: 25408208 NR Description: hypothetical protein At2g32080 [imported] -
  misc_feature (43)..(338): Homolog of NCBI NO: 30685174 NR Description: purine-rich single-stranded DNA-binding protein
  misc_feature (43)..(338): Homolog of NCBI NO: 18402871 NR Description: putative purine-rich single-stranded DNA-binding
TSTNSSFFQSHFLYQIRRQFQLFSEEISFTEFSTPIDQLKIEMEANSGGGGGAEGGRAVTGGGGGGGGSDVELVSKTLQVEHKLFYFDLKENPRGRYLKISEKTSATRSTIIVPSSGISWFLDLFNYYVNSEEHELFSKELQLDSKVFYFDIGENRRGRFLKVSEASVSRNRSTIIVPAGSSPDEGWAAFRNILAEIHEASGLFVMPNQVKPSDGQEHLVDDVGAGFIPGHGSQQPSSSEHNVDRTIDSPGQEETGMTGVSKVIRADQKRFFFDLGNNNRGHFLRISEVAGSDRSSIILPLSGLKQFHEVIGHFVEITKDKIEGMTGANVRTVDPPQR

SEQ ID NO: 49154 - protein, 296 aa, Arabidopsis thaliana
  peptide (1)..(296): Ceres Seq. ID no. 12578175
  misc_feature (28)..(276): Pfam Name: PurA ssDNA and RNA-binding protein Pfam Description: PurA ssDNA and RNA-binding protein
  misc_feature (23)..(160): Homolog of NCBI NO: 24638638 NR Description: Purine-rich binding protein-alpha CG1507-PA
  misc_feature (222)..(284): Homolog of NCBI NO: 24638642 NR Description: Purine-rich binding protein-alpha CG1507-PD
  misc_feature (23)..(160): Homolog of NCBI NO: 24638642 NR Description: Purine-rich binding protein-alpha CG1507-PD
  misc_feature (222)..(286): Homolog of NCBI NO: 31211141 NR Description: ENSANGP00000016990 [Anopheles gambiae]
  misc_feature (2)..(192): Homolog of NCBI NO: 31211141 NR Description: ENSANGP00000016990 [Anopheles gambiae]
  misc_feature (6)..(296): Homolog of NCBI NO: 34902984 NR Description: unnamed protein product [Oryza sativa (japonica
  misc_feature (243)..(296): Homolog of NCBI NO: 25408208 NR Description: hypothetical protein At2g32080 [imported] -
  misc_feature (1)..(215): Homolog of NCBI NO: 25408208 NR Description: hypothetical protein At2g32080 [imported] -
  misc_feature (1)..(296): Homolog of NCBI NO: 30685174 NR Description: purine-rich single-stranded DNA-binding protein
  misc_feature (1)..(296): Homolog of NCBI NO: 18402871 NR Description: putative purine-rich single-stranded DNA-binding
MEANSGGGGGAEGGRAVTGGGGGGGGSDVELVSKTLQVEHKLFYFDLKENPRGRYLKISEKTSATRSTIIVPSSGISWFLDLFNYYVNSEEHELFSKELQLDSKVFYFDIGENRRGRFLKVSEASVSRNRSTIIVPAGSSPDEGWAAFRNILAEIHEASGLFVMPNQVKPSDGQEHLVDDVGAGFIPGHGSQQPSSSEHNVDRTIDSPGQEETGMTGVSKVIRADQKRFFFDLGNNNRGHFLRISEVAGSDRSSIILPLSGLKQFHEVIGHFVEITKDKIEGMTGANVRTVDPPQR

SEQ ID NO: 49155 - DNA, 957 bp, Arabidopsis thaliana
  misc_feature (1)..(957): Ceres Seq. ID no. 12578284
  misc_feature: MA Experiment ID: 20000173 Result: Up-regulated in Transcription
  misc_feature: MA Experiment 20000173 PARAMETER Experiment Name: At_42deg_Heat_P Parameter: Age (day) Value: 14
  misc_feature: MA Experiment 20000173 PARAMETER Experiment Name: At_42deg_Heat_P Parameter: Organism Value: A. thaliana
  misc_feature: MA Experiment 20000173 PARAMETER Experiment Name: At_42deg_Heat_P Parameter: Plant Line Value: WS
  misc_feature: MA Experiment 20000173 PARAMETER Experiment Name: At_42deg_Heat_P Parameter: Temperature (deg C) Value: 42 vs. 22
  misc_feature: MA Experiment 20000173 PARAMETER Experiment Name: At_42deg_Heat_P Parameter: Timepoint (hr) Value: 6
  misc_feature: MA Experiment 20000173 PARAMETER Experiment Name: At_42deg_Heat_P Parameter: Tissue Value: Aerial
  misc_feature: MA Experiment ID: 20000264 Result: Down-regulated in Transcription
  misc_feature: MA Experiment 20000264 PARAMETER Experiment Name: At_Open_Flower_P Parameter: Age (day) Value: 21
  misc_feature: MA Experiment 20000264 PARAMETER Experiment Name: At_Open_Flower_P Parameter: Plant Line Value: WS
  misc_feature: MA Experiment 20000264 PARAMETER Experiment Name: At_Open_Flower_P Parameter: Tissue Value: Open Flower vs. Whole Plant
  misc_feature: MA Experiment ID: 20000495 Result: Down-regulated in Transcription
  misc_feature: MA Experiment 20000495 PARAMETER Experiment Name: At_Guard_Cells_P Parameter: Harvest Date Value: 8/2/2002
  misc_feature: MA Experiment 20000495 PARAMETER Experiment Name: At_Guard_Cells_P Parameter: Organism Value: A. thaliana
  misc_feature: MA Experiment 20000495 PARAMETER Experiment Name: At_Guard_Cells_P Parameter: Tissue Value: Guard Cells vs. Leaves
  misc_feature: MA Experiment ID: 20000794 Result: Down-regulated in Transcription
  misc_feature: MA Experiment 20000794 PARAMETER Experiment Name: At_Petals_P Parameter: Age (day) Value: 23-25 days
  misc_feature: MA Experiment 20000794 PARAMETER Experiment Name: At_Petals_P Parameter: Plant Line Value: WS
  misc_feature: MA Experiment 20000794 PARAMETER Experiment Name: At_Petals_P Parameter: Tissue Value: Petals vs. Whole plant
  misc_feature: MA Experiment ID: 20001558 Result: Up-regulated in Transcription
  misc_feature: MA Experiment 20001558 PARAMETER Experiment Name: At_Drought_Soil_Dry_P Parameter: Age (day) Value: 27
  misc_feature: MA Experiment 20001558 PARAMETER Experiment Name: At_Drought_Soil_Dry_P Parameter: Organism Value: A. thaliana
  misc_feature: MA Experiment 20001558 PARAMETER Experiment Name: At_Drought_Soil_Dry_P Parameter: Plant Line Value: WS
  misc_feature: MA Experiment 20001558 PARAMETER Experiment Name: At_Drought_Soil_Dry_P Parameter: Post Timepoint (hr) Value: 6
  misc_feature: MA Experiment 20001558 PARAMETER Experiment Name: At_Drought_Soil_Dry_P Parameter: Post-Treatment Value: Re-Water vs. No Drought
  misc_feature: MA Experiment 20001558 PARAMETER Experiment Name: At_Drought_Soil_Dry_P Parameter: Timepoint (day) Value: 13
  misc_feature: MA Experiment 20001558 PARAMETER Experiment Name: At_Drought_Soil_Dry_P Parameter: Treatment Value: Drought vs. No Drought
  misc_feature: MA Experiment ID: 20001757 Result: Up-regulated in Transcription
  misc_feature: MA Experiment 20001757 PARAMETER Experiment Name: At_50mM_NH4NO3_L-to-H_P Parameter: Timepoint (hr) Value: 6
  misc_feature: MA Experiment 20001757 PARAMETER Experiment Name: At_50mM_NH4NO3_L-to-H_P Parameter: Tissue Value: Leaf
  misc_feature: MA Experiment 20001757 PARAMETER Experiment Name: At_50mM_NH4NO3_L-to-H_P Parameter: Treatment Value: 50mM NH4NO3 vs 100mM Mannitol
atcttcttctcctcttagggtagaagaaggacgaaaatcggaggaggaagaagaagatcgattcgatttgtgatcaacgatgagctccttcaatggaaacagcaacatcgacaacctcctaatccaaaccctacttggacgtctccaaattcgtccccctaactctcatttcctctctcaatccctagacgacctcctcttcaaatccgacgacagcgacggcgatgatgacggagaaggtcagaccagtctcgacagagaagaagctaggcttgagaaagagctaatccgagtcatcgtctctggtcgaagcgattctctcaagccgaattcaggtcaagccgtgacagtcaacgaacaccacatctgcgttgggtttcatgaggatgaggaatcggattatcgtgtttgggagtggcatggtcatatcatgttgtttgatgaagagaatgggtacacgcctgagtatatctacgggaattacttcgagaggttgcctgtgaagcttcctaataaccgccgtgtggagaaggagaagaagaaggagatgaaagaagaggaggtggagaatttggggcttagagagttgatcgatggtggtgacgctgctcctggtaggattcttcataggaacaacatcaacatcggttcctcaagggtctaagttcctaagagcgtcttggtagggagaggtcacattgttcgggaagatttcagatgtgtgaacaactcgcgacaacaaaacataaggtgctggtgggtctacgggttctattccgttttatttaaaccgggaaatccatgggtgaatctgttttctttaagaaattcatctgaagttgtttctgaaccaaatttacaatacatgttaatgaagagagaaaagattacaatgcatggtcatcgaactcggaagctttcaagtttccccatgtttgtttattttgtgttcttaaa

SEQ ID NO: 49156 - protein, 194 aa, Arabidopsis thaliana
  peptide (1)..(194): Ceres Seq. ID no. 12578285
  misc_feature (132)..(193): Homolog of NCBI NO: 15222761 NR Description: hypothetical protein; protein id: At1g55710.1
  misc_feature (132)..(193): Homolog of NCBI NO: 15233979 NR Description: putative protein; protein id: At4g18690.1
  misc_feature (1)..(194): Homolog of NCBI NO: 22331772 NR Description: putative protein
  misc_feature (1)..(194): Homolog of NCBI NO: 11357797 NR Description: hypothetical protein F4P12.330 - Arabidopsis
MSSFNGNSNIDNLLIQTLLGRLQIRPPNSHFLSQSLDDLLFKSDDSDGDDDGEGQTSLDREEARLEKELIRVIVSGRSDSLKPNSGQAVTVNEHHICVGFHEDEESDYRVWEWHGHIMLFDEENGYTPEYIYGNYFERLPVKLPNNRRVEKEKKKEMKEEEVENLGLRELIDGGDAAPGRILHRNNINIGSSRV

SEQ ID NO: 49157 - DNA, 2263 bp, Arabidopsis thaliana; identical to SEQ ID NO: 44996
  misc_feature (1)..(2263): Ceres Seq. ID no. 13591573
  misc_feature: MA Experiment ID: 20000180 Result: Up-regulated in Transcription
  misc_feature: MA Experiment 20000180 PARAMETER Experiment Name: At_Germinating_Seeds_P Parameter: Age (hr) Value: 24 vs. 0
  misc_feature: MA Experiment 20000180 PARAMETER Experiment Name: At_Germinating_Seeds_P Parameter: Tissue Value: Germinating Seeds
  misc_feature: MA Experiment ID: 20000185 Result: Down-regulated in Transcription
  misc_feature: MA Experiment 20000185 PARAMETER Experiment Name: At_Roots__P Parameter: Age (day) Value: 7 vs. 21
  misc_feature: MA Experiment 20000185 PARAMETER Experiment Name: At_Roots__P Parameter: Organism Value: A. thaliana
  misc_feature: MA Experiment 20000185 PARAMETER Experiment Name: At_Roots__P Parameter: Tissue Value: Roots vs. Whole Plant
  misc_feature: MA Experiment ID: 20000438 Result: Up-regulated in Transcription
  misc_feature: MA Experiment 20000438 PARAMETER Experiment Name: At_Shoots__P Parameter: Age (day) Value: 14
  misc_feature: MA Experiment 20000438 PARAMETER Experiment Name: At_Shoots__P Parameter: Tissue Value: Shoots vs. Whole Plant
  misc_feature: MA Experiment ID: 20000439 Result: Down-regulated in Transcription
  misc_feature: MA Experiment 20000439 PARAMETER Experiment Name: At_Roots__P Parameter: Age (day) Value: 14 vs. 21
  misc_feature: MA Experiment 20000439 PARAMETER Experiment Name: At_Roots__P Parameter: Organism Value: A. thaliana
  misc_feature: MA Experiment 20000439 PARAMETER Experiment Name: At_Roots__P Parameter: Tissue Value: Roots vs. Whole Plant

SEQ ID NO: 49158 - protein, 695 aa, Arabidopsis thaliana; identical to SEQ ID NO: 44997
  peptide (1)..(695): Ceres Seq. ID no. 13591574
  misc_feature (455)..(665): Pfam Name: Peptidase family M41 Pfam Description: Peptidase family M41
  misc_feature (455)..(665): Pfam Name: Peptidase family M41 Pfam Description: Peptidase family M41
  misc_feature (455)..(665): Pfam Name: Peptidase family M41 Pfam Description: Peptidase family M41
  misc_feature (81)..(671): Homolog of NCBI NO: 16329797 NR Description: cell division protein; FtsH [Synechocystis sp.
  misc_feature (85)..(668): Homolog of NCBI NO: 17232268 NR Description: cell division protein [Nostoc sp. PCC 7120]
  misc_feature (88)..(679): Homolog of NCBI NO: 22298276 NR Description: cell division protein [Thermosynechococcus
  misc_feature (85)..(685): Homolog of NCBI NO: 11467752 NR Description: hypothetical chloroplast RF25 [Guillardia theta]
  misc_feature (87)..(676): Homolog of NCBI NO: 11465793 NR Description: ORF25 [Porphyra purpurea]
  misc_feature (81)..(671): Homolog of NCBI NO: 16329797 NR Description: cell division protein; FtsH [Synechocystis sp.
  misc_feature (88)..(679): Homolog of NCBI NO: 22298276 NR Description: cell division protein [Thermosynechococcus
  misc_feature (87)..(676): Homolog of NCBI NO: 11465793 NR Description: ORF25 [Porphyra purpurea]
  misc_feature (85)..(685): Homolog of NCBI NO: 11467752 NR Description: hypothetical chloroplast RF25 [Guillardia theta]
  misc_feature (88)..(679): Homolog of NCBI NO: 22298276 NR Description: cell division protein [Thermosynechococcus
  misc_feature (85)..(668): Homolog of NCBI NO: 17232268 NR Description: cell division protein [Nostoc sp. PCC 7120]
  misc_feature (81)..(671): Homolog of NCBI NO: 16329797 NR Description: cell division protein; FtsH [Synechocystis sp.
  misc_feature (1)..(669): Homolog of NCBI NO: 6692685 NR Description: F12K11.22 [Arabidopsis thaliana]
  misc_feature (1)..(688): Homolog of NCBI NO: 4325041 NR Description: FtsH-like protein Pftf precursor [Nicotiana
  misc_feature (1)..(695): Homolog of NCBI NO: 3808101 NR Description: chloroplast protease [Capsicum annuum]
  misc_feature (192)..(695): Homolog of NCBI NO: 21954076 NR Description: putative FtsH protease [Arabidopsis thaliana]
  misc_feature (1)..(673): Homolog of NCBI NO: 18417611 NR Description: FtsH protease, putative [Arabidopsis thaliana]
  misc_feature (1)..(669): Homolog of NCBI NO: 6692685 NR Description: F12K11.22 [Arabidopsis thaliana]
  misc_feature (1)..(688): Homolog of NCBI NO: 4325041 NR Description: FtsH-like protein Pftf precursor [Nicotiana
  misc_feature (1)..(695): Homolog of NCBI NO: 3808101 NR Description: chloroplast protease [Capsicum annuum]
  misc_feature (192)..(695): Homolog of NCBI NO: 21954076 NR Description: putative FtsH protease [Arabidopsis thaliana]
  misc_feature (1)..(673): Homolog of NCBI NO: 18417611 NR Description: FtsH protease, putative [Arabidopsis thaliana]
  misc_feature (87)..(676): Homolog of NCBI NO: 11465793 NR Description: ORF25 [Porphyra purpurea]
  misc_feature (85)..(685): Homolog of NCBI NO: 11467752 NR Description: hypothetical chloroplast RF25 [Guillardia theta]
  misc_feature (85)..(668): Homolog of NCBI NO: 17232268 NR Description: cell division protein [Nostoc sp. PCC 7120]
  misc_feature (1)..(673): Homolog of NCBI NO: 18417611 NR Description: FtsH protease, putative [Arabidopsis thaliana]
  misc_feature (192)..(695): Homolog of NCBI NO: 21954076 NR Description: putative FtsH protease [Arabidopsis thaliana]
  misc_feature (1)..(695): Homolog of NCBI NO: 3808101 NR Description: chloroplast protease [Capsicum annuum]
  misc_feature (1)..(688): Homolog of NCBI NO: 4325041 NR Description: FtsH-like protein Pftf precursor [Nicotiana
  misc_feature (1)..(669): Homolog of NCBI NO: 6692685 NR Description: F12K11.22 [Arabidopsis thaliana]

SEQ ID NO: 49159 - protein, 604 aa, Arabidopsis thaliana; identical to SEQ ID NO: 44998
  peptide (1)..(604): Ceres Seq. ID no. 13591575
  misc_feature (364)..(574): Pfam Name: Peptidase family M41 Pfam Description: Peptidase family M41
  misc_feature (364)..(574): Pfam Name: Peptidase family M41 Pfam Description: Peptidase family M41
  misc_feature (364)..(574): Pfam Name: Peptidase family M41 Pfam Description: Peptidase family M41
  misc_feature (1)..(580): Homolog of NCBI NO: 16329797 NR Description: cell division protein; FtsH [Synechocystis sp.
  misc_feature (1)..(577): Homolog of NCBI NO: 17232268 NR Description: cell division protein [Nostoc sp. PCC 7120]
  misc_feature (1)..(588): Homolog of NCBI NO: 22298276 NR Description: cell division protein [Thermosynechococcus
  misc_feature (1)..(594): Homolog of NCBI NO: 11467752 NR Description: hypothetical chloroplast RF25 [Guillardia theta]
  misc_feature (1)..(585): Homolog of NCBI NO: 11465793 NR Description: ORF25 [Porphyra purpurea]
  misc_feature (1)..(580): Homolog of NCBI NO: 16329797 NR Description: cell division protein; FtsH [Synechocystis sp.
  misc_feature (1)..(588): Homolog of NCBI NO: 22298276 NR Description: cell division protein [Thermosynechococcus
  misc_feature (1)..(585): Homolog of NCBI NO: 11465793 NR Description: ORF25 [Porphyra purpurea]
  misc_feature (1)..(594): Homolog of NCBI NO: 11467752 NR Description: hypothetical chloroplast RF25 [Guillardia theta]
  misc_feature (1)..(588): Homolog of NCBI NO: 22298276 NR Description: cell division protein [Thermosynechococcus
  misc_feature (1)..(577): Homolog of NCBI NO: 17232268 NR Description: cell division protein [Nostoc sp. PCC 7120]
  misc_feature (1)..(580): Homolog of NCBI NO: 16329797 NR Description: cell division protein; FtsH [Synechocystis sp.
  misc_feature (1)..(578): Homolog of NCBI NO: 6692685 NR Description: F12K11.22 [Arabidopsis thaliana]
  misc_feature (1)..(597): Homolog of NCBI NO: 4325041 NR Description: FtsH-like protein Pftf precursor [Nicotiana
  misc_feature (1)..(604): Homolog of NCBI NO: 3808101 NR Description: chloroplast protease [Capsicum annuum]
  misc_feature (101)..(604): Homolog of NCBI NO: 21954076 NR Description: putative FtsH protease [Arabidopsis thaliana]
  misc_feature (1)..(582): Homolog of NCBI NO: 18417611 NR Description: FtsH protease, putative [Arabidopsis thaliana]
  misc_feature (1)..(578): Homolog of NCBI NO: 6692685 NR Description: F12K11.22 [Arabidopsis thaliana]
  misc_feature (1)..(597): Homolog of NCBI NO: 4325041 NR Description: FtsH-like protein Pftf precursor [Nicotiana
  misc_feature (1)..(604): Homolog of NCBI NO: 3808101 NR Description: chloroplast protease [Capsicum annuum]
  misc_feature (101)..(604): Homolog of NCBI NO: 21954076 NR Description: putative FtsH protease [Arabidopsis thaliana]
  misc_feature (1)..(582): Homolog of NCBI NO: 18417611 NR Description: FtsH protease, putative [Arabidopsis thaliana]
  misc_feature (1)..(585): Homolog of NCBI NO: 11465793 NR Description: ORF25 [Porphyra purpurea]
  misc_feature (1)..(594): Homolog of NCBI NO: 11467752 NR Description: hypothetical chloroplast RF25 [Guillardia theta]
  misc_feature (1)..(577): Homolog of NCBI NO: 17232268 NR Description: cell division protein [Nostoc sp. PCC 7120]
  misc_feature (1)..(582): Homolog of NCBI NO: 18417611 NR Description: FtsH protease, putative [Arabidopsis thaliana]
  misc_feature (101)..(604): Homolog of NCBI NO: 21954076 NR Description: putative FtsH protease [Arabidopsis thaliana]
  misc_feature (1)..(604): Homolog of NCBI NO: 3808101 NR Description: chloroplast protease [Capsicum annuum]
  misc_feature (1)..(597): Homolog of NCBI NO: 4325041 NR Description: FtsH-like protein Pftf precursor [Nicotiana
  misc_feature (1)..(578): Homolog of NCBI NO: 6692685 NR Description: F12K11.22 [Arabidopsis thaliana]

SEQ ID NO: 49160 - protein, 499 aa, Arabidopsis thaliana; identical to SEQ ID NO: 44999
  peptide (1)..(499): Ceres Seq. ID no. 13591576
  misc_feature (259)..(469): Pfam Name: Peptidase family M41 Pfam Description: Peptidase family M41
  misc_feature (259)..(469): Pfam Name: Peptidase family M41 Pfam Description: Peptidase family M41
  misc_feature (259)..(469): Pfam Name: Peptidase family M41 Pfam Description: Peptidase family M41
  misc_feature (1)..(475): Homolog of NCBI NO: 16329797 NR Description: cell division protein; FtsH [Synechocystis sp.
  misc_feature (1)..(472): Homolog of NCBI NO: 17232268 NR Description: cell division protein [Nostoc sp. PCC 7120]
  misc_feature (1)..(483): Homolog of NCBI NO: 22298276 NR Description: cell division protein [Thermosynechococcus
  misc_feature (1)..(489): Homolog of NCBI NO: 11467752 NR Description: hypothetical chloroplast RF25 [Guillardia theta]
  misc_feature (1)..(480): Homolog of NCBI NO: 11465793 NR Description: ORF25 [Porphyra purpurea]
  misc_feature (1)..(475): Homolog of NCBI NO: 16329797 NR Description: cell division protein; FtsH [Synechocystis sp.
  misc_feature (1)..(483): Homolog of NCBI NO: 22298276 NR Description: cell division protein [Thermosynechococcus
  misc_feature (1)..(480): Homolog of NCBI NO: 11465793 NR Description: ORF25 [Porphyra purpurea]
  misc_feature (1)..(489): Homolog of NCBI NO: 11467752 NR Description: hypothetical chloroplast RF25 [Guillardia theta]
  misc_feature (1)..(483): Homolog of NCBI NO: 22298276 NR Description: cell division protein [Thermosynechococcus
  misc_feature (1)..(472): Homolog of NCBI NO: 17232268 NR Description: cell division protein [Nostoc sp. PCC 7120]
  misc_feature (1)..(475): Homolog of NCBI NO: 16329797 NR Description: cell division protein; FtsH [Synechocystis sp.
  misc_feature (1)..(473): Homolog of NCBI NO: 6692685 NR Description: F12K11.22 [Arabidopsis thaliana]
  misc_feature (1)..(492): Homolog of NCBI NO: 4325041 NR Description: FtsH-like protein Pftf precursor [Nicotiana
  misc_feature (1)..(499): Homolog of NCBI NO: 3808101 NR Description: chloroplast protease [Capsicum annuum]
  misc_feature (1)..(499): Homolog of NCBI NO: 21954076 NR Description: putative FtsH protease [Arabidopsis thaliana]
  misc_feature (1)..(477): Homolog of NCBI NO: 18417611 NR Description: FtsH protease, putative [Arabidopsis thaliana]
  misc_feature (1)..(473): Homolog of NCBI NO: 6692685 NR Description: F12K11.22 [Arabidopsis thaliana]
  misc_feature (1)..(492): Homolog of NCBI NO: 4325041 NR Description: FtsH-like protein Pftf precursor [Nicotiana
  misc_feature (1)..(499): Homolog of NCBI NO: 3808101 NR Description: chloroplast protease [Capsicum annuum]
  misc_feature (1)..(499): Homolog of NCBI NO: 21954076 NR Description: putative FtsH protease [Arabidopsis thaliana]
  misc_feature (1)..(477): Homolog of NCBI NO: 18417611 NR Description: FtsH protease, putative [Arabidopsis thaliana]
  misc_feature (1)..(480): Homolog of NCBI NO: 11465793 NR Description: ORF25 [Porphyra purpurea]
  misc_feature (1)..(489): Homolog of NCBI NO: 11467752 NR Description: hypothetical chloroplast RF25 [Guillardia theta]
  misc_feature (1)..(472): Homolog of NCBI NO: 17232268 NR Description: cell division protein [Nostoc sp. PCC 7120]
  misc_feature (1)..(477): Homolog of NCBI NO: 18417611 NR Description: FtsH protease, putative [Arabidopsis thaliana]
  misc_feature (1)..(499): Homolog of NCBI NO: 21954076 NR Description: putative FtsH protease [Arabidopsis thaliana]
  misc_feature (1)..(499): Homolog of NCBI NO: 3808101 NR Description: chloroplast protease [Capsicum annuum]
  misc_feature (1)..(492): Homolog of NCBI NO: 4325041 NR Description: FtsH-like protein Pftf precursor [Nicotiana
  misc_feature (1)..(473): Homolog of NCBI NO: 6692685 NR Description: F12K11.22 [Arabidopsis thaliana]

SEQ ID NO: 49161 - DNA, 653 bp, Arabidopsis thaliana
  misc_feature (1)..(653): Ceres Seq. ID no. 13579848
  misc_feature: MA Experiment ID: 20000307 Result: Up-regulated in Transcription
  misc_feature: MA Experiment 20000307 PARAMETER Experiment Name: At_Germinating_Seeds_Sub_P Parameter: Age (hr) Value: 24 vs. 0
  misc_feature: MA Experiment 20000307 PARAMETER Experiment Name: At_Germinating_Seeds_Sub_P Parameter: Organism Value: A. thaliana
  misc_feature: MA Experiment 20000307 PARAMETER Experiment Name: At_Germinating_Seeds_Sub_P Parameter: Plant Line Value: WS
  misc_feature: MA Experiment 20000307 PARAMETER Experiment Name: At_Germinating_Seeds_Sub_P Parameter: Tissue Value: Germinating Seeds
  misc_feature: MA Experiment ID: 20000355 Result: Down-regulated in Transcription
  misc_feature: MA Experiment 20000355 PARAMETER Experiment Name: At_Siliques_Sub_P Parameter: Age (day) Value: 21
  misc_feature: MA Experiment 20000355 PARAMETER Experiment Name: At_Siliques_Sub_P Parameter: Organism Value: A. thaliana
  misc_feature: MA Experiment 20000355 PARAMETER Experiment Name: At_Siliques_Sub_P Parameter: Plant Line Value: WS
  misc_feature: MA Experiment 20000355 PARAMETER Experiment Name: At_Siliques_Sub_P Parameter: Tissue Value: Less Than 5mm Siliques vs. Whole Plant
  misc_feature: MA Experiment ID: 20000440 Result: Down-regulated in Transcription
  misc_feature: MA Experiment 20000440 PARAMETER Experiment Name: At_Closed-Flower__Sub_P Parameter: Tissue Value: Closed Flower vs. Whole Plant
agaaaagctttcagaggatcgagcgcacttcttcaatggcgaccaaagtttacatagtgtactactcaatgtatggtcatgtggagaaattagctcaagagattaggaaaggtgctgcttctgttgatggtgttgaagccatactctggcaggtacccgaaacgctccaagaagatgtgctctctaaaatgagtgcaccaccaaagagtgatgctcctattatcaccccaaacgagctcgctgaggctgatggatttatcttcggcttcccaacgaggtttggtatgatggctgctcagttcaaggcatttttagatgcgaccggcggcctttggaggactcagcaactcgccggtaaaccagccggaatcttctacagcacagggtcccaaggtggtggtcaagaaaccaccgcattaactgccattactcagctggttcatcacgggatgatctttgtcccgattggctacacatttggtgccggaatgtttgagatggaaaatgtgaaaggtggaagcccgtacggggcgggaacatttgccggagatgggtcgagacagccaacggaactggagttggggcaagcatttcaccaagggaagtacattgccgccataagtaagaagctcaagggacctgctgctgcttag

SEQ ID NO: 49162 - protein, 216 aa, Arabidopsis thaliana
  peptide (1)..(216): Ceres Seq. ID no. 13579849
  misc_feature (78)..(163): Pfam Name: NADPH-dependent FMN reductase Pfam Description: NADPH-dependent FMN reductase
  misc_feature (12)..(211): Homolog of NCBI NO: 2564066 NR Description: LEDI-3 protein [Lithospermum erythrorhizon]
  misc_feature (49)..(214): Homolog of NCBI NO: 37724581 NR Description: putative quinone reductase [Vitis vinifera]
  misc_feature (12)..(214): Homolog of NCBI NO: 34910128 NR Description: putative 1,4-benzoquinone reductase
  misc_feature (12)..(215): Homolog of NCBI NO: 12484052 NR Description: quinone-oxidoreductase QR2 [Triphysaria
  misc_feature (12)..(214): Homolog of NCBI NO: 38636776 NR Description: putative quinone-oxidoreductase QR2
  misc_feature (12)..(212): Homolog of NCBI NO: 5031275 NR Description: unknown [Prunus armeniaca]
  misc_feature (14)..(212): Homolog of NCBI NO: 21068664 NR Description: putative quinone oxidoreductase [Cicer arietinum]
  misc_feature (12)..(215): Homolog of NCBI NO: 15239652 NR Description: quinone reductase, putative [Arabidopsis
  misc_feature (12)..(216): Homolog of NCBI NO: 7445353 NR Description: hypothetical protein M4I22.80 - Arabidopsis
  misc_feature (12)..(216): Homolog of NCBI NO: 30687535 NR Description: quinone reductase family [Arabidopsis thaliana]
KSFQRIERTSSMATKVYIVYYSMYGHVEKLAQEIRKGAASVDGVEAILWQVPETLQEDVLSKMSAPPKSDAPIITPNELAEADGFIFGFPTRFGMMAAQFKAFLDATGGLWRTQQLAGKPAGIFYSTGSQGGGQETTALTAITQLVHHGMIFVPIGYTFGAGMFEMENVKGGSPYGAGTFAGDGSRQPTELELGQAFHQGKYIAAISKKLKGPAAA

SEQ ID NO: 49163 - protein, 205 aa, Arabidopsis thaliana
  peptide (1)..(205): Ceres Seq. ID no. 13579850
  misc_feature (67)..(152): Pfam Name: NADPH-dependent FMN reductase Pfam Description: NADPH-dependent FMN reductase
  misc_feature (1)..(200): Homolog of NCBI NO: 2564066 NR Description: LEDI-3 protein [Lithospermum erythrorhizon]
  misc_feature (38)..(203): Homolog of NCBI NO: 37724581 NR Description: putative quinone reductase [Vitis vinifera]
  misc_feature (1)..(203): Homolog of NCBI NO: 34910128 NR Description: putative 1,4-benzoquinone reductase
  misc_feature (1)..(204): Homolog of NCBI NO: 12484052 NR Description: quinone-oxidoreductase QR2 [Triphysaria
  misc_feature (1)..(203): Homolog of NCBI NO: 38636776 NR Description: putative quinone-oxidoreductase QR2
  misc_feature (1)..(201): Homolog of NCBI NO: 5031275 NR Description: unknown [Prunus armeniaca]
  misc_feature (3)..(201): Homolog of NCBI NO: 21068664 NR Description: putative quinone oxidoreductase [Cicer arietinum]
  misc_feature (1)..(204): Homolog of NCBI NO: 15239652 NR Description: quinone reductase, putative [Arabidopsis
  misc_feature (1)..(205): Homolog of NCBI NO: 7445353 NR Description: hypothetical protein M4I22.80 - Arabidopsis
  misc_feature (1)..(205): Homolog of NCBI NO: 30687535 NR Description: quinone reductase family [Arabidopsis thaliana]
MATKVYIVYYSMYGHVEKLAQEIRKGAASVDGVEAILWQVPETLQEDVLSKMSAPPKSDAPIITPNELAEADGFIFGFPTRFGMMAAQFKAFLDATGGLWRTQQLAGKPAGIFYSTGSQGGGQETTALTAITQLVHHGMIFVPIGYTFGAGMFEMENVKGGSPYGAGTFAGDGSRQPTELELGQAFHQGKYIAAISKKLKGPAAA

SEQ ID NO: 49164 - protein, 194 aa, Arabidopsis thaliana
  peptide (1)..(194): Ceres Seq. ID no. 13579851
  misc_feature (56)..(141): Pfam Name: NADPH-dependent FMN reductase Pfam Description: NADPH-dependent FMN reductase
  misc_feature (1)..(189): Homolog of NCBI NO: 2564066 NR Description: LEDI-3 protein [Lithospermum erythrorhizon]
  misc_feature (27)..(192): Homolog of NCBI NO: 37724581 NR Description: putative quinone reductase [Vitis vinifera]
  misc_feature (1)..(192): Homolog of NCBI NO: 34910128 NR Description: putative 1,4-benzoquinone reductase
  misc_feature (1)..(193): Homolog of NCBI NO: 12484052 NR Description: quinone-oxidoreductase QR2 [Triphysaria
  misc_feature (1)..(192): Homolog of NCBI NO: 38636776 NR Description: putative quinone-oxidoreductase QR2
  misc_feature (1)..(190): Homolog of NCBI NO: 5031275 NR Description: unknown [Prunus armeniaca]
  misc_feature (1)..(190): Homolog of NCBI NO: 21068664 NR Description: putative quinone oxidoreductase [Cicer arietinum]
  misc_feature (1)..(193): Homolog of NCBI NO: 15239652 NR Description: quinone reductase, putative [Arabidopsis
  misc_feature (1)..(194): Homolog of NCBI NO: 7445353 NR Description: hypothetical protein M4I22.80 - Arabidopsis
  misc_feature (1)..(194): Homolog of NCBI NO: 30687535 NR Description: quinone reductase family [Arabidopsis thaliana]
MYGHVEKLAQEIRKGAASVDGVEAILWQVPETLQEDVLSKMSAPPKSDAPIITPNELAEADGFIFGFPTRFGMMAAQFKAFLDATGGLWRTQQLAGKPAGIFYSTGSQGGGQETTALTAITQLVHHGMIFVPIGYTFGAGMFEMENVKGGSPYGAGTFAGDGSRQPTELELGQAFHQGKYIAAISKKLKGPAAA

SEQ ID NO: 49165 - DNA, 2649 bp, Arabidopsis thaliana; identical to SEQ ID NO: 46523
  misc_feature (1)..(2649): Ceres Seq. ID no. 13592024
  misc_feature: MA Experiment ID: 20000315 Result: Down-regulated in Transcription
  misc_feature: MA Experiment 20000315 PARAMETER Experiment Name: At_14day_Shoots-Roots_Sub_P Parameter: Age (day) Value: 14
  misc_feature: MA Experiment 20000315 PARAMETER Experiment Name: At_14day_Shoots-Roots_Sub_P Parameter: Organism Value: A. thaliana
  misc_feature: MA Experiment 20000315 PARAMETER Experiment Name: At_14day_Shoots-Roots_Sub_P Parameter: Plant Line Value: WS
  misc_feature: MA Experiment 20000315 PARAMETER Experiment Name: At_14day_Shoots-Roots_Sub_P Parameter: Tissue Value: Shoots vs. Whole Plant

SEQ ID NO: 49166 - protein, 703 aa, Arabidopsis thaliana; identical to SEQ ID NO: 46524
  peptide (1)..(703): Ceres Seq. ID no. 13592025
  misc_feature (136)..(435): Homolog of NCBI NO: 25287608 NR Description: probable casein kinase I [imported] - Arabidopsis
  misc_feature (112)..(703): Homolog of NCBI NO: 18139937 NR Description: serine/threonine protein kinase [Chlamydomonas
  misc_feature (239)..(702): Homolog of NCBI NO: 6006848 NR Description: unknown protein, 5' partial [Arabidopsis thaliana]
  misc_feature (71)..(703): Homolog of NCBI NO: 34903604 NR Description: casein kinase-like protein
  misc_feature (1)..(702): Homolog of NCBI NO: 34394436 NR Description: putative casein kinase 1, delta isoform 1
  misc_feature (1)..(702): Homolog of NCBI NO: 28269422 NR Description: putative serine/threonine protein kinase
  misc_feature (1)..(702): Homolog of NCBI NO: 15228670 NR Description: casein kinase -related [Arabidopsis thaliana]
  misc_feature (1)..(703): Homolog of NCBI NO: 34909952 NR Description: putative casein kinase [Oryza sativa (japonica
  misc_feature (1)..(702): Homolog of NCBI NO: 15238765 NR Description: casein kinase-related protein [Arabidopsis
  misc_feature (37)..(703): Homolog of NCBI NO: 30682888 NR Description: protein kinase family [Arabidopsis thaliana]
  misc_feature (136)..(435): Homolog of NCBI NO: 25287608 NR Description: probable casein kinase I [imported] - Arabidopsis
  misc_feature (112)..(703): Homolog of NCBI NO: 18139937 NR Description: serine/threonine protein kinase [Chlamydomonas
  misc_feature (239)..(702): Homolog of NCBI NO: 6006848 NR Description: unknown protein, 5' partial [Arabidopsis thaliana]
  misc_feature (71)..(703): Homolog of NCBI NO: 34903604 NR Description: casein kinase-like protein
  misc_feature (1)..(702): Homolog of NCBI NO: 34394436 NR Description: putative casein kinase 1, delta isoform 1
  misc_feature (1)..(702): Homolog of NCBI NO: 28269422 NR Description: putative serine/threonine protein kinase
  misc_feature (1)..(702): Homolog of NCBI NO: 15228670 NR Description: casein kinase -related [Arabidopsis thaliana]
  misc_feature (1)..(703): Homolog of NCBI NO: 34909952 NR Description: putative casein kinase [Oryza sativa (japonica
  misc_feature (1)..(702): Homolog of NCBI NO: 15238765 NR Description: casein kinase-related protein [Arabidopsis
  misc_feature (37)..(703): Homolog of NCBI NO: 30682888 NR Description: protein kinase family [Arabidopsis thaliana]
  misc_feature (136)..(435): Homolog of NCBI NO: 25287608 NR Description: probable casein kinase I [imported] - Arabidopsis
  misc_feature (112)..(703): Homolog of NCBI NO: 18139937 NR Description: serine/threonine protein kinase [Chlamydomonas
  misc_feature (239)..(702): Homolog of NCBI NO: 6006848 NR Description: unknown protein, 5' partial [Arabidopsis thaliana]
  misc_feature (71)..(703): Homolog of NCBI NO: 34903604 NR Description: casein kinase-like protein
  misc_feature (1)..(702): Homolog of NCBI NO: 34394436 NR Description: putative casein kinase 1, delta isoform 1
  misc_feature (1)..(702): Homolog of NCBI NO: 28269422 NR Description: putative serine/threonine protein kinase
  misc_feature (1)..(702): Homolog of NCBI NO: 15228670 NR Description: casein kinase -related [Arabidopsis thaliana]
  misc_feature (1)..(703): Homolog of NCBI NO: 34909952 NR Description: putative casein kinase [Oryza sativa (japonica
  misc_feature (1)..(702): Homolog of NCBI NO: 15238765 NR Description: casein kinase-related protein [Arabidopsis
  misc_feature (37)..(703): Homolog of NCBI NO: 30682888 NR Description: protein kinase family [Arabidopsis thaliana]

SEQ ID NO: 49167 - protein, 603 aa, Arabidopsis thaliana; identical to SEQ ID NO: 46525
  peptide (1)..(603): Ceres Seq. ID no. 13592026
  misc_feature (36)..(335): Homolog of NCBI NO: 25287608 NR Description: probable casein kinase I [imported] - Arabidopsis
  misc_feature (12)..(603): Homolog of NCBI NO: 18139937 NR Description: serine/threonine protein kinase [Chlamydomonas
  misc_feature (139)..(602): Homolog of NCBI NO: 6006848 NR Description: unknown protein, 5' partial [Arabidopsis thaliana]
  misc_feature (1)..(603): Homolog of NCBI NO: 34903604 NR Description: casein kinase-like protein
  misc_feature (1)..(602): Homolog of NCBI NO: 34394436 NR Description: putative casein kinase 1, delta isoform 1
  misc_feature (1)..(602): Homolog of NCBI NO: 28269422 NR Description: putative serine/threonine protein kinase
  misc_feature (1)..(602): Homolog of NCBI NO: 15228670 NR Description: casein kinase -related [Arabidopsis thaliana]
  misc_feature (1)..(603): Homolog of NCBI NO: 34909952 NR Description: putative casein kinase [Oryza sativa (japonica
  misc_feature (1)..(602): Homolog of NCBI NO: 15238765 NR Description: casein kinase-related protein [Arabidopsis
  misc_feature (1)..(603): Homolog of NCBI NO: 30682888 NR Description: protein kinase family [Arabidopsis thaliana]
  misc_feature (36)..(335): Homolog of NCBI NO: 25287608 NR Description: probable casein kinase I [imported] - Arabidopsis
  misc_feature (12)..(603): Homolog of NCBI NO: 18139937 NR Description: serine/threonine protein kinase [Chlamydomonas
  misc_feature (139)..(602): Homolog of NCBI NO: 6006848 NR Description: unknown protein, 5' partial [Arabidopsis thaliana]
  misc_feature (1)..(603): Homolog of NCBI NO: 34903604 NR Description: casein kinase-like protein
  misc_feature (1)..(602): Homolog of NCBI NO: 34394436 NR Description: putative casein kinase 1, delta isoform 1
  misc_feature (1)..(602): Homolog of NCBI NO: 28269422 NR Description: putative serine/threonine protein kinase
  misc_feature (1)..(602): Homolog of NCBI NO: 15228670 NR Description: casein kinase -related [Arabidopsis thaliana]
  misc_feature (1)..(603): Homolog of NCBI NO: 34909952 NR Description: putative casein kinase [Oryza sativa (japonica
  misc_feature (1)..(602): Homolog of NCBI NO: 15238765 NR Description: casein kinase-related protein [Arabidopsis
  misc_feature (1)..(603): Homolog of NCBI NO: 30682888 NR Description: protein kinase family [Arabidopsis thaliana]
  misc_feature (36)..(335): Homolog of NCBI NO: 25287608 NR Description: probable casein kinase I [imported] - Arabidopsis
  misc_feature (12)..(603): Homolog of NCBI NO: 18139937 NR Description: serine/threonine protein kinase [Chlamydomonas
  misc_feature (139)..(602): Homolog of NCBI NO: 6006848 NR Description: unknown protein, 5' partial [Arabidopsis thaliana]
  misc_feature (1)..(603): Homolog of NCBI NO: 34903604 NR Description: casein kinase-like protein
  misc_feature (1)..(602): Homolog of NCBI NO: 34394436 NR Description: putative casein kinase 1, delta isoform 1
  misc_feature (1)..(602): Homolog of NCBI NO: 28269422 NR Description: putative serine/threonine protein kinase
  misc_feature (1)..(602): Homolog of NCBI NO: 15228670 NR Description: casein kinase -related [Arabidopsis thaliana]
  misc_feature (1)..(603): Homolog of NCBI NO: 34909952 NR Description: putative casein kinase [Oryza sativa (japonica
  misc_feature (1)..(602): Homolog of NCBI NO: 15238765 NR Description: casein kinase-related protein [Arabidopsis
  misc_feature (1)..(603): Homolog of NCBI NO: 30682888 NR Description: protein kinase family [Arabidopsis thaliana]

SEQ ID NO: 49168 - protein, 485 aa, Arabidopsis thaliana; identical to SEQ ID NO: 46526
  peptide (1)..(485): Ceres Seq. ID no. 13592027
  misc_feature (1)..(217): Homolog of NCBI NO: 25287608 NR Description: probable casein kinase I [imported] - Arabidopsis
  misc_feature (1)..(485): Homolog of NCBI NO: 18139937 NR Description: serine/threonine protein kinase [Chlamydomonas
  misc_feature (21)..(484): Homolog of NCBI NO: 6006848 NR Description: unknown protein, 5' partial [Arabidopsis thaliana]
  misc_feature (1)..(485): Homolog of NCBI NO: 34903604 NR Description: casein kinase-like protein
  misc_feature (1)..(484): Homolog of NCBI NO: 34394436 NR Description: putative casein kinase 1, delta isoform 1
  misc_feature (1)..(484): Homolog of NCBI NO: 28269422 NR Description: putative serine/threonine protein kinase
  misc_feature (1)..(484): Homolog of NCBI NO: 15228670 NR Description: casein kinase -related [Arabidopsis thaliana]
  misc_feature (1)..(485): Homolog of NCBI NO: 34909952 NR Description: putative casein kinase [Oryza sativa (japonica
  misc_feature (1)..(484): Homolog of NCBI NO: 15238765 NR Description: casein kinase-related protein [Arabidopsis
  misc_feature (1)..(485): Homolog of NCBI NO: 30682888 NR Description: protein kinase family [Arabidopsis thaliana]
  misc_feature (1)..(217): Homolog of NCBI NO: 25287608 NR Description: probable casein kinase I [imported] - Arabidopsis
  misc_feature (1)..(485): Homolog of NCBI NO: 18139937 NR Description: serine/threonine protein kinase [Chlamydomonas
  misc_feature (21)..(484): Homolog of NCBI NO: 6006848 NR Description: unknown protein, 5' partial [Arabidopsis thaliana]
  misc_feature (1)..(485): Homolog of NCBI NO: 34903604 NR Description: casein kinase-like protein
  misc_feature (1)..(484): Homolog of NCBI NO: 34394436 NR Description: putative casein kinase 1, delta isoform 1
  misc_feature (1)..(484): Homolog of NCBI NO: 28269422 NR Description: putative serine/threonine protein kinase
  misc_feature (1)..(484): Homolog of NCBI NO: 15228670 NR Description: casein kinase -related [Arabidopsis thaliana]
  misc_feature (1)..(485): Homolog of NCBI NO: 34909952 NR Description: putative casein kinase [Oryza sativa (japonica
  misc_feature (1)..(484): Homolog of NCBI NO: 15238765 NR Description: casein kinase-related protein [Arabidopsis
  misc_feature (1)..(485): Homolog of NCBI NO: 30682888 NR Description: protein kinase family [Arabidopsis thaliana]
  misc_feature (1)..(217): Homolog of NCBI NO: 25287608 NR Description: probable casein kinase I [imported] - Arabidopsis
  misc_feature (1)..(485): Homolog of NCBI NO: 18139937 NR Description: serine/threonine protein kinase [Chlamydomonas
  misc_feature (21)..(484): Homolog of NCBI NO: 6006848 NR Description: unknown protein, 5' partial [Arabidopsis thaliana]
  misc_feature (1)..(485): Homolog of NCBI NO: 34903604 NR Description: casein kinase-like protein
  misc_feature (1)..(484): Homolog of NCBI NO: 34394436 NR Description: putative casein kinase 1, delta isoform 1
  misc_feature (1)..(484): Homolog of NCBI NO: 28269422 NR Description: putative serine/threonine protein kinase
  misc_feature (1)..(484): Homolog of NCBI NO: 15228670 NR Description: casein kinase -related [Arabidopsis thaliana]
  misc_feature (1)..(485): Homolog of NCBI NO: 34909952 NR Description: putative casein kinase [Oryza sativa (japonica
  misc_feature (1)..(484): Homolog of NCBI NO: 15238765 NR Description: casein kinase-related protein [Arabidopsis
  misc_feature (1)..(485): Homolog of NCBI NO: 30682888 NR Description: protein kinase family [Arabidopsis thaliana]

SEQ ID NO: 49169 - DNA, 1563 bp, Arabidopsis thaliana
  misc_feature (1)..(1563): Ceres Seq. ID no. 12578031
  misc_feature: MA Experiment ID: 20000184 Result: Up-regulated in Transcription
  misc_feature: MA Experiment 20000184 PARAMETER Experiment Name: At_Shoots__P Parameter: Age (day) Value: 7
  misc_feature: MA Experiment 20000184 PARAMETER Experiment Name: At_Shoots__P Parameter: Tissue Value: Shoots vs. Whole Plant
  misc_feature: MA Experiment ID: 20000438 Result: Up-regulated in Transcription
  misc_feature: MA Experiment 20000438 PARAMETER Experiment Name: At_Shoots__P Parameter: Age (day) Value: 14
  misc_feature: MA Experiment 20000438 PARAMETER Experiment Name: At_Shoots__P Parameter: Tissue Value: Shoots vs. Whole Plant
  misc_feature: MA Experiment ID: 20000444 Result: Up-regulated in Transcription
  misc_feature: MA Experiment 20000444 PARAMETER Experiment Name: At_100uM_NAA__P Parameter: Age (day) Value: 14
  misc_feature: MA Experiment 20000444 PARAMETER Experiment Name: At_100uM_NAA__P Parameter: Organism Value: A. thaliana
  misc_feature: MA Experiment 20000444 PARAMETER Experiment Name: At_100uM_NAA__P Parameter: Plant Line Value: WS
  misc_feature: MA Experiment 20000444 PARAMETER Experiment Name: At_100uM_NAA__P Parameter: Timepoint (hr) Value: 1
  misc_feature: MA Experiment 20000444 PARAMETER Experiment Name: At_100uM_NAA__P Parameter: Tissue Value: Aerial
  misc_feature: MA Experiment 20000444 PARAMETER Experiment Name: At_100uM_NAA__P Parameter: Treatment Value: 100uM NAA vs. No Treatment
  misc_feature: MA Experiment ID: 20000445 Result: Up-regulated in Transcription
  misc_feature: MA Experiment 20000445 PARAMETER Experiment Name: At_100uM_NAA__P Parameter: Age (day) Value: 14
  misc_feature: MA Experiment 20000445 PARAMETER Experiment Name: At_100uM_NAA__P Parameter: Organism Value: A. thaliana
  misc_feature: MA Experiment 20000445 PARAMETER Experiment Name: At_100uM_NAA__P Parameter: Plant Line Value: WS
  misc_feature: MA Experiment 20000445 PARAMETER Experiment Name: At_100uM_NAA__P Parameter: Timepoint (hr) Value: 6
  misc_feature: MA Experiment 20000445 PARAMETER Experiment Name: At_100uM_NAA__P Parameter: Tissue Value: Aerial
  misc_feature: MA Experiment 20000445 PARAMETER Experiment Name: At_100uM_NAA__P Parameter: Treatment Value: 100uM NAA vs. No Treatment
  misc_feature: MA Experiment ID: 20001247 Result: Up-regulated in Transcription
  misc_feature: MA Experiment 20001247 PARAMETER Experiment Name: At_Far-red-induction_P Parameter: Age (day) Value: 7
  misc_feature: MA Experiment 20001247 PARAMETER Experiment Name: At_Far-red-induction_P Parameter: Light Value: Far-red vs. White
  misc_feature: MA Experiment 20001247 PARAMETER Experiment Name: At_Far-red-induction_P Parameter: Organism Value: A. thaliana
  misc_feature: MA Experiment 20001247 PARAMETER Experiment Name: At_Far-red-induction_P Parameter: Plant Line Value: Columbia
  misc_feature: MA Experiment 20001247 PARAMETER Experiment Name: At_Far-red-induction_P Parameter: Timepoint (hr) Value: 1
  misc_feature: MA Experiment 20001247 PARAMETER Experiment Name: At_Far-red-induction_P Parameter: Tissue Value: Whole Plant
  misc_feature: MA Experiment ID: 20001248 Result: Up-regulated in Transcription
  misc_feature: MA Experiment 20001248 PARAMETER Experiment Name: At_Far-red-induction_P Parameter: Age (day) Value: 7
  misc_feature: MA Experiment 20001248 PARAMETER Experiment Name: At_Far-red-induction_P Parameter: Light Value: Far-red vs. White
  misc_feature: MA Experiment 20001248 PARAMETER Experiment Name: At_Far-red-induction_P Parameter: Organism Value: A. thaliana
  misc_feature: MA Experiment 20001248 PARAMETER Experiment Name: At_Far-red-induction_P Parameter: Plant Line Value: Columbia
  misc_feature: MA Experiment 20001248 PARAMETER Experiment Name: At_Far-red-induction_P Parameter: Timepoint (hr) Value: 4
  misc_feature: MA Experiment 20001248 PARAMETER Experiment Name: At_Far-red-induction_P Parameter: Tissue Value: Whole Plant
  misc_feature: MA Experiment ID: 20001450 Result: Up-regulated in Transcription
  misc_feature: MA Experiment 20001450 PARAMETER Experiment Name: At_Far-red-induction_P Parameter: Age (day) Value: 7
  misc_feature: MA Experiment 20001450 PARAMETER Experiment Name: At_Far-red-induction_P Parameter: Light Value: Far-red vs. White
  misc_feature: MA Experiment 20001450 PARAMETER Experiment Name: At_Far-red-induction_P Parameter: Organism Value: A. thaliana
  misc_feature: MA Experiment 20001450 PARAMETER Experiment Name: At_Far-red-induction_P Parameter: Plant Line Value: Columbia
  misc_feature: MA Experiment 20001450 PARAMETER Experiment Name: At_Far-red-induction_P Parameter: Timepoint (hr) Value: 8
  misc_feature: MA Experiment 20001450 PARAMETER Experiment Name: At_Far-red-induction_P Parameter: Tissue Value: Whole Plant
  misc_feature: MA Experiment ID: 20001555 Result: Down-regulated in Transcription
  misc_feature: MA Experiment 20001555 PARAMETER Experiment Name: At_Drought_Soil_Dry_P Parameter: Age (day) Value: 24
  misc_feature: MA Experiment 20001555 PARAMETER Experiment Name: At_Drought_Soil_Dry_P Parameter: Organism Value: A. thaliana
  misc_feature: MA Experiment 20001555 PARAMETER Experiment Name: At_Drought_Soil_Dry_P Parameter: Plant Line Value: WS
  misc_feature: MA Experiment 20001555 PARAMETER Experiment Name: At_Drought_Soil_Dry_P Parameter: Post Timepoint (hr) Value: None
  misc_feature: MA Experiment 20001555 PARAMETER Experiment Name: At_Drought_Soil_Dry_P Parameter: Post-Treatment Value: None
  misc_feature: MA Experiment 20001555 PARAMETER Experiment Name: At_Drought_Soil_Dry_P Parameter: Timepoint (day) Value: 10
  misc_feature: MA Experiment 20001555 PARAMETER Experiment Name: At_Drought_Soil_Dry_P Parameter: Treatment Value: Drought vs. No Drought
  misc_feature: MA Experiment ID: 20001556 Result: Down-regulated in Transcription
  misc_feature: MA Experiment 20001556 PARAMETER Experiment Name: At_Drought_Soil_Dry_P Parameter: Age (day) Value: 26
  misc_feature: MA Experiment 20001556 PARAMETER Experiment Name: At_Drought_Soil_Dry_P Parameter: Organism Value: A. thaliana
  misc_feature: MA Experiment 20001556 PARAMETER Experiment Name: At_Drought_Soil_Dry_P Parameter: Plant Line Value: WS
  misc_feature: MA Experiment 20001556 PARAMETER Experiment Name: At_Drought_Soil_Dry_P Parameter: Post Timepoint (hr) Value: None
  misc_feature: MA Experiment 20001556 PARAMETER Experiment Name: At_Drought_Soil_Dry_P Parameter: Post-Treatment Value: None
  misc_feature: MA Experiment 20001556 PARAMETER Experiment Name: At_Drought_Soil_Dry_P Parameter: Timepoint (day) Value: 12
  misc_feature: MA Experiment 20001556 PARAMETER Experiment Name: At_Drought_Soil_Dry_P Parameter: Treatment Value: Drought vs. No Drought
atggaggaagaaagtagcagctggttcattccaaaggttcttgttctgtctgtaatcttaagtcttgtaatagtgaagggtatgtctctgttatggtggagaccaagaaagattgaagaacatttctctaaacaaggaattcgaggtcctccttatcatttcttcatcggaaatgttaaagaacttgttggaatgatgcttaaagcttcttctcatcctatgcctttctctcacaatattcttcctagagttctctctttttaccatcactggagaaaaatctacggtgctacatttctggtttggttcggtccaactttccggttaacggtagccgatcctgatttgatcagagagatcttctctaagtctgagttctacgagaagaatgaagctcaccctttggttaaacaacttgaaggcgatggactacttagtctcaaaggtgaaaaatgggctcatcatcgaaaaatcattagccctacttttcatatggagaatcttaagttgcttgtaccagttgtgttgaagagtgtgactgatatggtggataaatggtccgataagttatcagaaaacggtgaagttgaggtagatgtctatgagtggtttcagattttgactgaagatgttattagtagaacagcttttggaagtagctatgaagatggtcgagcagtttttcgacttcaagctcaacaaatgcttctttgtgctgaagcttttcaaaaagtcttcattcctggctatagattttttccgacaagagggaatttgaagtcttggaagttagacaaggagataaggaagtcgttgttgaagctgatagagcggcggagacaaaacgctatagatggagaaggggaagaatgtaaggagccggcggcgaaggatttgttgggattaatgattcaggcaaagaatgtgacggttcaggacattgtggaggagtgtaaaagctttttcttcgccgggaaacagacaacttctaatctgctgacgtggacgaccatcttgctatccatgcacccggagtggcaggccaaagcacgtgatgaggtcctcagggtctgcggctcacgtgatgtccctaccaaggaccatgtcgttaagcttaaaacgttgagtatgatcttgaacgagtctttaaggttgtatccaccaatagtagctacgattcgacgcgctaaatcggatgtgaagctaggagggtacaaaatcccatgtggcacggagcttctaatcccaatcatagcggtccatcatgaccaagccatttggggtaatgacgtgaacgaattcaatccagctcggtttgcggatggagtgccgcgtgctgccaaacaccccgttggcttcataccgtttggcctcggagttcgtacatgcattggtcagaatcttgctatacttcaggccaaattgacactcgctgtaatgatccaacgcttcacctttcacttggctcctacttatcagcatgcacctaccgtccttatgttgctttatcctcaacatggtgcaccaatcaccttccggagattgaccaatcatgaggattga

SEQ ID NO: 49170 - protein, 520 aa, Arabidopsis thaliana
  peptide (1)..(520): Ceres Seq. ID no. 12578032
  misc_feature (4)..(515): Homolog of NCBI NO: 13661774 NR Description: putative cytochrome P450 [Lolium rigidum]
  misc_feature (4)..(515): Homolog of NCBI NO: 13661772 NR Description: putative cytochrome P450 [Lolium rigidum]
  misc_feature (1)..(515): Homolog of NCBI NO: 13661770 NR Description: putative cytochrome P450 [Lolium rigidum]
  misc_feature (5)..(515): Homolog of NCBI NO: 34912882 NR Description: putative cytochrome P450 [Oryza sativa (japonica
  misc_feature (1)..(516): Homolog of NCBI NO: 21805645 NR Description: cytochrome P450 monooxygenase CYP72A5 [Zea mays
  misc_feature (4)..(515): Homolog of NCBI NO: 21842133 NR Description: cytochrome P450 monooxygenase CYP72A16 [Zea mays
  misc_feature (31)..(517): Homolog of NCBI NO: 34898914 NR Description: putative cytochrome P450 [Oryza sativa (japonica
  misc_feature (23)..(96): Homolog of NCBI NO: 34896248 NR Description: OSJNBb0008D07.14 [Oryza sativa (japonica
  misc_feature (96)..(513): Homolog of NCBI NO: 34896248 NR Description: OSJNBb0008D07.14 [Oryza sativa (japonica
  misc_feature (1)..(520): Homolog of NCBI NO: 15225777 NR Description: cytochrome P450, putative; protein id:
MEEESSSWFIPKVLVLSVILSLVIVKGMSLLWWRPRKIEEHFSKQGIRGPPYHFFIGNVKELVGMMLKASSHPMPFSHNILPRVLSFYHHWRKIYGATFLVWFGPTFRLTVADPDLIREIFSKSEFYEKNEAHPLVKQLEGDGLLSLKGEKWAHHRKIISPTFHMENLKLLVPVVLKSVTDMVDKWSDKLSENGEVEVDVYEWFQILTEDVISRTAFGSSYEDGRAVFRLQAQQMLLCAEAFQKVFIPGYRFFPTRGNLKSWKLDKEIRKSLLKLIERRRQNAIDGEGEECKEPAAKDLLGLMIQAKNVTVQDIVEECKSFFFAGKQTTSNLLTWTTILLSMHPEWQAKARDEVLRVCGSRDVPTKDHVVKLKTLSMILNESLRLYPPIVATIRRAKSDVKLGGYKIPCGTELLIPIIAVHHDQAIWGNDVNEFNPARFADGVPRAAKHPVGFIPFGLGVRTCIGQNLAILQAKLTLAVMIQRFTFHLAPTYQHAPTVLMLLYPQHGAPITFRRLTNHED

SEQ ID NO: 49171 - protein, 493 aa, Arabidopsis thaliana
  peptide (1)..(493): Ceres Seq. ID no. 12578033
  misc_feature (1)..(488): Homolog of NCBI NO: 13661774 NR Description: putative cytochrome P450 [Lolium rigidum]
  misc_feature (1)..(488): Homolog of NCBI NO: 13661772 NR Description: putative cytochrome P450 [Lolium rigidum]
  misc_feature (1)..(488): Homolog of NCBI NO: 13661770 NR Description: putative cytochrome P450 [Lolium rigidum]
  misc_feature (1)..(488): Homolog of NCBI NO: 34912882 NR Description: putative cytochrome P450 [Oryza sativa (japonica
  misc_feature (1)..(489): Homolog of NCBI NO: 21805645 NR Description: cytochrome P450 monooxygenase CYP72A5 [Zea mays
  misc_feature (1)..(488): Homolog of NCBI NO: 21842133 NR Description: cytochrome P450 monooxygenase CYP72A16 [Zea mays
  misc_feature (4)..(490): Homolog of NCBI NO: 34898914 NR Description: putative cytochrome P450 [Oryza sativa (japonica
  misc_feature (1)..(69): Homolog of NCBI NO: 34896248 NR Description: OSJNBb0008D07.14 [Oryza sativa (japonica
  misc_feature (69)..(486): Homolog of NCBI NO: 34896248 NR Description: OSJNBb0008D07.14 [Oryza sativa (japonica
  misc_feature (1)..(493): Homolog of NCBI NO: 15225777 NR Description: cytochrome P450, putative; protein id:
MSLLWWRPRKIEEHFSKQGIRGPPYHFFIGNVKELVGMMLKASSHPMPFSHNILPRVLSFYHHWRKIYGATFLVWFGPTFRLTVADPDLIREIFSKSEFYEKNEAHPLVKQLEGDGLLSLKGEKWAHHRKIISPTFHMENLKLLVPVVLKSVTDMVDKWSDKLSENGEVEVDVYEWFQILTEDVISRTAFGSSYEDGRAVFRLQAQQMLLCAEAFQKVFIPGYRFFPTRGNLKSWKLDKEIRKSLLKLIERRRQNAIDGEGEECKEPAAKDLLGLMIQAKNVTVQDIVEECKSFFFAGKQTTSNLLTWTTILLSMHPEWQAKARDEVLRVCGSRDVPTKDHVVKLKTLSMILNESLRLYPPIVATIRRAKSDVKLGGYKIPCGTELLIPIIAVHHDQAIWGNDVNEFNPARFADGVPRAAKHPVGFIPFGLGVRTCIGQNLAILQAKLTLAVMIQRFTFHLAPTYQHAPTVLMLLYPQHGAPITFRRLTNHED

SEQ ID NO: 49172 - protein, 456 aa, Arabidopsis thaliana
  peptide (1)..(456): Ceres Seq. ID no. 12578034
  misc_feature (1)..(451): Homolog of NCBI NO: 13661774 NR Description: putative cytochrome P450 [Lolium rigidum]
  misc_feature (1)..(451): Homolog of NCBI NO: 13661772 NR Description: putative cytochrome P450 [Lolium rigidum]
  misc_feature (1)..(451): Homolog of NCBI NO: 13661770 NR Description: putative cytochrome P450 [Lolium rigidum]
  misc_feature (1)..(451): Homolog of NCBI NO: 34912882 NR Description: putative cytochrome P450 [Oryza sativa (japonica
  misc_feature (1)..(452): Homolog of NCBI NO: 21805645 NR Description: cytochrome P450 monooxygenase CYP72A5 [Zea mays
  misc_feature (1)..(451): Homolog of NCBI NO: 21842133 NR Description: cytochrome P450 monooxygenase CYP72A16 [Zea mays
  misc_feature (1)..(453): Homolog of NCBI NO: 34898914 NR Description: putative cytochrome P450 [Oryza sativa (japonica
  misc_feature (1)..(32): Homolog of NCBI NO: 34896248 NR Description: OSJNBb0008D07.14 [Oryza sativa (japonica
  misc_feature (32)..(449): Homolog of NCBI NO: 34896248 NR Description: OSJNBb0008D07.14 [Oryza sativa (japonica
  misc_feature (1)..(456): Homolog of NCBI NO: 15225777 NR Description: cytochrome P450, putative; protein id:
MMLKASSHPMPFSHNILPRVLSFYHHWRKIYGATFLVWFGPTFRLTVADPDLIREIFSKSEFYEKNEAHPLVKQLEGDGLLSLKGEKWAHHRKIISPTFHMENLKLLVPVVLKSVTDMVDKWSDKLSENGEVEVDVYEWFQILTEDVISRTAFGSSYEDGRAVFRLQAQQMLLCAEAFQKVFIPGYRFFPTRGNLKSWKLDKEIRKSLLKLIERRRQNAIDGEGEECKEPAAKDLLGLMIQAKNVTVQDIVEECKSFFFAGKQTTSNLLTWTTILLSMHPEWQAKARDEVLRVCGSRDVPTKDHVVKLKTLSMILNESLRLYPPIVATIRRAKSDVKLGGYKIPCGTELLIPIIAVHHDQAIWGNDVNEFNPARFADGVPRAAKHPVGFIPFGLGVRTCIGQNLAILQAKLTLAVMIQRFTFHLAPTYQHAPTVLMLLYPQHGAPITFRRLTNHED

SEQ ID NO: 49173 - DNA, 1829 bp, Arabidopsis thaliana
  misc_feature (1)..(1829): Ceres Seq. ID no. 12578035
  misc_feature: MA Experiment ID: 20000166 Result: Down-regulated in Transcription
  misc_feature: MA Experiment 20000166 PARAMETER Experiment Name: At_100uM_ABA_P Parameter: Age (day) Value: 14
  misc_feature: MA Experiment 20000166 PARAMETER Experiment Name: At_100uM_ABA_P Parameter: Organism Value: A. thaliana
  misc_feature: MA Experiment 20000166 PARAMETER Experiment Name: At_100uM_ABA_P Parameter: Plant Line Value: WS
  misc_feature: MA Experiment 20000166 PARAMETER Experiment Name: At_100uM_ABA_P Parameter: Timepoint (hr) Value: 1
  misc_feature: MA Experiment 20000166 PARAMETER Experiment Name: At_100uM_ABA_P Parameter: Tissue Value: Aerial
  misc_feature: MA Experiment 20000166 PARAMETER Experiment Name: At_100uM_ABA_P Parameter: Treatment Value: 100uM ABA vs. No Treatment
  misc_feature: MA Experiment ID: 20000180 Result: Down-regulated in Transcription
  misc_feature: MA Experiment 20000180 PARAMETER Experiment Name: At_Germinating_Seeds_P Parameter: Age (hr) Value: 24 vs. 0
  misc_feature: MA Experiment 20000180 PARAMETER Experiment Name: At_Germinating_Seeds_P Parameter: Tissue Value: Germinating Seeds
  misc_feature: MA Experiment ID: 20000264 Result: Up-regulated in Transcription
  misc_feature: MA Experiment 20000264 PARAMETER Experiment Name: At_Open_Flower_P Parameter: Age (day) Value: 21
  misc_feature: MA Experiment 20000264 PARAMETER Experiment Name: At_Open_Flower_P Parameter: Plant Line Value: WS
  misc_feature: MA Experiment 20000264 PARAMETER Experiment Name: At_Open_Flower_P Parameter: Tissue Value: Open Flower vs. Whole Plant
  misc_feature: MA Experiment ID: 20000265 Result: Up-regulated in Transcription
  misc_feature: MA Experiment 20000265 PARAMETER Experiment Name: At_Open_Flower_P Parameter: Age (day) Value: 21
  misc_feature: MA Experiment 20000265 PARAMETER Experiment Name: At_Open_Flower_P Parameter: Plant Line Value: WS
  misc_feature: MA Experiment 20000265 PARAMETER Experiment Name: At_Open_Flower_P Parameter: Tissue Value: Closed Flower vs. Whole Plant
  misc_feature: MA Experiment ID: 20000286 Result: Up-regulated in Transcription
  misc_feature: MA Experiment 20000286 PARAMETER Experiment Name: At_Open_Flower_P Parameter: Age (day) Value: 21
  misc_feature: MA Experiment 20000286 PARAMETER Experiment Name: At_Open_Flower_P Parameter: Plant Line Value: WS
  misc_feature: MA Experiment 20000286 PARAMETER Experiment Name: At_Open_Flower_P Parameter: Tissue Value: Half Open vs. Whole Plant
  misc_feature: MA Experiment ID: 20000453 Result: Down-regulated in Transcription
  misc_feature: MA Experiment 20000453 PARAMETER Experiment Name: At_100uM_ABA_P Parameter: Age (day) Value: 15
  misc_feature: MA Experiment 20000453 PARAMETER Experiment Name: At_100uM_ABA_P Parameter: Organism Value: A. thaliana
  misc_feature: MA Experiment 20000453 PARAMETER Experiment Name: At_100uM_ABA_P Parameter: Plant Line Value: WS
  misc_feature: MA Experiment 20000453 PARAMETER Experiment Name: At_100uM_ABA_P Parameter: Timepoint (hr) Value: 24
  misc_feature: MA Experiment 20000453 PARAMETER Experiment Name: At_100uM_ABA_P Parameter: Tissue Value: Aerial
  misc_feature: MA Experiment 20000453 PARAMETER Experiment Name: At_100uM_ABA_P Parameter: Treatment Value: 100uM ABA vs. No Treatment
  misc_feature: MA Experiment ID: 20000456 Result: Up-regulated in Transcription
  misc_feature: MA Experiment 20000456 PARAMETER Experiment Name: At_100uM_BA_P Parameter: Age (day) Value: 14
  misc_feature: MA Experiment 20000456 PARAMETER Experiment Name: At_100uM_BA_P Parameter: Organism Value: A. thaliana
  misc_feature: MA Experiment 20000456 PARAMETER Experiment Name: At_100uM_BA_P Parameter: Plant Line Value: WS
  misc_feature: MA Experiment 20000456 PARAMETER Experiment Name: At_100uM_BA_P Parameter: Timepoint (hr) Value: 6
  misc_feature: MA Experiment 20000456 PARAMETER Experiment Name: At_100uM_BA_P Parameter: Tissue Value: Aerial
  misc_feature: MA Experiment 20000456 PARAMETER Experiment Name: At_100uM_BA_P Parameter: Treatment Value: 100uM BA vs. No Treatment
  misc_feature: MA Experiment ID: 20000709 Result: Up-regulated in Transcription
  misc_feature: MA Experiment 20000709 PARAMETER Experiment Name: At_15mM_NH4NO3_L-to-H_P Parameter: Age (hr) Value: 14
  misc_feature: MA Experiment 20000709 PARAMETER Experiment Name: At_15mM_NH4NO3_L-to-H_P Parameter: Organism Value: A. thaliana
  misc_feature: MA Experiment 20000709 PARAMETER Experiment Name: At_15mM_NH4NO3_L-to-H_P Parameter: Plant Line Value: WS
  misc_feature: MA Experiment 20000709 PARAMETER Experiment Name: At_15mM_NH4NO3_L-to-H_P Parameter: Timepoint (hr) Value: 4
  misc_feature: MA Experiment 20000709 PARAMETER Experiment Name: At_15mM_NH4NO3_L-to-H_P Parameter: Tissue Value: Aerial
  misc_feature: MA Experiment 20000709 PARAMETER Experiment Name: At_15mM_NH4NO3_L-to-H_P Parameter: Treatment Value: 15mM NH4NO3 vs. 30mM Mannitol
  misc_feature: MA Experiment ID: 20001556 Result: Up-regulated in Transcription
  misc_feature: MA Experiment 20001556 PARAMETER Experiment Name: At_Drought_Soil_Dry_P Parameter: Age (day) Value: 26
  misc_feature: MA Experiment 20001556 PARAMETER Experiment Name: At_Drought_Soil_Dry_P Parameter: Organism Value: A. thaliana
  misc_feature: MA Experiment 20001556 PARAMETER Experiment Name: At_Drought_Soil_Dry_P Parameter: Plant Line Value: WS
  misc_feature: MA Experiment 20001556 PARAMETER Experiment Name: At_Drought_Soil_Dry_P Parameter: Post Timepoint (hr) Value: None
  misc_feature: MA Experiment 20001556 PARAMETER Experiment Name: At_Drought_Soil_Dry_P Parameter: Post-Treatment Value: None
  misc_feature: MA Experiment 20001556 PARAMETER Experiment Name: At_Drought_Soil_Dry_P Parameter: Timepoint (day) Value: 12
  misc_feature: MA Experiment 20001556 PARAMETER Experiment Name: At_Drought_Soil_Dry_P Parameter: Treatment Value: Drought vs. No Drought
  misc_feature: MA Experiment ID: 20001557 Result: Up-regulated in Transcription
  misc_feature: MA Experiment 20001557 PARAMETER Experiment Name: At_Drought_Soil_Dry_P Parameter: Age (day) Value: 27
  misc_feature: MA Experiment 20001557 PARAMETER Experiment Name: At_Drought_Soil_Dry_P Parameter: Organism Value: A. thaliana
  misc_feature: MA Experiment 20001557 PARAMETER Experiment Name: At_Drought_Soil_Dry_P Parameter: Plant Line Value: WS
  misc_feature: MA Experiment 20001557 PARAMETER Experiment Name: At_Drought_Soil_Dry_P Parameter: Post Timepoint (hr) Value: 3
  misc_feature: MA Experiment 20001557 PARAMETER Experiment Name: At_Drought_Soil_Dry_P Parameter: Post-Treatment Value: Re-Water vs. No Drought
  misc_feature: MA Experiment 20001557 PARAMETER Experiment Name: At_Drought_Soil_Dry_P Parameter: Timepoint (day) Value: 13
  misc_feature: MA Experiment 20001557 PARAMETER Experiment Name: At_Drought_Soil_Dry_P Parameter: Treatment Value: Drought vs. No Drought
  misc_feature: MA Experiment ID: 20001558 Result: Up-regulated in Transcription
  misc_feature: MA Experiment 20001558 PARAMETER Experiment Name: At_Drought_Soil_Dry_P Parameter: Age (day) Value: 27
  misc_feature: MA Experiment 20001558 PARAMETER Experiment Name: At_Drought_Soil_Dry_P Parameter: Organism Value: A. thaliana
  misc_feature: MA Experiment 20001558 PARAMETER Experiment Name: At_Drought_Soil_Dry_P Parameter: Plant Line Value: WS
  misc_feature: MA Experiment 20001558 PARAMETER Experiment Name: At_Drought_Soil_Dry_P Parameter: Post Timepoint (hr) Value: 6
  misc_feature: MA Experiment 20001558 PARAMETER Experiment Name: At_Drought_Soil_Dry_P Parameter: Post-Treatment Value: Re-Water vs. No Drought
  misc_feature: MA Experiment 20001558 PARAMETER Experiment Name: At_Drought_Soil_Dry_P Parameter: Timepoint (day) Value: 13
  misc_feature: MA Experiment 20001558 PARAMETER Experiment Name: At_Drought_Soil_Dry_P Parameter: Treatment Value: Drought vs. No Drought
  misc_feature: MA Experiment ID: 20001559 Result: Up-regulated in Transcription
  misc_feature: MA Experiment 20001559 PARAMETER Experiment Name: At_Drought_Soil_Dry_P Parameter: Age (day) Value: 28
  misc_feature: MA Experiment 20001559 PARAMETER Experiment Name: At_Drought_Soil_Dry_P Parameter: Organism Value: A. thaliana
  misc_feature: MA Experiment 20001559 PARAMETER Experiment Name: At_Drought_Soil_Dry_P Parameter: Plant Line Value: WS
  misc_feature: MA Experiment 20001559 PARAMETER Experiment Name: At_Drought_Soil_Dry_P Parameter: Post Timepoint (hr) Value: 29
  misc_feature: MA Experiment 20001559 PARAMETER Experiment Name: At_Drought_Soil_Dry_P Parameter: Post-Treatment Value: Re-Water vs. No Drought
  misc_feature: MA Experiment 20001559 PARAMETER Experiment Name: At_Drought_Soil_Dry_P Parameter: Timepoint (day) Value: 14
  misc_feature: MA Experiment 20001559 PARAMETER Experiment Name: At_Drought_Soil_Dry_P Parameter: Treatment Value: Drought vs. No Drought
  misc_feature: MA Experiment ID: 20001757 Result: Up-regulated in Transcription
  misc_feature: MA Experiment 20001757 PARAMETER Experiment Name: At_50mM_NH4NO3_L-to-H_P Parameter: Timepoint (hr) Value: 6
  misc_feature: MA Experiment 20001757 PARAMETER Experiment Name: At_50mM_NH4NO3_L-to-H_P Parameter: Tissue Value: Leaf
  misc_feature: MA Experiment 20001757 PARAMETER Experiment Name: At_50mM_NH4NO3_L-to-H_P Parameter: Treatment Value: 50mM NH4NO3 vs 100mM Mannitol
  misc_feature: MA Experiment ID: 20001768 Result: Down-regulated in Transcription
  misc_feature: MA Experiment 20001768 PARAMETER Experiment Name: At_Far-red-enriched-adult_P Parameter: Age (day) Value: 28
  misc_feature: MA Experiment 20001768 PARAMETER Experiment Name: At_Far-red-enriched-adult_P Parameter: Light Value: Far-red enriched vs. White
  misc_feature: MA Experiment 20001768 PARAMETER Experiment Name: At_Far-red-enriched-adult_P Parameter: Organism Value: A. thaliana
  misc_feature: MA Experiment 20001768 PARAMETER Experiment Name: At_Far-red-enriched-adult_P Parameter: Plant Line Value: Columbia
  misc_feature: MA Experiment 20001768 PARAMETER Experiment Name: At_Far-red-enriched-adult_P Parameter: Timepoint (hr) Value: 1
  misc_feature: MA Experiment 20001768 PARAMETER Experiment Name: At_Far-red-enriched-adult_P Parameter: Tissue Value: Aerial
ctgccgcttttaaatctctcatcttcttcctcgtgtcactctttctctcacactctgcaaaaacattttcttgtctctcctctgcccaaattttttttctttccaggaatatttcctagaaaaacccaagcaaagctttaaccccttcctcctccaaaagtagcatcttcctctttttctatttctcctttcctcttcttatctctctctcgtttgtgaacgattccttaagaatataaccaaaagcccttttctcctttcttcaactttccgggaaaaatcttcacgcagcaaggtttctctctcggctctcgcagtgtttttcgtgccttttgttctttctataaaaaaaaaattcgcgtcctttaagaaaactttttccacctagagaagaagaagagtatcactcttgttgttcaagtttctctctttaataaaaaatccatctttattctttgtcttctttcctttttgctttccctaatctctatgttataaacacacagagagaaacaaagtcacagtctcgagtcaaaaacagagaatacgaaagaaaaatggaagcggagaagaaaatggttctaccgagaatcaaattcacagagcacaaaaccaacacgacaacaatcgtatcggagttaaccaacactcaccaaaccaggattcttcgtatctcagtcactgacccagacgctactgattcctccagtgacgacgaagaagaagaacatcaacgctttgtctctaaacgccgtcgtgttaagaagtttgtcaacgaagtctatctcgattccggtgctgttgttactggtagttgtggtcaaatggagtcgaagaagagacaaaagagagcggttaaatcggagtctactgtttctccggttgtttcagcgacgacgactacgacgggagagaagaagttccgaggagtgagacagcgtccatggggaaaatgggcggcggagataagagatccgttgaaacgtgtacggctctggttaggtacttacaacacggcggaagaagctgctatggtttacgataacgccgctattcagcttcgtggtcccgacgctctgactaatttctcagtcactccgacaacagcgacggagaagaaagccccaccaccgtctccggtgaagaagaagaagaagaaaaacaacaaaagcaaaaaatccgttactgcttcttcctccatcagcagaagcagcagcaacgattgtctctgctctccggtgtctgttctccgatctcctttcgccgtcgacgaattctccggcatttcttcatcaccagtcgcggccgttgtagtcaaggaagagccatccatgacaacggtatctgaaactttctctgatttctcggcgcccttgttctcagatgatgacgtgttcgatttccggagctcagtggttcccgactatctcggcggcgatttatttggggaagatctattcacggcggatatgtgtacggatatgaacttcggattcgatttcggatccggattatccagctggcacatggaggaccattttcaagatatcggggatctattcgggtcggatcctcttttagctgtttaataatattttaaataaataaatagttataccggccgttactaaacggaaccggagaaagttttgtataccggtgacataaaatctcggttatgttcgtaatctttttttctttgttatatataaaaatatgaatgaaactgaattaatgtaagttaatggtgataattattaacgttttaagttttgaaaaataattttcgtctgttaacgataatgggaggtcgagtttctttttgcttc

SEQ ID NO: 49174 - protein, 343 aa, Arabidopsis thaliana
  peptide (1)..(343): Ceres Seq. ID no. 12578036
  misc_feature (119)..(183): Pfam Name: AP2 domain Pfam Description: AP2 domain
  misc_feature (35)..(330): Homolog of NCBI NO: 15225959 NR Description: putative AP2 domain transcription factor
  misc_feature (35)..(232): Homolog of NCBI NO: 34898320 NR Description: Similar to Nicotiana tabacum mRNA for ERF1,
  misc_feature (191)..(343): Homolog of NCBI NO: 15237053 NR Description: putative Ap2 domain protein; protein id:
  misc_feature (11)..(330): Homolog of NCBI NO: 15233169 NR Description: putative protein
  misc_feature (34)..(335): Homolog of NCBI NO: 34904146 NR Description: unnamed protein product [Oryza sativa (japonica
  misc_feature (7)..(342): Homolog of NCBI NO: 15234337 NR Description: putative protein; protein id: At4g27950.1
  misc_feature (35)..(297): Homolog of NCBI NO: 15237053 NR Description: putative Ap2 domain protein; protein id:
  misc_feature (12)..(290): Homolog of NCBI NO: 15238705 NR Description: putative protein; protein id: At5g53290.1
  misc_feature (1)..(343): Homolog of NCBI NO: 22655200 NR Description: putative Ap2 domain protein [Arabidopsis thaliana]
  misc_feature (1)..(343): Homolog of NCBI NO: 15236595 NR Description: putative Ap2 domain protein
MEAEKKMVLPRIKFTEHKTNTTTIVSELTNTHQTRILRISVTDPDATDSSSDDEEEEHQRFVSKRRRVKKFVNEVYLDSGAVVTGSCGQMESKKRQKRAVKSESTVSPVVSATTTTTGEKKFRGVRQRPWGKWAAEIRDPLKRVRLWLGTYNTAEEAAMVYDNAAIQLRGPDALTNFSVTPTTATEKKAPPPSPVKKKKKKNNKSKKSVTASSSISRSSSNDCLCSPVSVLRSPFAVDEFSGISSSPVAAVVVKEEPSMTTVSETFSDFSAPLFSDDDVFDFRSSVVPDYLGGDLFGEDLFTADMCTDMNFGFDFGSGLSSWHMEDHFQDIGDLFGSDPLLAV

SEQ ID NO: 49175 - protein, 337 aa, Arabidopsis thaliana
  peptide (1)..(337): Ceres Seq. ID no. 12578037
  misc_feature (113)..(177): Pfam Name: AP2 domain Pfam Description: AP2 domain
  misc_feature (29)..(324): Homolog of NCBI NO: 15225959 NR Description: putative AP2 domain transcription factor
  misc_feature (29)..(226): Homolog of NCBI NO: 34898320 NR Description: Similar to Nicotiana tabacum mRNA for ERF1,
  misc_feature (185)..(337): Homolog of NCBI NO: 15237053 NR Description: putative Ap2 domain protein; protein id:
  misc_feature (5)..(324): Homolog of NCBI NO: 15233169 NR Description: putative protein
  misc_feature (28)..(329): Homolog of NCBI NO: 34904146 NR Description: unnamed protein product [Oryza sativa (japonica
  misc_feature (1)..(336): Homolog of NCBI NO: 15234337 NR Description: putative protein; protein id: At4g27950.1
  misc_feature (29)..(291): Homolog of NCBI NO: 15237053 NR Description: putative Ap2 domain protein; protein id:
  misc_feature (6)..(284): Homolog of NCBI NO: 15238705 NR Description: putative protein; protein id: At5g53290.1
  misc_feature (1)..(337): Homolog of NCBI NO: 22655200 NR Description: putative Ap2 domain protein [Arabidopsis thaliana]
  misc_feature (1)..(337): Homolog of NCBI NO: 15236595 NR Description: putative Ap2 domain protein
MVLPRIKFTEHKTNTTTIVSELTNTHQTRILRISVTDPDATDSSSDDEEEEHQRFVSKRRRVKKFVNEVYLDSGAVVTGSCGQMESKKRQKRAVKSESTVSPVVSATTTTTGEKKFRGVRQRPWGKWAAEIRDPLKRVRLWLGTYNTAEEAAMVYDNAAIQLRGPDALTNFSVTPTTATEKKAPPPSPVKKKKKKNNKSKKSVTASSSISRSSSNDCLCSPVSVLRSPFAVDEFSGISSSPVAAVVVKEEPSMTTVSETFSDFSAPLFSDDDVFDFRSSVVPDYLGGDLFGEDLFTADMCTDMNFGFDFGSGLSSWHMEDHFQDIGDLFGSDPLLAV

SEQ ID NO: 49176 - protein, 254 aa, Arabidopsis thaliana
  peptide (1)..(254): Ceres Seq. ID no. 12578038
  misc_feature (30)..(94): Pfam Name: AP2 domain Pfam Description: AP2 domain
  misc_feature (1)..(241): Homolog of NCBI NO: 15225959 NR Description: putative AP2 domain transcription factor
  misc_feature (1)..(143): Homolog of NCBI NO: 34898320 NR Description: Similar to Nicotiana tabacum mRNA for ERF1,
  misc_feature (102)..(254): Homolog of NCBI NO: 15237053 NR Description: putative Ap2 domain protein; protein id:
  misc_feature (1)..(241): Homolog of NCBI NO: 15233169 NR Description: putative protein
  misc_feature (1)..(246): Homolog of NCBI NO: 34904146 NR Description: unnamed protein product [Oryza sativa (japonica
  misc_feature (1)..(253): Homolog of NCBI NO: 15234337 NR Description: putative protein; protein id: At4g27950.1
  misc_feature (1)..(208): Homolog of NCBI NO: 15237053 NR Description: putative Ap2 domain protein; protein id:
  misc_feature (1)..(201): Homolog of NCBI NO: 15238705 NR Description: putative protein; protein id: At5g53290.1
  misc_feature (1)..(254): Homolog of NCBI NO: 22655200 NR Description: putative Ap2 domain protein [Arabidopsis thaliana]
  misc_feature (1)..(254): Homolog of NCBI NO: 15236595 NR Description: putative Ap2 domain protein
MESKKRQKRAVKSESTVSPVVSATTTTTGEKKFRGVRQRPWGKWAAEIRDPLKRVRLWLGTYNTAEEAAMVYDNAAIQLRGPDALTNFSVTPTTATEKKAPPPSPVKKKKKKNNKSKKSVTASSSISRSSSNDCLCSPVSVLRSPFAVDEFSGISSSPVAAVVVKEEPSMTTVSETFSDFSAPLFSDDDVFDFRSSVVPDYLGGDLFGEDLFTADMCTDMNFGFDFGSGLSSWHMEDHFQDIGDLFGSDPLLAV

SEQ ID NO: 49177 - DNA, 1492 bp, Arabidopsis thaliana
  misc_feature (1)..(1492): Ceres Seq. ID no. 12578039
  misc_feature: MA Experiment ID: 20000179 Result: Up-regulated in Transcription
  misc_feature: MA Experiment 20000179 PARAMETER Experiment Name: At_Germinating_Seeds_P Parameter: Age (hr) Value: 6 vs. 0
  misc_feature: MA Experiment 20000179 PARAMETER Experiment Name: At_Germinating_Seeds_P Parameter: Tissue Value: Germinating Seeds
  misc_feature: MA Experiment ID: 20000180 Result: Up-regulated in Transcription
  misc_feature: MA Experiment 20000180 PARAMETER Experiment Name: At_Germinating_Seeds_P Parameter: Age (hr) Value: 24 vs. 0
  misc_feature: MA Experiment 20000180 PARAMETER Experiment Name: At_Germinating_Seeds_P Parameter: Tissue Value: Germinating Seeds
  misc_feature: MA Experiment ID: 20000213 Result: Down-regulated in Transcription
  misc_feature: MA Experiment 20000213 PARAMETER Experiment Name: At_4deg_Cold_P Parameter: Timepoint (hr) Value: 2
  misc_feature: MA Experiment ID: 20000227 Result: Down-regulated in Transcription
  misc_feature: MA Experiment 20000227 PARAMETER Experiment Name: At_Root-Tips-vs-Tops_P Parameter: Tissue Value: Root Tips vs. Root Tops
  misc_feature: MA Experiment ID: 20000234 Result: Down-regulated in Transcription
  misc_feature: MA Experiment 20000234 PARAMETER Experiment Name: At_Siliques_P Parameter: Age (day) Value: 21
  misc_feature: MA Experiment 20000234 PARAMETER Experiment Name: At_Siliques_P Parameter: Organism Value: A. thaliana
  misc_feature: MA Experiment 20000234 PARAMETER Experiment Name: At_Siliques_P Parameter: Plant Line Value: WS
  misc_feature: MA Experiment 20000234 PARAMETER Experiment Name: At_Siliques_P Parameter: Tissue Value: Less Than 5mm Siliques vs. Whole Plant
  misc_feature: MA Experiment ID: 20000235 Result: Down-regulated in Transcription
  misc_feature: MA Experiment 20000235 PARAMETER Experiment Name: At_Siliques_P Parameter: Age (day) Value: 21
  misc_feature: MA Experiment 20000235 PARAMETER Experiment Name: At_Siliques_P Parameter: Organism Value: A. thaliana
  misc_feature: MA Experiment 20000235 PARAMETER Experiment Name: At_Siliques_P Parameter: Plant Line Value: WS
  misc_feature: MA Experiment 20000235 PARAMETER Experiment Name: At_Siliques_P Parameter: Tissue Value: 5-10mm Siliques vs. Whole Plant
  misc_feature: MA Experiment ID: 20000264 Result: Down-regulated in Transcription
  misc_feature: MA Experiment 20000264 PARAMETER Experiment Name: At_Open_Flower_P Parameter: Age (day) Value: 21
  misc_feature: MA Experiment 20000264 PARAMETER Experiment Name: At_Open_Flower_P Parameter: Plant Line Value: WS
  misc_feature: MA Experiment 20000264 PARAMETER Experiment Name: At_Open_Flower_P Parameter: Tissue Value: Open Flower vs. Whole Plant
  misc_feature: MA Experiment ID: 20000265 Result: Down-regulated in Transcription
  misc_feature: MA Experiment 20000265 PARAMETER Experiment Name: At_Open_Flower_P Parameter: Age (day) Value: 21
  misc_feature: MA Experiment 20000265 PARAMETER Experiment Name: At_Open_Flower_P Parameter: Plant Line Value: WS
  misc_feature: MA Experiment 20000265 PARAMETER Experiment Name: At_Open_Flower_P Parameter: Tissue Value: Closed Flower vs. Whole Plant
  misc_feature: MA Experiment ID: 20000286 Result: Down-regulated in Transcription
  misc_feature: MA Experiment 20000286 PARAMETER Experiment Name: At_Open_Flower_P Parameter: Age (day) Value: 21
  misc_feature: MA Experiment 20000286 PARAMETER Experiment Name: At_Open_Flower_P Parameter: Plant Line Value: WS
  misc_feature: MA Experiment 20000286 PARAMETER Experiment Name: At_Open_Flower_P Parameter: Tissue Value: Half Open vs. Whole Plant
  misc_feature: MA Experiment ID: 20000451 Result: Down-regulated in Transcription
  misc_feature: MA Experiment 20000451 PARAMETER Experiment Name: At_CS6879_Shoots-Roots_P Parameter: Age (day) Value: 14
  misc_feature: MA Experiment 20000451 PARAMETER Experiment Name: At_CS6879_Shoots-Roots_P Parameter: Organism Value: A. thaliana
  misc_feature: MA Experiment 20000451 PARAMETER Experiment Name: At_CS6879_Shoots-Roots_P Parameter: Plant Line Value: CS6879 vs. WS
  misc_feature: MA Experiment 20000451 PARAMETER Experiment Name: At_CS6879_Shoots-Roots_P Parameter: Tissue Value: Roots
  misc_feature: MA Experiment ID: 20000574 Result: Down-regulated in Transcription
  misc_feature: MA Experiment 20000574 PARAMETER Experiment Name: At_100uM_ABA_Mutants__P Parameter: Organism Value: A. thaliana
  misc_feature: MA Experiment 20000574 PARAMETER Experiment Name: At_100uM_ABA_Mutants__P Parameter: Plant Line Value: CS23 vs. Ler wt
  misc_feature: MA Experiment 20000574 PARAMETER Experiment Name: At_100uM_ABA_Mutants__P Parameter: Timepoint (hr) Value: N/A
  misc_feature: MA Experiment 20000574 PARAMETER Experiment Name: At_100uM_ABA_Mutants__P Parameter: Tissue Value: Whole Plant
  misc_feature: MA Experiment 20000574 PARAMETER Experiment Name: At_100uM_ABA_Mutants__P Parameter: Treatment Value: None
  misc_feature: MA Experiment ID: 20001557 Result: Down-regulated in Transcription
  misc_feature: MA Experiment 20001557 PARAMETER Experiment Name: At_Drought_Soil_Dry_P Parameter: Age (day) Value: 27
  misc_feature: MA Experiment 20001557 PARAMETER Experiment Name: At_Drought_Soil_Dry_P Parameter: Organism Value: A. thaliana
  misc_feature: MA Experiment 20001557 PARAMETER Experiment Name: At_Drought_Soil_Dry_P Parameter: Plant Line Value: WS
  misc_feature: MA Experiment 20001557 PARAMETER Experiment Name: At_Drought_Soil_Dry_P Parameter: Post Timepoint (hr) Value: 3
  misc_feature: MA Experiment 20001557 PARAMETER Experiment Name: At_Drought_Soil_Dry_P Parameter: Post-Treatment Value: Re-Water vs. No Drought
  misc_feature: MA Experiment 20001557 PARAMETER Experiment Name: At_Drought_Soil_Dry_P Parameter: Timepoint (day) Value: 13
  misc_feature: MA Experiment 20001557 PARAMETER Experiment Name: At_Drought_Soil_Dry_P Parameter: Treatment Value: Drought vs. No Drought
  misc_feature: MA Experiment ID: 20001560 Result: Down-regulated in Transcription
  misc_feature: MA Experiment 20001560 PARAMETER Experiment Name: At_Drought_Soil_Dry_P Parameter: Age (day) Value: 28
  misc_feature: MA Experiment 20001560 PARAMETER Experiment Name: At_Drought_Soil_Dry_P Parameter: Organism Value: A. thaliana
  misc_feature: MA Experiment 20001560 PARAMETER Experiment Name: At_Drought_Soil_Dry_P Parameter: Plant Line Value: WS
  misc_feature: MA Experiment 20001560 PARAMETER Experiment Name: At_Drought_Soil_Dry_P Parameter: Post Timepoint (hr) Value: None
  misc_feature: MA Experiment 20001560 PARAMETER Experiment Name: At_Drought_Soil_Dry_P Parameter: Post-Treatment Value: None
  misc_feature: MA Experiment 20001560 PARAMETER Experiment Name: At_Drought_Soil_Dry_P Parameter: Timepoint (day) Value: 14
  misc_feature: MA Experiment 20001560 PARAMETER Experiment Name: At_Drought_Soil_Dry_P Parameter: Treatment Value: Drought vs. No Drought
actcacacctcgtctcctaatctgtacggttcttatttcgaaagggtaaaaaccaaaagcgacgcaaagggcaaaatcggaaaaagtgttttatttatggccgccgttagtagttcgtcggagaccggagactgcggcgttacgggaaagagagatgagatcatgttgttcggagttagagtcgtggttgatccgatgagaaagtgtgtgagtttgaacaatctctctgattatgaaaagtcttctccggaggatgagatccctaagatagtcaccgccggagctggagatggtgaagataagaacgaaacggatgcgacggtgattgtcgctgacggttacgcctccgccaatgacgctgtccagatttcgtcttcttccggcgggaggaaacgaggggttccatggacagagaacgagcataagaggttcttgattgggttgcagaaagtaggaaaaggagattggaaaggaatatcaagaaactttgtgaagagtaggactcctactcaagtagctagtcatgctcagaaatacttcctccgacgaaccaacctcaaccgtcgccgaagaagatctagcctttttgatatcactactgagacggttacagaaatggccatggagcaagatcctactcaggagaactcaccactacctgaaaccaacatcagctctggacagcaagcgatgcaagtttttactgacgtgccgacaaaaactgagaatgcaccagagacatttcatctcaacgatccatatctggttccagtaaccttccaagcaaagccaacattcaatctaaacacagatgctgctccactttctctcaacctttgtctggcatcctcatttaatcttaacgagcaacccaactcaagacactcggctttcacgatgatgccaagcttcagcgatggagatagcaatagcagcatcatcagagttgcttagagcttaaacccaaggtgaatctacaagaccttgtttctttctttgtttctctgttgttgtagtactagtagtacatattaggtataaacagataagaaaaaagaaccctattaagtctcagtcctgtttttgatctttctttaggccttactttgtcaaacttttatgtattttgtctgaaaatataatcaggggaaaaaaaaaacagaacaaaaacagaggaaggctatagagattgatggacaaactgtgtctagggtgcttcatcatctttgtttgtttgtaaaactcttgtcacacacactgttatgagtcattttctgctgtgtgtgttttgttttgtggtgatgtaagttaaaaacaagcgtgattctcatgtggcccatctcaatcaatggttggtgatttgtggggtttttaggcttttctattatcttatcttttggggataagataaaagcctaaaactgtatgtaactatgtatggttcttcgaatattttatcatttatctctaatgtcataataatgttgccaat

SEQ ID NO: 49178 - protein, 317 aa, Arabidopsis thaliana
  peptide (1)..(317): Ceres Seq. ID no. 12578040
  misc_feature (133)..(180): Pfam Name: Myb-like DNA-binding domain Pfam Description: Myb-like DNA-binding domain
  misc_feature (43)..(305): Homolog of NCBI NO: 15228185 NR Description: putative MYB family transcription factor; protein
  misc_feature (37)..(222): Homolog of NCBI NO: 1076660 NR Description: D13F(MYBST1) protein - potato
  misc_feature (37)..(222): Homolog of NCBI NO: 7705206 NR Description: MybSt1 [Solanum tuberosum]
  misc_feature (37)..(260): Homolog of NCBI NO: 24850307 NR Description: transcription factor MYBS3
  misc_feature (37)..(317): Homolog of NCBI NO: 37536856 NR Description: putative Myb-related protein
  misc_feature (54)..(252): Homolog of NCBI NO: 15238083 NR Description: Myb-related transcription activator-like
  misc_feature (53)..(312): Homolog of NCBI NO: 28629811 NR Description: transcription factor Myb1 [Malus xiaojinensis]
  misc_feature (35)..(298): Homolog of NCBI NO: 15221408 NR Description: myb family transcription factor
  misc_feature (33)..(317): Homolog of NCBI NO: 21593684 NR Description: Myb-related transcription activator, putative
  misc_feature (33)..(317): Homolog of NCBI NO: 15221922 NR Description: myb family transcription factor
THTSSPNLYGSYFERVKTKSDAKGKIGKSVLFMAAVSSSSETGDCGVTGKRDEIMLFGVRVVVDPMRKCVSLNNLSDYEKSSPEDEIPKIVTAGAGDGEDKNETDATVIVADGYASANDAVQISSSSGGRKRGVPWTENEHKRFLIGLQKVGKGDWKGISRNFVKSRTPTQVASHAQKYFLRRTNLNRRRRRSSLFDITTETVTEMAMEQDPTQENSPLPETNISSGQQAMQVFTDVPTKTENAPETFHLNDPYLVPVTFQAKPTFNLNTDAAPLSLNLCLASSFNLNEQPNSRHSAFTMMPSFSDGDSNSSIIRVA

SEQ ID NO: 49179 - protein, 285 aa, Arabidopsis thaliana
  peptide (1)..(285): Ceres Seq. ID no. 12578041
  misc_feature (101)..(148): Pfam Name: Myb-like DNA-binding domain Pfam Description: Myb-like DNA-binding domain
  misc_feature (11)..(273): Homolog of NCBI NO: 15228185 NR Description: putative MYB family transcription factor; protein
  misc_feature (5)..(190): Homolog of NCBI NO: 1076660 NR Description: D13F(MYBST1) protein - potato
  misc_feature (5)..(190): Homolog of NCBI NO: 7705206 NR Description: MybSt1 [Solanum tuberosum]
  misc_feature (5)..(228): Homolog of NCBI NO: 24850307 NR Description: transcription factor MYBS3
  misc_feature (5)..(285): Homolog of NCBI NO: 37536856 NR Description: putative Myb-related protein
  misc_feature (22)..(220): Homolog of NCBI NO: 15238083 NR Description: Myb-related transcription activator-like
  misc_feature (21)..(280): Homolog of NCBI NO: 28629811 NR Description: transcription factor Myb1 [Malus xiaojinensis]
  misc_feature (3)..(266): Homolog of NCBI NO: 15221408 NR Description: myb family transcription factor
  misc_feature (1)..(285): Homolog of NCBI NO: 21593684 NR Description: Myb-related transcription activator, putative
  misc_feature (1)..(285): Homolog of NCBI NO: 15221922 NR Description: myb family transcription factor
MAAVSSSSETGDCGVTGKRDEIMLFGVRVVVDPMRKCVSLNNLSDYEKSSPEDEIPKIVTAGAGDGEDKNETDATVIVADGYASANDAVQISSSSGGRKRGVPWTENEHKRFLIGLQKVGKGDWKGISRNFVKSRTPTQVASHAQKYFLRRTNLNRRRRRSSLFDITTETVTEMAMEQDPTQENSPLPETNISSGQQAMQVFTDVPTKTENAPETFHLNDPYLVPVTFQAKPTFNLNTDAAPLSLNLCLASSFNLNEQPNSRHSAFTMMPSFSDGDSNSSIIRVA

SEQ ID NO: 49180 - protein, 263 aa, Arabidopsis thaliana
  peptide (1)..(263): Ceres Seq. ID no. 12578042
  misc_feature (79)..(126): Pfam Name: Myb-like DNA-binding domain Pfam Description: Myb-like DNA-binding domain
  misc_feature (1)..(251): Homolog of NCBI NO: 15228185 NR Description: putative MYB family transcription factor; protein
  misc_feature (1)..(168): Homolog of NCBI NO: 1076660 NR Description: D13F(MYBST1) protein - potato
  misc_feature (1)..(168): Homolog of NCBI NO: 7705206 NR Description: MybSt1 [Solanum tuberosum]
  misc_feature (1)..(206): Homolog of NCBI NO: 24850307 NR Description: transcription factor MYBS3
  misc_feature (1)..(263): Homolog of NCBI NO: 37536856 NR Description: putative Myb-related protein
  misc_feature (1)..(198): Homolog of NCBI NO: 15238083 NR Description: Myb-related transcription activator-like
  misc_feature (1)..(258): Homolog of NCBI NO: 28629811 NR Description: transcription factor Myb1 [Malus xiaojinensis]
  misc_feature (1)..(244): Homolog of NCBI NO: 15221408 NR Description: myb family transcription factor
  misc_feature (1)..(263): Homolog of NCBI NO: 21593684 NR Description: Myb-related transcription activator, putative
  misc_feature (1)..(263): Homolog of NCBI NO: 15221922 NR Description: myb family transcription factor
MLFGVRVVVDPMRKCVSLNNLSDYEKSSPEDEIPKIVTAGAGDGEDKNETDATVIVADGYASANDAVQISSSSGGRKRGVPWTENEHKRFLIGLQKVGKGDWKGISRNFVKSRTPTQVASHAQKYFLRRTNLNRRRRRSSLFDITTETVTEMAMEQDPTQENSPLPETNISSGQQAMQVFTDVPTKTENAPETFHLNDPYLVPVTFQAKPTFNLNTDAAPLSLNLCLASSFNLNEQPNSRHSAFTMMPSFSDGDSNSSIIRVA

SEQ ID NO: 49181 - DNA, 1770 bp, Arabidopsis thaliana
  misc_feature (1)..(1770): Ceres Seq. ID no. 12601427
  misc_feature: MA Experiment ID: 20000166 Result: Up-regulated in Transcription
  misc_feature: MA Experiment 20000166 PARAMETER Experiment Name: At_100uM_ABA_P Parameter: Age (day) Value: 14
  misc_feature: MA Experiment 20000166 PARAMETER Experiment Name: At_100uM_ABA_P Parameter: Organism Value: A. thaliana
  misc_feature: MA Experiment 20000166 PARAMETER Experiment Name: At_100uM_ABA_P Parameter: Plant Line Value: WS
  misc_feature: MA Experiment 20000166 PARAMETER Experiment Name: At_100uM_ABA_P Parameter: Timepoint (hr) Value: 1
  misc_feature: MA Experiment 20000166 PARAMETER Experiment Name: At_100uM_ABA_P Parameter: Tissue Value: Aerial
  misc_feature: MA Experiment 20000166 PARAMETER Experiment Name: At_100uM_ABA_P Parameter: Treatment Value: 100uM ABA vs. No Treatment
  misc_feature: MA Experiment ID: 20000171 Result: Down-regulated in Transcription
  misc_feature: MA Experiment 20000171 PARAMETER Experiment Name: At_42deg_Heat_P Parameter: Age (day) Value: 14
  misc_feature: MA Experiment 20000171 PARAMETER Experiment Name: At_42deg_Heat_P Parameter: Organism Value: A. thaliana
  misc_feature: MA Experiment 20000171 PARAMETER Experiment Name: At_42deg_Heat_P Parameter: Plant Line Value: WS
  misc_feature: MA Experiment 20000171 PARAMETER Experiment Name: At_42deg_Heat_P Parameter: Temperature (deg C) Value: 42 vs. 22
  misc_feature: MA Experiment 20000171 PARAMETER Experiment Name: At_42deg_Heat_P Parameter: Timepoint (hr) Value: 1
  misc_feature: MA Experiment 20000171 PARAMETER Experiment Name: At_42deg_Heat_P Parameter: Tissue Value: Aerial
  misc_feature: MA Experiment ID: 20000180 Result: Up-regulated in Transcription
  misc_feature: MA Experiment 20000180 PARAMETER Experiment Name: At_Germinating_Seeds_P Parameter: Age (hr) Value: 24 vs. 0
  misc_feature: MA Experiment 20000180 PARAMETER Experiment Name: At_Germinating_Seeds_P Parameter: Tissue Value: Germinating Seeds
  misc_feature: MA Experiment ID: 20000211 Result: Up-regulated in Transcription
  misc_feature: MA Experiment 20000211 PARAMETER Experiment Name: At_0.001percent_MeJA__P Parameter: Age (day) Value: 14
  misc_feature: MA Experiment 20000211 PARAMETER Experiment Name: At_0.001percent_MeJA__P Parameter: Organism Value: A. thaliana
  misc_feature: MA Experiment 20000211 PARAMETER Experiment Name: At_0.001percent_MeJA__P Parameter: Plant Line Value: WS
  misc_feature: MA Experiment 20000211 PARAMETER Experiment Name: At_0.001percent_MeJA__P Parameter: Timepoint (hr) Value: 1
  misc_feature: MA Experiment 20000211 PARAMETER Experiment Name: At_0.001percent_MeJA__P Parameter: Tissue Value: Aerial
  misc_feature: MA Experiment 20000211 PARAMETER Experiment Name: At_0.001percent_MeJA__P Parameter: Treatment Value: 0.001percent MeJA vs. No Treatment
  misc_feature: MA Experiment ID: 20000265 Result: Up-regulated in Transcription
  misc_feature: MA Experiment 20000265 PARAMETER Experiment Name: At_Open_Flower_P Parameter: Age (day) Value: 21
  misc_feature: MA Experiment 20000265 PARAMETER Experiment Name: At_Open_Flower_P Parameter: Plant Line Value: WS
  misc_feature: MA Experiment 20000265 PARAMETER Experiment Name: At_Open_Flower_P Parameter: Tissue Value: Closed Flower vs. Whole Plant
  misc_feature: MA Experiment ID: 20000495 Result: Up-regulated in Transcription
  misc_feature: MA Experiment 20000495 PARAMETER Experiment Name: At_Guard_Cells_P Parameter: Harvest Date Value: 8/2/2002
  misc_feature: MA Experiment 20000495 PARAMETER Experiment Name: At_Guard_Cells_P Parameter: Organism Value: A. thaliana
  misc_feature: MA Experiment 20000495 PARAMETER Experiment Name: At_Guard_Cells_P Parameter: Tissue Value: Guard Cells vs. Leaves
  misc_feature: MA Experiment ID: 20001248 Result: Down-regulated in Transcription
  misc_feature: MA Experiment 20001248 PARAMETER Experiment Name: At_Far-red-induction_P Parameter: Age (day) Value: 7
  misc_feature: MA Experiment 20001248 PARAMETER Experiment Name: At_Far-red-induction_P Parameter: Light Value: Far-red vs. White
  misc_feature: MA Experiment 20001248 PARAMETER Experiment Name: At_Far-red-induction_P Parameter: Organism Value: A. thaliana
  misc_feature: MA Experiment 20001248 PARAMETER Experiment Name: At_Far-red-induction_P Parameter: Plant Line Value: Columbia
  misc_feature: MA Experiment 20001248 PARAMETER Experiment Name: At_Far-red-induction_P Parameter: Timepoint (hr) Value: 4
  misc_feature: MA Experiment 20001248 PARAMETER Experiment Name: At_Far-red-induction_P Parameter: Tissue Value: Whole Plant
  misc_feature: MA Experiment ID: 20001450 Result: Down-regulated in Transcription
  misc_feature: MA Experiment 20001450 PARAMETER Experiment Name: At_Far-red-induction_P Parameter: Age (day) Value: 7
  misc_feature: MA Experiment 20001450 PARAMETER Experiment Name: At_Far-red-induction_P Parameter: Light Value: Far-red vs. White
  misc_feature: MA Experiment 20001450 PARAMETER Experiment Name: At_Far-red-induction_P Parameter: Organism Value: A. thaliana
  misc_feature: MA Experiment 20001450 PARAMETER Experiment Name: At_Far-red-induction_P Parameter: Plant Line Value: Columbia
  misc_feature: MA Experiment 20001450 PARAMETER Experiment Name: At_Far-red-induction_P Parameter: Timepoint (hr) Value: 8
  misc_feature: MA Experiment 20001450 PARAMETER Experiment Name: At_Far-red-induction_P Parameter: Tissue Value: Whole Plant
  misc_feature: MA Experiment ID: 20001560 Result: Up-regulated in Transcription
  misc_feature: MA Experiment 20001560 PARAMETER Experiment Name: At_Drought_Soil_Dry_P Parameter: Age (day) Value: 28
  misc_feature: MA Experiment 20001560 PARAMETER Experiment Name: At_Drought_Soil_Dry_P Parameter: Organism Value: A. thaliana
  misc_feature: MA Experiment 20001560 PARAMETER Experiment Name: At_Drought_Soil_Dry_P Parameter: Plant Line Value: WS
  misc_feature: MA Experiment 20001560 PARAMETER Experiment Name: At_Drought_Soil_Dry_P Parameter: Post Timepoint (hr) Value: None
  misc_feature: MA Experiment 20001560 PARAMETER Experiment Name: At_Drought_Soil_Dry_P Parameter: Post-Treatment Value: None
  misc_feature: MA Experiment 20001560 PARAMETER Experiment Name: At_Drought_Soil_Dry_P Parameter: Timepoint (day) Value: 14
  misc_feature: MA Experiment 20001560 PARAMETER Experiment Name: At_Drought_Soil_Dry_P Parameter: Treatment Value: Drought vs. No Drought
atccttttttttgttttccttctccggcgaatccccggggagattggtaatcggtaatcacggctatttacgggataaagccacggcctttgagctttcatgtccaacgaaagggttgtttaatcataactaatcctttgcctcacggaggacgtggagctctgccgtctgaaggcggcagtccctccgatctcctcttcctcgccggaggcggttccacaaatagccactaaccctaaccctttttctaattaggtttttagttcttagagtcctgtattaatctgttatttcgagattataatatttgtgagcaatgttgttgaagatcaaaagagttccaacagttgtatcgaattatcaaaaagatgagacagttgaagaaggtggatgtggtcggaattgtctgagcaagtgttgcatcaatggggcaagacttcctttatatacctgcaagaatcttgataaatccgtcggagagaacacagaatctccggtgacgttcctcgaatccttagttattggagagtgggaagatcgtttccaaagaggtctttttcgctatgatgtcaccgcctgcgaaaccaaggttataccggggaagtacggtttcattgcgcagctgaatgaaggtcggcatctcaagaagagaccaaccgagttccgtgttgacaaagttcttcaaccatttgatggaaacaaattcaatttcactaaagttggtcaagaagagttgcttttccagtttaaagctagcactaatgatgatgatagtgaaattcagttcttggcgagtatgcctctagacgctgataattctcctagcgtcgttgcaatcaatgtgagtccgattgagtatgggcatgtgttgctgattcctcgtgttcttgattgcttacctcaaaggattgatcacaaaagccttttgcttgctcttcaaatggcggctgaagccgataatccgtatttccgacttggatacaacagtctaggcgctttcgctaccattaaccatcttcactttcaggcttactatttggcaatgcaattcccgatagagaaagcttcttccttgaagatcactaccaccaataatggcgtcaaaatctctaaactcttgaattaccctgtgagaggtcttctagttgaaggtggaaacaccattaaagatctcgcagatactgtatcagacgcatccgtttgtcttcagaacaacaacattcctttcaacattctcatctctgactctggcaaacgaatcttccttctccctcagtgttacgcagagaaacaggctttaggagaagttagctcaacgctattggatacgcaagtgaatccagcggtttgggagatgagtggacacatggtgttgaagaggaaagaagactatgaaggagcgtcagaagagaaggcatggaggttactagctgaagtttctttatcagaggagagattcagagaagttaacactatgatatttgatgccatcggttttagtagtcacgaagaagaagaagaagaggagcttgaagagcagaattcgatgaatggtggcagcttcacaatagtgcattgtccttcagtgaaagaagaggctgtctctaattgaggcgctttataactaaaagcaaaaacataactgtcgtcgtgattttgcataacttgtgtttgacattttactgttttgtagtttttttcttttcttcttggctttgttacgtctttgttcgaaccttttgaatcaataaaatcgaaatcgcctaattc

SEQ ID NO: 49182 - protein, 431 aa, Arabidopsis thaliana
  peptide (1)..(431): Ceres Seq. ID no. 12601428
  misc_feature (60)..(400): Homolog of NCBI NO: 34527348 NR Description: unnamed protein product [Homo sapiens]
  misc_feature (60)..(388): Homolog of NCBI NO: 27677438 NR Description: similar to CG3552-PC [Drosophila melanogaster]
  misc_feature (91)..(399): Homolog of NCBI NO: 34907712 NR Description: P0035F12.16 [Oryza sativa (japonica
  misc_feature (2)..(55): Homolog of NCBI NO: 21070346 NR Description: VTC2 [Arabidopsis thaliana]
  misc_feature (41)..(413): Homolog of NCBI NO: 21070346 NR Description: VTC2 [Arabidopsis thaliana]
  misc_feature (2)..(55): Homolog of NCBI NO: 7452423 NR Description: hypothetical protein F10M23.190 - Arabidopsis
  misc_feature (41)..(413): Homolog of NCBI NO: 7452423 NR Description: hypothetical protein F10M23.190 - Arabidopsis
  misc_feature (2)..(413): Homolog of NCBI NO: 15810139 NR Description: unknown protein [Arabidopsis thaliana]
  misc_feature (2)..(413): Homolog of NCBI NO: 18416877 NR Description: putative protein
  misc_feature (1)..(431): Homolog of NCBI NO: 15240467 NR Description: putative protein
  misc_feature (60)..(400): Homolog of NCBI NO: 34527348 NR Description: unnamed protein product [Homo sapiens]
  misc_feature (60)..(388): Homolog of NCBI NO: 27677438 NR Description: similar to CG3552-PC [Drosophila melanogaster]
  misc_feature (91)..(399): Homolog of NCBI NO: 34907712 NR Description: P0035F12.16 [Oryza sativa (japonica
  misc_feature (2)..(55): Homolog of NCBI NO: 21070346 NR Description: VTC2 [Arabidopsis thaliana]
  misc_feature (41)..(413): Homolog of NCBI NO: 21070346 NR Description: VTC2 [Arabidopsis thaliana]
  misc_feature (2)..(55): Homolog of NCBI NO: 7452423 NR Description: hypothetical protein F10M23.190 - Arabidopsis
  misc_feature (41)..(413): Homolog of NCBI NO: 7452423 NR Description: hypothetical protein F10M23.190 - Arabidopsis
  misc_feature (2)..(413): Homolog of NCBI NO: 15810139 NR Description: unknown protein [Arabidopsis thaliana]
  misc_feature (2)..(413): Homolog of NCBI NO: 18416877 NR Description: putative protein
  misc_feature (1)..(431): Homolog of NCBI NO: 15240467 NR Description: putative protein
MLLKIKRVPTVVSNYQKDETVEEGGCGRNCLSKCCINGARLPLYTCKNLDKSVGENTESPVTFLESLVIGEWEDRFQRGLFRYDVTACETKVIPGKYGFIAQLNEGRHLKKRPTEFRVDKVLQPFDGNKFNFTKVGQEELLFQFKASTNDDDSEIQFLASMPLDADNSPSVVAINVSPIEYGHVLLIPRVLDCLPQRIDHKSLLLALQMAAEADNPYFRLGYNSLGAFATINHLHFQAYYLAMQFPIEKASSLKITTTNNGVKISKLLNYPVRGLLVEGGNTIKDLADTVSDASVCLQNNNIPFNILISDSGKRIFLLPQCYAEKQALGEVSSTLLDTQVNPAVWEMSGHMVLKRKEDYEGASEEKAWRLLAEVSLSEERFREVNTMIFDAIGFSSHEEEEEEELEEQNSMNGGSFTIVHCPSVKEEAVSN

SEQ ID NO: 49183 - protein, 271 aa, Arabidopsis thaliana
  peptide (1)..(271): Ceres Seq. ID no. 12601429
  misc_feature (1)..(228): Homolog of NCBI NO: 26351153 NR Description: unnamed protein product [Mus musculus]
  misc_feature (1)..(228): Homolog of NCBI NO: 22766878 NR Description: Unknown (protein for MGC:47349) [Mus musculus]
  misc_feature (1)..(240): Homolog of NCBI NO: 34527348 NR Description: unnamed protein product [Homo sapiens]
  misc_feature (1)..(228): Homolog of NCBI NO: 27677438 NR Description: similar to CG3552-PC [Drosophila melanogaster]
  misc_feature (1)..(239): Homolog of NCBI NO: 34907712 NR Description: P0035F12.16 [Oryza sativa (japonica
  misc_feature (1)..(253): Homolog of NCBI NO: 21070346 NR Description: VTC2 [Arabidopsis thaliana]
  misc_feature (1)..(253): Homolog of NCBI NO: 7452423 NR Description: hypothetical protein F10M23.190 - Arabidopsis
  misc_feature (1)..(253): Homolog of NCBI NO: 15810139 NR Description: unknown protein [Arabidopsis thaliana]
  misc_feature (1)..(253): Homolog of NCBI NO: 18416877 NR Description: putative protein
  misc_feature (1)..(271): Homolog of NCBI NO: 15240467 NR Description: putative protein
  misc_feature (1)..(228): Homolog of NCBI NO: 26351153 NR Description: unnamed protein product [Mus musculus]
  misc_feature (1)..(228): Homolog of NCBI NO: 22766878 NR Description: Unknown (protein for MGC:47349) [Mus musculus]
  misc_feature (1)..(240): Homolog of NCBI NO: 34527348 NR Description: unnamed protein product [Homo sapiens]
  misc_feature (1)..(228): Homolog of NCBI NO: 27677438 NR Description: similar to CG3552-PC [Drosophila melanogaster]
  misc_feature (1)..(239): Homolog of NCBI NO: 34907712 NR Description: P0035F12.16 [Oryza sativa (japonica
  misc_feature (1)..(253): Homolog of NCBI NO: 21070346 NR Description: VTC2 [Arabidopsis thaliana]
  misc_feature (1)..(253): Homolog of NCBI NO: 7452423 NR Description: hypothetical protein F10M23.190 - Arabidopsis
  misc_feature (1)..(253): Homolog of NCBI NO: 15810139 NR Description: unknown protein [Arabidopsis thaliana]
  misc_feature (1)..(253): Homolog of NCBI NO: 18416877 NR Description: putative protein
  misc_feature (1)..(271): Homolog of NCBI NO: 15240467 NR Description: putative protein
MPLDADNSPSVVAINVSPIEYGHVLLIPRVLDCLPQRIDHKSLLLALQMAAEADNPYFRLGYNSLGAFATINHLHFQAYYLAMQFPIEKASSLKITTTNNGVKISKLLNYPVRGLLVEGGNTIKDLADTVSDASVCLQNNNIPFNILISDSGKRIFLLPQCYAEKQALGEVSSTLLDTQVNPAVWEMSGHMVLKRKEDYEGASEEKAWRLLAEVSLSEERFREVNTMIFDAIGFSSHEEEEEEELEEQNSMNGGSFTIVHCPSVKEEAVSN

SEQ ID NO: 49184 - protein, 223 aa, Arabidopsis thaliana
  peptide (1)..(223): Ceres Seq. ID no. 12601430
  misc_feature (1)..(180): Homolog of NCBI NO: 26351153 NR Description: unnamed protein product [Mus musculus]
  misc_feature (1)..(180): Homolog of NCBI NO: 22766878 NR Description: Unknown (protein for MGC:47349) [Mus musculus]
  misc_feature (1)..(192): Homolog of NCBI NO: 34527348 NR Description: unnamed protein product [Homo sapiens]
  misc_feature (1)..(180): Homolog of NCBI NO: 27677438 NR Description: similar to CG3552-PC [Drosophila melanogaster]
  misc_feature (1)..(191): Homolog of NCBI NO: 34907712 NR Description: P0035F12.16 [Oryza sativa (japonica
  misc_feature (1)..(205): Homolog of NCBI NO: 21070346 NR Description: VTC2 [Arabidopsis thaliana]
  misc_feature (1)..(205): Homolog of NCBI NO: 7452423 NR Description: hypothetical protein F10M23.190 - Arabidopsis
  misc_feature (1)..(205): Homolog of NCBI NO: 15810139 NR Description: unknown protein [Arabidopsis thaliana]
  misc_feature (1)..(205): Homolog of NCBI NO: 18416877 NR Description: putative protein
  misc_feature (1)..(223): Homolog of NCBI NO: 15240467 NR Description: putative protein
  misc_feature (1)..(180): Homolog of NCBI NO: 26351153 NR Description: unnamed protein product [Mus musculus]
  misc_feature (1)..(180): Homolog of NCBI NO: 22766878 NR Description: Unknown (protein for MGC:47349) [Mus musculus]
  misc_feature (1)..(192): Homolog of NCBI NO: 34527348 NR Description: unnamed protein product [Homo sapiens]
  misc_feature (1)..(180): Homolog of NCBI NO: 27677438 NR Description: similar to CG3552-PC [Drosophila melanogaster]
  misc_feature (1)..(191): Homolog of NCBI NO: 34907712 NR Description: P0035F12.16 [Oryza sativa (japonica
  misc_feature (1)..(205): Homolog of NCBI NO: 21070346 NR Description: VTC2 [Arabidopsis thaliana]
  misc_feature (1)..(205): Homolog of NCBI NO: 7452423 NR Description: hypothetical protein F10M23.190 - Arabidopsis
  misc_feature (1)..(205): Homolog of NCBI NO: 15810139 NR Description: unknown protein [Arabidopsis thaliana]
  misc_feature (1)..(205): Homolog of NCBI NO: 18416877 NR Description: putative protein
  misc_feature (1)..(223): Homolog of NCBI NO: 15240467 NR Description: putative protein
MAAEADNPYFRLGYNSLGAFATINHLHFQAYYLAMQFPIEKASSLKITTTNNGVKISKLLNYPVRGLLVEGGNTIKDLADTVSDASVCLQNNNIPFNILISDSGKRIFLLPQCYAEKQALGEVSSTLLDTQVNPAVWEMSGHMVLKRKEDYEGASEEKAWRLLAEVSLSEERFREVNTMIFDAIGFSSHEEEEEEELEEQNSMNGGSFTIVHCPSVKEEAVSN

SEQ ID NO: 49185 - DNA, 1586 bp, Arabidopsis thaliana
  misc_feature (1)..(1586): Ceres Seq. ID no. 12578202
  misc_feature: MA Experiment ID: 20000307 Result: Up-regulated in Transcription
  misc_feature: MA Experiment 20000307 PARAMETER Experiment Name: At_Germinating_Seeds_Sub_P Parameter: Age (hr) Value: 24 vs. 0
  misc_feature: MA Experiment 20000307 PARAMETER Experiment Name: At_Germinating_Seeds_Sub_P Parameter: Organism Value: A. thaliana
  misc_feature: MA Experiment 20000307 PARAMETER Experiment Name: At_Germinating_Seeds_Sub_P Parameter: Plant Line Value: WS
  misc_feature: MA Experiment 20000307 PARAMETER Experiment Name: At_Germinating_Seeds_Sub_P Parameter: Tissue Value: Germinating Seeds
  misc_feature: MA Experiment ID: 20000327 Result: Down-regulated in Transcription
  misc_feature: MA Experiment 20000327 PARAMETER Experiment Name: At_42deg_Heat_Sub_P Parameter: Age (day) Value: 14
  misc_feature: MA Experiment 20000327 PARAMETER Experiment Name: At_42deg_Heat_Sub_P Parameter: Organism Value: A. thaliana
  misc_feature: MA Experiment 20000327 PARAMETER Experiment Name: At_42deg_Heat_Sub_P Parameter: Plant Line Value: WS
  misc_feature: MA Experiment 20000327 PARAMETER Experiment Name: At_42deg_Heat_Sub_P Parameter: Temperature (deg C) Value: 42 vs. 22
  misc_feature: MA Experiment 20000327 PARAMETER Experiment Name: At_42deg_Heat_Sub_P Parameter: Timepoint (hr) Value: 1
  misc_feature: MA Experiment 20000327 PARAMETER Experiment Name: At_42deg_Heat_Sub_P Parameter: Tissue Value: Aerial
  misc_feature: MA Experiment ID: 20000328 Result: Down-regulated in Transcription
  misc_feature: MA Experiment 20000328 PARAMETER Experiment Name: At_42deg_Heat_Sub_P Parameter: Age (day) Value: 14
  misc_feature: MA Experiment 20000328 PARAMETER Experiment Name: At_42deg_Heat_Sub_P Parameter: Organism Value: A. thaliana
  misc_feature: MA Experiment 20000328 PARAMETER Experiment Name: At_42deg_Heat_Sub_P Parameter: Plant Line Value: WS
  misc_feature: MA Experiment 20000328 PARAMETER Experiment Name: At_42deg_Heat_Sub_P Parameter: Temperature (deg C) Value: 42 vs. 22
  misc_feature: MA Experiment 20000328 PARAMETER Experiment Name: At_42deg_Heat_Sub_P Parameter: Timepoint (hr) Value: 6
  misc_feature: MA Experiment 20000328 PARAMETER Experiment Name: At_42deg_Heat_Sub_P Parameter: Tissue Value: Aerial
  misc_feature: MA Experiment ID: 20000347 Result: Down-regulated in Transcription
  misc_feature: MA Experiment 20000347 PARAMETER Experiment Name: At_2mM_SA_Sub_P Parameter: Age (day) Value: 14
  misc_feature: MA Experiment 20000347 PARAMETER Experiment Name: At_2mM_SA_Sub_P Parameter: Organism Value: A. thaliana
  misc_feature: MA Experiment 20000347 PARAMETER Experiment Name: At_2mM_SA_Sub_P Parameter: Plant Line Value: WS
  misc_feature: MA Experiment 20000347 PARAMETER Experiment Name: At_2mM_SA_Sub_P Parameter: Timepoint (hr) Value: 6
  misc_feature: MA Experiment 20000347 PARAMETER Experiment Name: At_2mM_SA_Sub_P Parameter: Tissue Value: Aerial
  misc_feature: MA Experiment 20000347 PARAMETER Experiment Name: At_2mM_SA_Sub_P Parameter: Treatment Value: 2mM SA vs. No Treatment
gttgtatcattacatgcatgcataaaatgatggtggtggagaaagaaagaagcatagaagaaaggcttttgcagctcaagaaccaaaacgacgattcagaatgtcgtattactgcttgtgttatccttagtactttcatcgctgtgtgtggttctttctcctttggtgtctctcttggttatacttcaggtgcagagataggaattatgaaggacttggatctttctatcgcgcaattttcagcatttgcttcattatccactttgggagctgcaattggagctttgtttagcggtaaaatggcgatcatccttggcagaagaaaaacaatgtgggtgtccgatctcctctgtatcattggttggttctccatcgctttcgctaaggatgtgatgtggttgaacttcggaagaatctcctcagggataggactcggcttaattagctatgtggtacctgtctatatagcagaaatttcaccaaaacatgttcgtggtacatttacctttacaaatcagctccttcaaaactctggactcgcaatggtttatttttctgggaattttctcaactggaggatattggctttattaggtgctttaccatgcttcattcaagtaatcggtttattcttcgtaccagagtccccaagatggctggcaaaagttggctccgataaagaactagaaaattcacttcttcgtcttagggggggaaatgctgatatttcacgtgaagcctcagacattgaagttatgaccaaaatggtagaaaatgattcaaagtcgagtttttgtgatttgttccagagaaaatatagatacactctcgtggtaggaatcgggctaatgttgatacaacaattttcaggaagttctgcagtgctctcatatgccagtaccattttacggaaagcaggtttttcggtgaccattggatcgacgctactaggtctcttcatgataccaaaagccatgattggtgtcattcttgtcgataaatggggcagacggcctctcttgttgacttctgtatctgggatgtgcataacttccatgcttattggagtcgccttcacattacagaaaatgcaattgctaccggagctaacaccagtattcacgtttatatgcgttacgctgtatattggaacttatgctataggcttgggaggccttccttgggtaattatgtctgagatatttccaatgaatataaaagtaactgcaggaagtatagtaacgttagtatcatggtcaagtagttcgatcgtcacttatgctttcaactttctgctcgagtggagcactcaaggaacattttacgtatttggagcagtcggaggactagcattgctttttatttggttgctcgttccggaaacgaaaggattatcacttgaagaaatacaagcttcgcttattcgtgagcccgatagaataaatcaaagttagattgaaacgtttaagttttattttaatagataaataattaaaatcaatttatgatactgtgctaagaaagtaattttttttttcattatgtaatcactatttaatttttctaatacttagaattttttatgt

SEQ ID NO: 49186 - protein, 483 aa, Arabidopsis thaliana
  peptide (1)..(483): Ceres Seq. ID no. 12578203
  misc_feature (42)..(420): Pfam Name: Sugar (and other) transporter Pfam Description: Sugar (and other) transporter
  misc_feature (26)..(473): Homolog of NCBI NO: 18390959 NR Description: zinc finger protein ATZF1, putative
  misc_feature (9)..(473): Homolog of NCBI NO: 6686827 NR Description: putative sugar transporter [Arabidopsis thaliana]
  misc_feature (9)..(473): Homolog of NCBI NO: 18390957 NR Description: putative sugar transport protein, ERD6
  misc_feature (10)..(420): Homolog of NCBI NO: 6729026 NR Description: putative sugar transporter [Arabidopsis thaliana]
  misc_feature (10)..(443): Homolog of NCBI NO: 20260272 NR Description: putative sugar transporter [Arabidopsis thaliana]
  misc_feature (18)..(473): Homolog of NCBI NO: 18397139 NR Description: putative sugar transporter
  misc_feature (10)..(473): Homolog of NCBI NO: 18397141 NR Description: Expressed protein; protein id: At3g05165.1
  misc_feature (10)..(483): Homolog of NCBI NO: 18421106 NR Description: sugar transporter-like protein
  misc_feature (10)..(483): Homolog of NCBI NO: 14585699 NR Description: sugar-porter family protein 1 [Arabidopsis
  misc_feature (6)..(483): Homolog of NCBI NO: 18421108 NR Description: sugar transporter-like protein
CIITCMHKMMVVEKERSIEERLLQLKNQNDDSECRITACVILSTFIAVCGSFSFGVSLGYTSGAEIGIMKDLDLSIAQFSAFASLSTLGAAIGALFSGKMAIILGRRKTMWVSDLLCIIGWFSIAFAKDVMWLNFGRISSGIGLGLISYVVPVYIAEISPKHVRGTFTFTNQLLQNSGLAMVYFSGNFLNWRILALLGALPCFIQVIGLFFVPESPRWLAKVGSDKELENSLLRLRGGNADISREASDIEVMTKMVENDSKSSFCDLFQRKYRYTLVVGIGLMLIQQFSGSSAVLSYASTILRKAGFSVTIGSTLLGLFMIPKAMIGVILVDKWGRRPLLLTSVSGMCITSMLIGVAFTLQKMQLLPELTPVFTFICVTLYIGTYAIGLGGLPWVIMSEIFPMNIKVTAGSIVTLVSWSSSSIVTYAFNFLLEWSTQGTFYVFGAVGGLALLFIWLLVPETKGLSLEEIQASLIREPDRINQS

SEQ ID NO: 49187 - protein, 478 aa, Arabidopsis thaliana
  peptide (1)..(478): Ceres Seq. ID no. 12578204
  misc_feature (37)..(415): Pfam Name: Sugar (and other) transporter Pfam Description: Sugar (and other) transporter
  misc_feature (21)..(468): Homolog of NCBI NO: 18390959 NR Description: zinc finger protein ATZF1, putative
  misc_feature (4)..(468): Homolog of NCBI NO: 6686827 NR Description: putative sugar transporter [Arabidopsis thaliana]
  misc_feature (4)..(468): Homolog of NCBI NO: 18390957 NR Description: putative sugar transport protein, ERD6
  misc_feature (5)..(415): Homolog of NCBI NO: 6729026 NR Description: putative sugar transporter [Arabidopsis thaliana]
  misc_feature (5)..(438): Homolog of NCBI NO: 20260272 NR Description: putative sugar transporter [Arabidopsis thaliana]
  misc_feature (13)..(468): Homolog of NCBI NO: 18397139 NR Description: putative sugar transporter
  misc_feature (5)..(468): Homolog of NCBI NO: 18397141 NR Description: Expressed protein; protein id: At3g05165.1
  misc_feature (5)..(478): Homolog of NCBI NO: 18421106 NR Description: sugar transporter-like protein
  misc_feature (5)..(478): Homolog of NCBI NO: 14585699 NR Description: sugar-porter family protein 1 [Arabidopsis
  misc_feature (1)..(478): Homolog of NCBI NO: 18421108 NR Description: sugar transporter-like protein
MHKMMVVEKERSIEERLLQLKNQNDDSECRITACVILSTFIAVCGSFSFGVSLGYTSGAEIGIMKDLDLSIAQFSAFASLSTLGAAIGALFSGKMAIILGRRKTMWVSDLLCIIGWFSIAFAKDVMWLNFGRISSGIGLGLISYVVPVYIAEISPKHVRGTFTFTNQLLQNSGLAMVYFSGNFLNWRILALLGALPCFIQVIGLFFVPESPRWLAKVGSDKELENSLLRLRGGNADISREASDIEVMTKMVENDSKSSFCDLFQRKYRYTLVVGIGLMLIQQFSGSSAVLSYASTILRKAGFSVTIGSTLLGLFMIPKAMIGVILVDKWGRRPLLLTSVSGMCITSMLIGVAFTLQKMQLLPELTPVFTFICVTLYIGTYAIGLGGLPWVIMSEIFPMNIKVTAGSIVTLVSWSSSSIVTYAFNFLLEWSTQGTFYVFGAVGGLALLFIWLLVPETKGLSLEEIQASLIREPDRINQS

SEQ ID NO: 49188 - protein, 475 aa, Arabidopsis thaliana
  peptide (1)..(475): Ceres Seq. ID no. 12578205
  misc_feature (34)..(412): Pfam Name: Sugar (and other) transporter Pfam Description: Sugar (and other) transporter
  misc_feature (18)..(465): Homolog of NCBI NO: 18390959 NR Description: zinc finger protein ATZF1, putative
  misc_feature (1)..(465): Homolog of NCBI NO: 6686827 NR Description: putative sugar transporter [Arabidopsis thaliana]
  misc_feature (1)..(465): Homolog of NCBI NO: 18390957 NR Description: putative sugar transport protein, ERD6
  misc_feature (2)..(412): Homolog of NCBI NO: 6729026 NR Description: putative sugar transporter [Arabidopsis thaliana]
  misc_feature (2)..(435): Homolog of NCBI NO: 20260272 NR Description: putative sugar transporter [Arabidopsis thaliana]
  misc_feature (10)..(465): Homolog of NCBI NO: 18397139 NR Description: putative sugar transporter
  misc_feature (2)..(465): Homolog of NCBI NO: 18397141 NR Description: Expressed protein; protein id: At3g05165.1
  misc_feature (2)..(475): Homolog of NCBI NO: 18421106 NR Description: sugar transporter-like protein
  misc_feature (2)..(475): Homolog of NCBI NO: 14585699 NR Description: sugar-porter family protein 1 [Arabidopsis
  misc_feature (1)..(475): Homolog of NCBI NO: 18421108 NR Description: sugar transporter-like protein
MMVVEKERSIEERLLQLKNQNDDSECRITACVILSTFIAVCGSFSFGVSLGYTSGAEIGIMKDLDLSIAQFSAFASLSTLGAAIGALFSGKMAIILGRRKTMWVSDLLCIIGWFSIAFAKDVMWLNFGRISSGIGLGLISYVVPVYIAEISPKHVRGTFTFTNQLLQNSGLAMVYFSGNFLNWRILALLGALPCFIQVIGLFFVPESPRWLAKVGSDKELENSLLRLRGGNADISREASDIEVMTKMVENDSKSSFCDLFQRKYRYTLVVGIGLMLIQQFSGSSAVLSYASTILRKAGFSVTIGSTLLGLFMIPKAMIGVILVDKWGRRPLLLTSVSGMCITSMLIGVAFTLQKMQLLPELTPVFTFICVTLYIGTYAIGLGGLPWVIMSEIFPMNIKVTAGSIVTLVSWSSSSIVTYAFNFLLEWSTQGTFYVFGAVGGLALLFIWLLVPETKGLSLEEIQASLIREPDRINQS

SEQ ID NO: 49189 - DNA, 1202 bp, Arabidopsis thaliana
  misc_feature (1)..(1202): Ceres Seq. ID no. 12578046
  misc_feature: MA Experiment ID: 20000315 Result: Down-regulated in Transcription
  misc_feature: MA Experiment 20000315 PARAMETER Experiment Name: At_14day_Shoots-Roots_Sub_P Parameter: Age (day) Value: 14
  misc_feature: MA Experiment 20000315 PARAMETER Experiment Name: At_14day_Shoots-Roots_Sub_P Parameter: Organism Value: A. thaliana
  misc_feature: MA Experiment 20000315 PARAMETER Experiment Name: At_14day_Shoots-Roots_Sub_P Parameter: Plant Line Value: WS
  misc_feature: MA Experiment 20000315 PARAMETER Experiment Name: At_14day_Shoots-Roots_Sub_P Parameter: Tissue Value: Shoots vs. Whole Plant
acgacttaccttgcgggaatcacgcgaccaattgattcttcttctcacaagcagttggcgttaactcttgtttatctaccagttgaaagatgttttacgatggatacgcttatcatggaactacctttgagcagacttaccggtgttatccctcatcctttattgataagcctcaaattgaaagtggtgacaagattataatgccaccatcagcccttgatcgtctagcttctttgcagattgattatccaatgctctttgaacttcgtaatgcttcaacagatagtttttctcactgcggagtccttgagttcatcgcagaagaaggcgtgatttacattccctactggatgatgcagaatttgctgttgcaagaaggagacatggtgagagttagaaatgtcactcttccaaagggaacctacgtgaaactgcaaccccacacaacagactttctcgatatagctaacccgaaagccatcttggagaccgcattgaggaactattcatgtctaacggtcggagatagcattatggtcccatacaacaataagaaatacttcatagacatagtggaggcaaagccttctaatggtattagcatcattgaaactgattgcgaggttgatttcgcacctccccttgattacaaggaacccgaacgacctgtagcacctgctccagccaaagctaaggaggttgatgtggctgaagcagaaccaaagtttaaccctttcacgggttcgggaagacgtttggatggacgacctttatcctatgaaccgcaacctggtgctgctaacagtaacggccaatcacatcctgttgcaagtagtagtagtagtgggtcagagaaggctacgcaacaaaatcgagggaaacttgtgttcggttcaaatgtagagcggtctactaaagagacaacaaaggttggagctgggaaagatagaaagcaagaggaagaggctgagaaggaagccaagttccaagcttttagtggtaaaaaatattcattgaggggttgaaccaaccaatgtgtggaaccaatctctcgtcttatttatgattttactcttgtgcttatgtattatctatggaattaaacgtttaaaggaagaaaaaaaacacaaataaattcaagaaaaaaagaagaagatgatgtatgtgattcatcatcattaattttagagtgggatttattt

SEQ ID NO: 49190 - protein, 311 aa, Arabidopsis thaliana
  peptide (1)..(311): Ceres Seq. ID no. 12578047
  misc_feature (10)..(184): Pfam Name: Ubiquitin fusion degradation protein UFD1 Pfam Description: Ubiquitin fusion degradation protein UFD1
  misc_feature (13)..(234): Homolog of NCBI NO: 20891983 NR Description: ubiquitin fusion degradation 1 like [Mus
  misc_feature (13)..(234): Homolog of NCBI NO: 16758158 NR Description: ubiquitin fusion degradation 1-like [Rattus
  misc_feature (38)..(311): Homolog of NCBI NO: 30684115 NR Description: ubiquitin fusion degradation (UFD) protein,
  misc_feature (32)..(311): Homolog of NCBI NO: 7488408 NR Description: probable ubiquitin fusion-degradation protein
  misc_feature (1)..(310): Homolog of NCBI NO: 38345534 NR Description: OSJNBa0020J04.9 [Oryza sativa (japonica
  misc_feature (2)..(311): Homolog of NCBI NO: 25347017 NR Description: probable ubiquitin fusion-degradation protein
  misc_feature (1)..(311): Homolog of NCBI NO: 21592947 NR Description: putative ubiquitin fusion-degradation protein
  misc_feature (1)..(311): Homolog of NCBI NO: 18399646 NR Description: putative ubiquitin fusion-degradation protein
  misc_feature (1)..(311): Homolog of NCBI NO: 7488221 NR Description: probable ubiquitin-dependent proteolytic protein
  misc_feature (1)..(311): Homolog of NCBI NO: 18420341 NR Description: putative ubiquitin-dependent proteolytic protein
MFYDGYAYHGTTFEQTYRCYPSSFIDKPQIESGDKIIMPPSALDRLASLQIDYPMLFELRNASTDSFSHCGVLEFIAEEGVIYIPYWMMQNLLLQEGDMVRVRNVTLPKGTYVKLQPHTTDFLDIANPKAILETALRNYSCLTVGDSIMVPYNNKKYFIDIVEAKPSNGISIIETDCEVDFAPPLDYKEPERPVAPAPAKAKEVDVAEAEPKFNPFTGSGRRLDGRPLSYEPQPGAANSNGQSHPVASSSSSGSEKATQQNRGKLVFGSNVERSTKETTKVGAGKDRKQEEEAEKEAKFQAFSGKKYSLRG

SEQ ID NO: 49191 - protein, 274 aa, Arabidopsis thaliana
  peptide (1)..(274): Ceres Seq. ID no. 12578048
  misc_feature (1)..(147): Pfam Name: Ubiquitin fusion degradation protein UFD1 Pfam Description: Ubiquitin fusion degradation protein UFD1
  misc_feature (1)..(197): Homolog of NCBI NO: 20891983 NR Description: ubiquitin fusion degradation 1 like [Mus
  misc_feature (1)..(197): Homolog of NCBI NO: 16758158 NR Description: ubiquitin fusion degradation 1-like [Rattus
  misc_feature (1)..(274): Homolog of NCBI NO: 30684115 NR Description: ubiquitin fusion degradation (UFD) protein,
  misc_feature (1)..(274): Homolog of NCBI NO: 7488408 NR Description: probable ubiquitin fusion-degradation protein
  misc_feature (1)..(273): Homolog of NCBI NO: 38345534 NR Description: OSJNBa0020J04.9 [Oryza sativa (japonica
  misc_feature (1)..(274): Homolog of NCBI NO: 25347017 NR Description: probable ubiquitin fusion-degradation protein
  misc_feature (1)..(274): Homolog of NCBI NO: 21592947 NR Description: putative ubiquitin fusion-degradation protein
  misc_feature (1)..(274): Homolog of NCBI NO: 18399646 NR Description: putative ubiquitin fusion-degradation protein
  misc_feature (1)..(274): Homolog of NCBI NO: 7488221 NR Description: probable ubiquitin-dependent proteolytic protein
  misc_feature (1)..(274): Homolog of NCBI NO: 18420341 NR Description: putative ubiquitin-dependent proteolytic protein
MPPSALDRLASLQIDYPMLFELRNASTDSFSHCGVLEFIAEEGVIYIPYWMMQNLLLQEGDMVRVRNVTLPKGTYVKLQPHTTDFLDIANPKAILETALRNYSCLTVGDSIMVPYNNKKYFIDIVEAKPSNGISIIETDCEVDFAPPLDYKEPERPVAPAPAKAKEVDVAEAEPKFNPFTGSGRRLDGRPLSYEPQPGAANSNGQSHPVASSSSSGSEKATQQNRGKLVFGSNVERSTKETTKVGAGKDRKQEEEAEKEAKFQAFSGKKYSLRG

SEQ ID NO: 49192 - protein, 257 aa, Arabidopsis thaliana
  peptide (1)..(257): Ceres Seq. ID no. 12578049
  misc_feature (1)..(130): Pfam Name: Ubiquitin fusion degradation protein UFD1 Pfam Description: Ubiquitin fusion degradation protein UFD1
  misc_feature (1)..(180): Homolog of NCBI NO: 20891983 NR Description: ubiquitin fusion degradation 1 like [Mus
  misc_feature (1)..(180): Homolog of NCBI NO: 16758158 NR Description: ubiquitin fusion degradation 1-like [Rattus
  misc_feature (1)..(257): Homolog of NCBI NO: 30684115 NR Description: ubiquitin fusion degradation (UFD) protein,
  misc_feature (1)..(257): Homolog of NCBI NO: 7488408 NR Description: probable ubiquitin fusion-degradation protein
  misc_feature (1)..(256): Homolog of NCBI NO: 38345534 NR Description: OSJNBa0020J04.9 [Oryza sativa (japonica
  misc_feature (1)..(257): Homolog of NCBI NO: 25347017 NR Description: probable ubiquitin fusion-degradation protein
  misc_feature (1)..(257): Homolog of NCBI NO: 21592947 NR Description: putative ubiquitin fusion-degradation protein
  misc_feature (1)..(257): Homolog of NCBI NO: 18399646 NR Description: putative ubiquitin fusion-degradation protein
  misc_feature (1)..(257): Homolog of NCBI NO: 7488221 NR Description: probable ubiquitin-dependent proteolytic protein
  misc_feature (1)..(257): Homolog of NCBI NO: 18420341 NR Description: putative ubiquitin-dependent proteolytic protein
MLFELRNASTDSFSHCGVLEFIAEEGVIYIPYWMMQNLLLQEGDMVRVRNVTLPKGTYVKLQPHTTDFLDIANPKAILETALRNYSCLTVGDSIMVPYNNKKYFIDIVEAKPSNGISIIETDCEVDFAPPLDYKEPERPVAPAPAKAKEVDVAEAEPKFNPFTGSGRRLDGRPLSYEPQPGAANSNGQSHPVASSSSSGSEKATQQNRGKLVFGSNVERSTKETTKVGAGKDRKQEEEAEKEAKFQAFSGKKYSLRG

SEQ ID NO: 49193 - DNA, 1657 bp, Arabidopsis thaliana
  misc_feature (1)..(1657): Ceres Seq. ID no. 12578206
  misc_feature: MA Experiment ID: 108462 Result: Up-regulated in Transcription
  misc_feature: MA Experiment 108462 PARAMETER Experiment Name: At_Germinating_Seeds_cDNA_P Parameter: Age (day) Value: 2 vs. 0
  misc_feature: MA Experiment 108462 PARAMETER Experiment Name: At_Germinating_Seeds_cDNA_P Parameter: Tissue Value: Germinating Seeds
  misc_feature: MA Experiment ID: 108463 Result: Up-regulated in Transcription
  misc_feature: MA Experiment 108463 PARAMETER Experiment Name: At_Germinating_Seeds_cDNA_P Parameter: Age (day) Value: 3 vs. 0
  misc_feature: MA Experiment 108463 PARAMETER Experiment Name: At_Germinating_Seeds_cDNA_P Parameter: Tissue Value: Germinating Seeds
  misc_feature: MA Experiment ID: 20000072 Result: Up-regulated in Transcription
  misc_feature: MA Experiment 20000072 PARAMETER Experiment Name: At_100uM_ABA_Mutants_cDNA_P Parameter: Plant Line Value: CS8105
  misc_feature: MA Experiment 20000072 PARAMETER Experiment Name: At_100uM_ABA_Mutants_cDNA_P Parameter: Timepoint (hr) Value: 6
  misc_feature: MA Experiment 20000072 PARAMETER Experiment Name: At_100uM_ABA_Mutants_cDNA_P Parameter: Tissue Value: Aerial
  misc_feature: MA Experiment 20000072 PARAMETER Experiment Name: At_100uM_ABA_Mutants_cDNA_P Parameter: Treatment Value: 100uM ABA vs. No Treatment
  misc_feature: MA Experiment ID: 20000086 Result: Up-regulated in Transcription
  misc_feature: MA Experiment 20000086 PARAMETER Experiment Name: At_100uM_ABA_Mutants_cDNA_P Parameter: Plant Line Value: CS22
  misc_feature: MA Experiment 20000086 PARAMETER Experiment Name: At_100uM_ABA_Mutants_cDNA_P Parameter: Timepoint (hr) Value: 6
  misc_feature: MA Experiment 20000086 PARAMETER Experiment Name: At_100uM_ABA_Mutants_cDNA_P Parameter: Tissue Value: Aerial
  misc_feature: MA Experiment 20000086 PARAMETER Experiment Name: At_100uM_ABA_Mutants_cDNA_P Parameter: Treatment Value: 100uM ABA vs. No Treatment
  misc_feature: MA Experiment ID: 20000314 Result: Up-regulated in Transcription
  misc_feature: MA Experiment 20000314 PARAMETER Experiment Name: At_14day_Shoots-Roots_Sub_P Parameter: Age (day) Value: 14
  misc_feature: MA Experiment 20000314 PARAMETER Experiment Name: At_14day_Shoots-Roots_Sub_P Parameter: Organism Value: A. thaliana
  misc_feature: MA Experiment 20000314 PARAMETER Experiment Name: At_14day_Shoots-Roots_Sub_P Parameter: Plant Line Value: WS
  misc_feature: MA Experiment 20000314 PARAMETER Experiment Name: At_14day_Shoots-Roots_Sub_P Parameter: Tissue Value: Roots vs. Whole Plant
  misc_feature: MA Experiment ID: 20000328 Result: Down-regulated in Transcription
  misc_feature: MA Experiment 20000328 PARAMETER Experiment Name: At_42deg_Heat_Sub_P Parameter: Age (day) Value: 14
  misc_feature: MA Experiment 20000328 PARAMETER Experiment Name: At_42deg_Heat_Sub_P Parameter: Organism Value: A. thaliana
  misc_feature: MA Experiment 20000328 PARAMETER Experiment Name: At_42deg_Heat_Sub_P Parameter: Plant Line Value: WS
  misc_feature: MA Experiment 20000328 PARAMETER Experiment Name: At_42deg_Heat_Sub_P Parameter: Temperature (deg C) Value: 42 vs. 22
  misc_feature: MA Experiment 20000328 PARAMETER Experiment Name: At_42deg_Heat_Sub_P Parameter: Timepoint (hr) Value: 6
  misc_feature: MA Experiment 20000328 PARAMETER Experiment Name: At_42deg_Heat_Sub_P Parameter: Tissue Value: Aerial
  misc_feature: MA Experiment ID: 20000352 Result: Up-regulated in Transcription
  misc_feature: MA Experiment 20000352 PARAMETER Experiment Name: At_Drought_Sub_P Parameter: Age (day) Value: 7
  misc_feature: MA Experiment 20000352 PARAMETER Experiment Name: At_Drought_Sub_P Parameter: Organism Value: A. thaliana
  misc_feature: MA Experiment 20000352 PARAMETER Experiment Name: At_Drought_Sub_P Parameter: Plant Line Value: WS
  misc_feature: MA Experiment 20000352 PARAMETER Experiment Name: At_Drought_Sub_P Parameter: Timepoint (hr) Value: 6
  misc_feature: MA Experiment 20000352 PARAMETER Experiment Name: At_Drought_Sub_P Parameter: Tissue Value: Whole Plant
  misc_feature: MA Experiment 20000352 PARAMETER Experiment Name: At_Drought_Sub_P Parameter: Treatment Value: Drought vs. No Drought
  misc_feature: MA Experiment ID: 20000440 Result: Down-regulated in Transcription
  misc_feature: MA Experiment 20000440 PARAMETER Experiment Name: At_Closed-Flower__Sub_P Parameter: Tissue Value: Closed Flower vs. Whole Plant
  misc_feature: MA Experiment ID: 20000634 Result: Down-regulated in Transcription
  misc_feature: MA Experiment 20000634 PARAMETER Experiment Name: At_10percent_PEG_Sub_P Parameter: Age (day) Value: 12
  misc_feature: MA Experiment 20000634 PARAMETER Experiment Name: At_10percent_PEG_Sub_P Parameter: Organism Value: A. thaliana
  misc_feature: MA Experiment 20000634 PARAMETER Experiment Name: At_10percent_PEG_Sub_P Parameter: Plant Line Value: WS
  misc_feature: MA Experiment 20000634 PARAMETER Experiment Name: At_10percent_PEG_Sub_P Parameter: Timepoint (day) Value: 12
  misc_feature: MA Experiment 20000634 PARAMETER Experiment Name: At_10percent_PEG_Sub_P Parameter: Tissue Value: Whole Plant
  misc_feature: MA Experiment 20000634 PARAMETER Experiment Name: At_10percent_PEG_Sub_P Parameter: Treatment Value: 10% PEG vs. No Treatment
atactaacattcatcccaaaagttccattctttttcacaaagccattgtgctgttttctccatttggatcaaaatggttgctgagaacaataaaaacaaggacgtaacactctctgcatcaatggacaacaacaacaacaacatcaaaggaactaacattcatcttgaggttcatcaaaaggaaccagctttggtcaaacctgaatccgagacacgaaagggcctttacttcttgtcgaatcttgaccagaacatcgccgtgattgttcgtacaatctactgtttcaaatccgaggagagagggaacgaggaagcagtccaagtgatcaagaaagctctgagtcaagttcttgttcattactatcctctcgctggacgcctcaccatcagtcctgaaggtaaactcacagttgactgtaccgaagaaggagttgtgtttgtggaagcagaagcaaactgtaaaatggatgagattggtgacattaccaaacccgatcctgaaactctagggaagcttgtgtacgatgtcgtagacgccaagaacattcttgagatccctcctgttaccgctcaggtgactaaattcaaatgtggagggtttgttctcggactctgtatgaatcactgtatgttcgatggaattggagctatggagtttgttaactcatggggtcaagtcgctagaggcttaccattaacaactcccccattctcagacagaaccattctcaatgctcgaaaccctccaaagatcgagaatctccaccaagaatttgaagagatcgaagataaatccaacatcaactctctttacaccaaagagccaactctctacagatccttctgctttgatccagagaaaatcaagaaacttaagctccaagcaacagagaacagtgagtctctcctcggtaactcatgcacaagttttgaggctttatctgcttttgtctggagagcaagaaccaagtcgttgaagatgttgagtgatcagaaaacgaagcttctcttcgccgttgatggtagagccaagttcgagcctcaactgccaaaagggtacttcggaaatggaattgttctcacaaactccatctgtgaagctggggagcttatcgaaaaaccgttgagtttcgcggtgggattagtcagagaagccattaagatggtaactgatgggtacatgagatctgctattgattacttcgaagtcacgagagcaagaccttctctttcctcgactcttctgatcactacatggtcaagattgggtttccacacgacagatttcggttggggagaaccgattttatccggtccagtagctttgcctgagaaagaagtaactctgtttttgtctcatggagaacagaggagaagcatcaatgtgcttcttggacttcccgctacagccatggatgtgtttcaagaacagtttttacagatataatatgaacaacgacaaaatacaaatatctggcaattattgtcaaaacctattcgttttactctgtttttcttgcttccttttttttttatctttttgatttatgctgaattattattgttatcttcatcttaaacttgtctgtatcttgcatcaagtttcaaccataaatttatattatttcaaactatattgtaataatattattacttg

SEQ ID NO: 49194 - protein, 457 aa, Arabidopsis thaliana
  peptide (1)..(457): Ceres Seq. ID no. 12578207
  misc_feature (31)..(457): Pfam Name: Transferase family Pfam Description: Transferase family
  misc_feature (33)..(453): Homolog of NCBI NO: 7489142 NR Description: hsr201 protein, hypersensitivity-related - common
  misc_feature (26)..(457): Homolog of NCBI NO: 40644084 NR Description: hydroxycinnamoyl CoA quinate transferase
  misc_feature (33)..(453): Homolog of NCBI NO: 22854880 NR Description: benzoyl coenzyme A: benzyl alcohol benzoyl
  misc_feature (29)..(451): Homolog of NCBI NO: 20161743 NR Description: N-hydroxycinnamoyl/benzoyltransferase-like
  misc_feature (33)..(452): Homolog of NCBI NO: 15229017 NR Description: putative protein; protein id: At3g48720.1
  misc_feature (33)..(452): Homolog of NCBI NO: 34222064 NR Description: At3g48720 [Arabidopsis thaliana]
  misc_feature (28)..(451): Homolog of NCBI NO: 21553692 NR Description: acyltransferase-like protein [Arabidopsis
  misc_feature (28)..(451): Homolog of NCBI NO: 15242820 NR Description: acyltransferase-like protein
  misc_feature (17)..(457): Homolog of NCBI NO: 30693725 NR Description: transferase family [Arabidopsis thaliana]
  misc_feature (1)..(457): Homolog of NCBI NO: 30693723 NR Description: transferase family [Arabidopsis thaliana]
MVAENNKNKDVTLSASMDNNNNNIKGTNIHLEVHQKEPALVKPESETRKGLYFLSNLDQNIAVIVRTIYCFKSEERGNEEAVQVIKKALSQVLVHYYPLAGRLTISPEGKLTVDCTEEGVVFVEAEANCKMDEIGDITKPDPETLGKLVYDVVDAKNILEIPPVTAQVTKFKCGGFVLGLCMNHCMFDGIGAMEFVNSWGQVARGLPLTTPPFSDRTILNARNPPKIENLHQEFEEIEDKSNINSLYTKEPTLYRSFCFDPEKIKKLKLQATENSESLLGNSCTSFEALSAFVWRARTKSLKMLSDQKTKLLFAVDGRAKFEPQLPKGYFGNGIVLTNSICEAGELIEKPLSFAVGLVREAIKMVTDGYMRSAIDYFEVTRARPSLSSTLLITTWSRLGFHTTDFGWGEPILSGPVALPEKEVTLFLSHGEQRRSINVLLGLPATAMDVFQEQFLQI

SEQ ID NO: 49195 - protein, 441 aa, Arabidopsis thaliana
  peptide (1)..(441): Ceres Seq. ID no. 12578208
  misc_feature (15)..(441): Pfam Name: Transferase family Pfam Description: Transferase family
  misc_feature (17)..(437): Homolog of NCBI NO: 7489142 NR Description: hsr201 protein, hypersensitivity-related - common
  misc_feature (10)..(441): Homolog of NCBI NO: 40644084 NR Description: hydroxycinnamoyl CoA quinate transferase
  misc_feature (17)..(437): Homolog of NCBI NO: 22854880 NR Description: benzoyl coenzyme A: benzyl alcohol benzoyl
  misc_feature (13)..(435): Homolog of NCBI NO: 20161743 NR Description: N-hydroxycinnamoyl/benzoyltransferase-like
  misc_feature (17)..(436): Homolog of NCBI NO: 15229017 NR Description: putative protein; protein id: At3g48720.1
  misc_feature (17)..(436): Homolog of NCBI NO: 34222064 NR Description: At3g48720 [Arabidopsis thaliana]
  misc_feature (12)..(435): Homolog of NCBI NO: 21553692 NR Description: acyltransferase-like protein [Arabidopsis
  misc_feature (12)..(435): Homolog of NCBI NO: 15242820 NR Description: acyltransferase-like protein
  misc_feature (1)..(441): Homolog of NCBI NO: 30693725 NR Description: transferase family [Arabidopsis thaliana]
  misc_feature (1)..(441): Homolog of NCBI NO: 30693723 NR Description: transferase family [Arabidopsis thaliana]
MDNNNNNIKGTNIHLEVHQKEPALVKPESETRKGLYFLSNLDQNIAVIVRTIYCFKSEERGNEEAVQVIKKALSQVLVHYYPLAGRLTISPEGKLTVDCTEEGVVFVEAEANCKMDEIGDITKPDPETLGKLVYDVVDAKNILEIPPVTAQVTKFKCGGFVLGLCMNHCMFDGIGAMEFVNSWGQVARGLPLTTPPFSDRTILNARNPPKIENLHQEFEEIEDKSNINSLYTKEPTLYRSFCFDPEKIKKLKLQATENSESLLGNSCTSFEALSAFVWRARTKSLKMLSDQKTKLLFAVDGRAKFEPQLPKGYFGNGIVLTNSICEAGELIEKPLSFAVGLVREAIKMVTDGYMRSAIDYFEVTRARPSLSSTLLITTWSRLGFHTTDFGWGEPILSGPVALPEKEVTLFLSHGEQRRSINVLLGLPATAMDVFQEQFLQI

SEQ ID NO: 49196 - protein, 327 aa, Arabidopsis thaliana
  peptide (1)..(327): Ceres Seq. ID no. 12578209
  misc_feature (1)..(327): Pfam Name: Transferase family Pfam Description: Transferase family
  misc_feature (1)..(323): Homolog of NCBI NO: 7489142 NR Description: hsr201 protein, hypersensitivity-related - common
  misc_feature (1)..(327): Homolog of NCBI NO: 40644084 NR Description: hydroxycinnamoyl CoA quinate transferase
  misc_feature (1)..(323): Homolog of NCBI NO: 22854880 NR Description: benzoyl coenzyme A: benzyl alcohol benzoyl
  misc_feature (1)..(321): Homolog of NCBI NO: 20161743 NR Description: N-hydroxycinnamoyl/benzoyltransferase-like
  misc_feature (1)..(322): Homolog of NCBI NO: 15229017 NR Description: putative protein; protein id: At3g48720.1
  misc_feature (1)..(322): Homolog of NCBI NO: 34222064 NR Description: At3g48720 [Arabidopsis thaliana]
  misc_feature (1)..(321): Homolog of NCBI NO: 21553692 NR Description: acyltransferase-like protein [Arabidopsis
  misc_feature (1)..(321): Homolog of NCBI NO: 15242820 NR Description: acyltransferase-like protein
  misc_feature (1)..(327): Homolog of NCBI NO: 30693725 NR Description: transferase family [Arabidopsis thaliana]
  misc_feature (1)..(327): Homolog of NCBI NO: 30693723 NR Description: transferase family [Arabidopsis thaliana]
MDEIGDITKPDPETLGKLVYDVVDAKNILEIPPVTAQVTKFKCGGFVLGLCMNHCMFDGIGAMEFVNSWGQVARGLPLTTPPFSDRTILNARNPPKIENLHQEFEEIEDKSNINSLYTKEPTLYRSFCFDPEKIKKLKLQATENSESLLGNSCTSFEALSAFVWRARTKSLKMLSDQKTKLLFAVDGRAKFEPQLPKGYFGNGIVLTNSICEAGELIEKPLSFAVGLVREAIKMVTDGYMRSAIDYFEVTRARPSLSSTLLITTWSRLGFHTTDFGWGEPILSGPVALPEKEVTLFLSHGEQRRSINVLLGLPATAMDVFQEQFLQI

SEQ ID NO: 49197 - DNA, 2820 bp, Arabidopsis thaliana
  misc_feature (1)..(2820): Ceres Seq. ID no. 13592072
  misc_feature: MA Experiment ID: 20000173 Result: Down-regulated in Transcription
  misc_feature: MA Experiment 20000173 PARAMETER Experiment Name: At_42deg_Heat_P Parameter: Age (day) Value: 14
  misc_feature: MA Experiment 20000173 PARAMETER Experiment Name: At_42deg_Heat_P Parameter: Organism Value: A. thaliana
  misc_feature: MA Experiment 20000173 PARAMETER Experiment Name: At_42deg_Heat_P Parameter: Plant Line Value: WS
  misc_feature: MA Experiment 20000173 PARAMETER Experiment Name: At_42deg_Heat_P Parameter: Temperature (deg C) Value: 42 vs. 22
  misc_feature: MA Experiment 20000173 PARAMETER Experiment Name: At_42deg_Heat_P Parameter: Timepoint (hr) Value: 6
  misc_feature: MA Experiment 20000173 PARAMETER Experiment Name: At_42deg_Heat_P Parameter: Tissue Value: Aerial
  misc_feature: MA Experiment ID: 20000227 Result: Up-regulated in Transcription
  misc_feature: MA Experiment 20000227 PARAMETER Experiment Name: At_Root-Tips-vs-Tops_P Parameter: Tissue Value: Root Tips vs. Root Tops
  misc_feature: MA Experiment ID: 20000437 Result: Up-regulated in Transcription
  misc_feature: MA Experiment 20000437 PARAMETER Experiment Name: At_Drought_P Parameter: Age (day) Value: 8
  misc_feature: MA Experiment 20000437 PARAMETER Experiment Name: At_Drought_P Parameter: Organism Value: A. thaliana
  misc_feature: MA Experiment 20000437 PARAMETER Experiment Name: At_Drought_P Parameter: Plant Line Value: WS
  misc_feature: MA Experiment 20000437 PARAMETER Experiment Name: At_Drought_P Parameter: Timepoint (hr) Value: 24
  misc_feature: MA Experiment 20000437 PARAMETER Experiment Name: At_Drought_P Parameter: Tissue Value: Whole Plant
  misc_feature: MA Experiment 20000437 PARAMETER Experiment Name: At_Drought_P Parameter: Treatment Value: Drought vs. No Drought
  misc_feature: MA Experiment ID: 20001247 Result: Down-regulated in Transcription
  misc_feature: MA Experiment 20001247 PARAMETER Experiment Name: At_Far-red-induction_P Parameter: Age (day) Value: 7
  misc_feature: MA Experiment 20001247 PARAMETER Experiment Name: At_Far-red-induction_P Parameter: Light Value: Far-red vs. White
  misc_feature: MA Experiment 20001247 PARAMETER Experiment Name: At_Far-red-induction_P Parameter: Organism Value: A. thaliana
  misc_feature: MA Experiment 20001247 PARAMETER Experiment Name: At_Far-red-induction_P Parameter: Plant Line Value: Columbia
  misc_feature: MA Experiment 20001247 PARAMETER Experiment Name: At_Far-red-induction_P Parameter: Timepoint (hr) Value: 1
  misc_feature: MA Experiment 20001247 PARAMETER Experiment Name: At_Far-red-induction_P Parameter: Tissue Value: Whole Plant
  misc_feature: MA Experiment ID: 20001248 Result: Up-regulated in Transcription
  misc_feature: MA Experiment 20001248 PARAMETER Experiment Name: At_Far-red-induction_P Parameter: Age (day) Value: 7
  misc_feature: MA Experiment 20001248 PARAMETER Experiment Name: At_Far-red-induction_P Parameter: Light Value: Far-red vs. White
  misc_feature: MA Experiment 20001248 PARAMETER Experiment Name: At_Far-red-induction_P Parameter: Organism Value: A. thaliana
  misc_feature: MA Experiment 20001248 PARAMETER Experiment Name: At_Far-red-induction_P Parameter: Plant Line Value: Columbia
  misc_feature: MA Experiment 20001248 PARAMETER Experiment Name: At_Far-red-induction_P Parameter: Timepoint (hr) Value: 4
  misc_feature: MA Experiment 20001248 PARAMETER Experiment Name: At_Far-red-induction_P Parameter: Tissue Value: Whole Plant
  misc_feature: MA Experiment ID: 20001451 Result: Down-regulated in Transcription
  misc_feature: MA Experiment 20001451 PARAMETER Experiment Name: At_Far-red-induction_P Parameter: Age (day) Value: 7
  misc_feature: MA Experiment 20001451 PARAMETER Experiment Name: At_Far-red-induction_P Parameter: Light Value: Far-red vs. White
  misc_feature: MA Experiment 20001451 PARAMETER Experiment Name: At_Far-red-induction_P Parameter: Organism Value: A. thaliana
  misc_feature: MA Experiment 20001451 PARAMETER Experiment Name: At_Far-red-induction_P Parameter: Plant Line Value: Columbia
  misc_feature: MA Experiment 20001451 PARAMETER Experiment Name: At_Far-red-induction_P Parameter: Timepoint (hr) Value: 24
  misc_feature: MA Experiment 20001451 PARAMETER Experiment Name: At_Far-red-induction_P Parameter: Tissue Value: Whole Plant
atgctccatctcttcctcttctcctccgccgcctccaccaccaccgccgtagaagacaattccaccaccatgcccccttcttctagatccgccgctaatcaaaactcctcctcttctctccatctctgcaaacattcaccgtcggcgactctcgacctcttaatcctaatcctcgtcctcttctccggcacattcctcctctcctcttacttctcataccttatccactccttatctctcctctcctctcatttcccttcaatcaccatctccctctcctctctcctccctcctctaatcatcttcttctcctccgatcacagcaccgaagatgaagatcatcatcatccctcaggaaaaatccctcctccggcttcgttcttcttcgcattcgcagtttttttcgcggcttcaattgcgtttctcgacctgtgttgtggttcaagatcaaggaaatgtcgtaaccctaagtgtaaaggaatgaagaaagctatggagtttgatttgcagttacagacagaggaatgtgttaaatccggttcggttaaagagattgatcggttaccgtggaaaggaggtagtgagagtaatcctgattatgagtgtttgagagctgagctgaggaagatggctccggttaatggtcgagctgttttgattttccgatcaaaatgtggttgccctattgctaagcttgaaggttggggacctaagagaagtcggcgtcataaaaaatggaacttggtgactagtgaatttgtaggttctgtttatcctgttcttgcgacgtatttattgccattgatcattttgagaccagcgagatgcttctctgctccgagtcggacccacttcgatttctccggcgaaagctccgatactgaacgagctctcgtctctgctcttggatcgtgcgcttccagtaatgacgtcacttgtggtagacagattcattgccgtgtcttgaaatccggtcttgattctaatggatacatatgtaatagcgttcttaacatgtacgctaaatgccgtctcttggctgatgcggaatctgttttcagggatcacgcgaagcttgattctgcttcgttcaatattatggttgatgggtatgttagatctcgtagactttgggatgcgcttaagttgttcgacgtaatgcctgagagaagctgtgtctcgtatactactttgataaagggttatgctcaaaacaatcagtggagtgaagctatggagctttttagggagatgagaaatttgggaattatgctaaatgaagttactttagccactgttatatctgcttgctcacatttgggtgggatttgggattgtaggatgttgcagagtttggctattaaactcaagcttgaaggtcgtgtttttgtttcgacgaatttgctgcatatgtactgtctttgtttgtgtttgaaggatgctcggaagttgtttgatgaaatgcctgagagaaatttagttacttggaacgtgatgttaaatgggtactcaaaagctggacttattgaacaggctgaggaattgtttgatcagattactgagaaagatattgtctcgtggggtacaatgattgatgggtgtctccgaaagaatcagcttgacgaagctcttgtttactacaccgagatgctgcgctgtggaatgaagcctagtgaagttatgatggtggaccttctctcggcttcagctcgatcagttggtagctccaagggtttgcaacttcatggtaccattgtgaaaaggggttttgattgttatgatttcttacaagcaacgatcatacatttctacgctgtctctaatgacataaaactcgctcttcagcagtttgaagcgagtgttaaggaccacattgcgtcgagaaacgcgttgattgcaggatttgtgaagaatggaatggttgagcaggcaagagaagtatttgatcagactcatgataaagacatcttttcatggaacgctatgatatcgggttacgcgcaaagtctatcgcctcagttagctctacatctattccgcgaaatgatcagtagtagccaagtaaaaccagatgcaatcacaatggttagtgttttttctgcaatttcttctctaggatcgttggaagaagggaagagagcacatgattatctaaactttagcacgattcctcccaacgacaatctaaccgctgctataatcgacatgtacgccaaatgtggaagcatcgaaactgctctaaacattttccaccaaacaaagaacatttcttcttctacaatctctccctggaacgccatcatttgcggctcagcgacacatggccatgcaaaactagcgcttgatctctactccgatctccaatctctccccatcaaaccgaacagcatcacttttgtcggtgtcttgagcgcatgctgccatgcagggctagtggagttaggtaaaacgtatttcgaaagcatgaagagcgatcacgggatcgagccagacatcaaacattatggatgtatggttgatttattggggaaagctgggagattagaggaagctaaagaaatgatcaagaagatgcctgtaaaggctgatgtaatgatctgggggatgttattatcagcttcacgaactcacgggaacgtcgagatcgccgaacttgcggctactgagctagcagcgattgatccatctcatggaggatgcaaagttatgctttcgaacgtttatgcagacgcagggagatgggaagatgtagctttggttagagaagagatgcgaacgagagatgttgagtggtcacgtgccttcagtggtgttgtgtga

SEQ ID NO: 49198 - protein, 939 aa, Arabidopsis thaliana
  peptide (1)..(939): Ceres Seq. ID no. 13592073
  misc_feature (833)..(867): Pfam Name: PPR repeat Pfam Description: PPR repeat
  misc_feature (304)..(930): Homolog of NCBI NO: 34393605 NR Description: pentatricopeptide (PPR) repeat-containing
  misc_feature (497)..(930): Homolog of NCBI NO: 37534112 NR Description: putative selenium-binding protein-like
  misc_feature (248)..(507): Homolog of NCBI NO: 15235115 NR Description: pentatricopeptide (PPR) repeat-containing protein
  misc_feature (617)..(938): Homolog of NCBI NO: 15235115 NR Description: pentatricopeptide (PPR) repeat-containing protein
  misc_feature (305)..(519): Homolog of NCBI NO: 15232885 NR Description: pentatricopeptide (PPR) repeat-containing protein
  misc_feature (497)..(925): Homolog of NCBI NO: 15232885 NR Description: pentatricopeptide (PPR) repeat-containing protein
  misc_feature (392)..(938): Homolog of NCBI NO: 15226463 NR Description: pentatricopeptide (PPR) repeat-containing protein
  misc_feature (305)..(936): Homolog of NCBI NO: 34896896 NR Description: hypothetical protein [Oryza sativa (japonica
  misc_feature (304)..(938): Homolog of NCBI NO: 15227144 NR Description: pentatricopeptide (PPR) repeat-containing protein
  misc_feature (298)..(939): Homolog of NCBI NO: 34905570 NR Description: hypothetical protein~similar to Arabidopsis
MLHLFLFSSAASTTTAVEDNSTTMPPSSRSAANQNSSSSLHLCKHSPSATLDLLILILVLFSGTFLLSSYFSYLIHSLSLLSSHFPSITISLSSLLPPLIIFFSSDHSTEDEDHHHPSGKIPPPASFFFAFAVFFAASIAFLDLCCGSRSRKCRNPKCKGMKKAMEFDLQLQTEECVKSGSVKEIDRLPWKGGSESNPDYECLRAELRKMAPVNGRAVLIFRSKCGCPIAKLEGWGPKRSRRHKKWNLVTSEFVGSVYPVLATYLLPLIILRPARCFSAPSRTHFDFSGESSDTERALVSALGSCASSNDVTCGRQIHCRVLKSGLDSNGYICNSVLNMYAKCRLLADAESVFRDHAKLDSASFNIMVDGYVRSRRLWDALKLFDVMPERSCVSYTTLIKGYAQNNQWSEAMELFREMRNLGIMLNEVTLATVISACSHLGGIWDCRMLQSLAIKLKLEGRVFVSTNLLHMYCLCLCLKDARKLFDEMPERNLVTWNVMLNGYSKAGLIEQAEELFDQITEKDIVSWGTMIDGCLRKNQLDEALVYYTEMLRCGMKPSEVMMVDLLSASARSVGSSKGLQLHGTIVKRGFDCYDFLQATIIHFYAVSNDIKLALQQFEASVKDHIASRNALIAGFVKNGMVEQAREVFDQTHDKDIFSWNAMISGYAQSLSPQLALHLFREMISSSQVKPDAITMVSVFSAISSLGSLEEGKRAHDYLNFSTIPPNDNLTAAIIDMYAKCGSIETALNIFHQTKNISSSTISPWNAIICGSATHGHAKLALDLYSDLQSLPIKPNSITFVGVLSACCHAGLVELGKTYFESMKSDHGIEPDIKHYGCMVDLLGKAGRLEEAKEMIKKMPVKADVMIWGMLLSASRTHGNVEIAELAATELAAIDPSHGGCKVMLSNVYADAGRWEDVALVREEMRTRDVEWSRAFSGVV

SEQ ID NO: 49199 - protein, 916 aa, Arabidopsis thaliana
  peptide (1)..(916): Ceres Seq. ID no. 13592074
  misc_feature (810)..(844): Pfam Name: PPR repeat Pfam Description: PPR repeat
  misc_feature (281)..(907): Homolog of NCBI NO: 34393605 NR Description: pentatricopeptide (PPR) repeat-containing
  misc_feature (474)..(907): Homolog of NCBI NO: 37534112 NR Description: putative selenium-binding protein-like
  misc_feature (225)..(484): Homolog of NCBI NO: 15235115 NR Description: pentatricopeptide (PPR) repeat-containing protein
  misc_feature (594)..(915): Homolog of NCBI NO: 15235115 NR Description: pentatricopeptide (PPR) repeat-containing protein
  misc_feature (282)..(496): Homolog of NCBI NO: 15232885 NR Description: pentatricopeptide (PPR) repeat-containing protein
  misc_feature (474)..(902): Homolog of NCBI NO: 15232885 NR Description: pentatricopeptide (PPR) repeat-containing protein
  misc_feature (369)..(915): Homolog of NCBI NO: 15226463 NR Description: pentatricopeptide (PPR) repeat-containing protein
  misc_feature (282)..(913): Homolog of NCBI NO: 34896896 NR Description: hypothetical protein [Oryza sativa (japonica
  misc_feature (281)..(915): Homolog of NCBI NO: 15227144 NR Description: pentatricopeptide (PPR) repeat-containing protein
  misc_feature (275)..(916): Homolog of NCBI NO: 34905570 NR Description: hypothetical protein~similar to Arabidopsis
MPPSSRSAANQNSSSSLHLCKHSPSATLDLLILILVLFSGTFLLSSYFSYLIHSLSLLSSHFPSITISLSSLLPPLIIFFSSDHSTEDEDHHHPSGKIPPPASFFFAFAVFFAASIAFLDLCCGSRSRKCRNPKCKGMKKAMEFDLQLQTEECVKSGSVKEIDRLPWKGGSESNPDYECLRAELRKMAPVNGRAVLIFRSKCGCPIAKLEGWGPKRSRRHKKWNLVTSEFVGSVYPVLATYLLPLIILRPARCFSAPSRTHFDFSGESSDTERALVSALGSCASSNDVTCGRQIHCRVLKSGLDSNGYICNSVLNMYAKCRLLADAESVFRDHAKLDSASFNIMVDGYVRSRRLWDALKLFDVMPERSCVSYTTLIKGYAQNNQWSEAMELFREMRNLGIMLNEVTLATVISACSHLGGIWDCRMLQSLAIKLKLEGRVFVSTNLLHMYCLCLCLKDARKLFDEMPERNLVTWNVMLNGYSKAGLIEQAEELFDQITEKDIVSWGTMIDGCLRKNQLDEALVYYTEMLRCGMKPSEVMMVDLLSASARSVGSSKGLQLHGTIVKRGFDCYDFLQATIIHFYAVSNDIKLALQQFEASVKDHIASRNALIAGFVKNGMVEQAREVFDQTHDKDIFSWNAMISGYAQSLSPQLALHLFREMISSSQVKPDAITMVSVFSAISSLGSLEEGKRAHDYLNFSTIPPNDNLTAAIIDMYAKCGSIETALNIFHQTKNISSSTISPWNAIICGSATHGHAKLALDLYSDLQSLPIKPNSITFVGVLSACCHAGLVELGKTYFESMKSDHGIEPDIKHYGCMVDLLGKAGRLEEAKEMIKKMPVKADVMIWGMLLSASRTHGNVEIAELAATELAAIDPSHGGCKVMLSNVYADAGRWEDVALVREEMRTRDVEWSRAFSGVV

SEQ ID NO: 49200 - protein, 779 aa, Arabidopsis thaliana
  peptide (1)..(779): Ceres Seq. ID no. 13592075
  misc_feature (673)..(707): Pfam Name: PPR repeat Pfam Description: PPR repeat
  misc_feature (144)..(770): Homolog of NCBI NO: 34393605 NR Description: pentatricopeptide (PPR) repeat-containing
  misc_feature (337)..(770): Homolog of NCBI NO: 37534112 NR Description: putative selenium-binding protein-like
  misc_feature (88)..(347): Homolog of NCBI NO: 15235115 NR Description: pentatricopeptide (PPR) repeat-containing protein
  misc_feature (457)..(778): Homolog of NCBI NO: 15235115 NR Description: pentatricopeptide (PPR) repeat-containing protein
  misc_feature (145)..(359): Homolog of NCBI NO: 15232885 NR Description: pentatricopeptide (PPR) repeat-containing protein
  misc_feature (337)..(765): Homolog of NCBI NO: 15232885 NR Description: pentatricopeptide (PPR) repeat-containing protein
  misc_feature (232)..(778): Homolog of NCBI NO: 15226463 NR Description: pentatricopeptide (PPR) repeat-containing protein
  misc_feature (145)..(776): Homolog of NCBI NO: 34896896 NR Description: hypothetical protein [Oryza sativa (japonica
  misc_feature (144)..(778): Homolog of NCBI NO: 15227144 NR Description: pentatricopeptide (PPR) repeat-containing protein
  misc_feature (138)..(779): Homolog of NCBI NO: 34905570 NR Description: hypothetical protein~similar to Arabidopsis
MKKAMEFDLQLQTEECVKSGSVKEIDRLPWKGGSESNPDYECLRAELRKMAPVNGRAVLIFRSKCGCPIAKLEGWGPKRSRRHKKWNLVTSEFVGSVYPVLATYLLPLIILRPARCFSAPSRTHFDFSGESSDTERALVSALGSCASSNDVTCGRQIHCRVLKSGLDSNGYICNSVLNMYAKCRLLADAESVFRDHAKLDSASFNIMVDGYVRSRRLWDALKLFDVMPERSCVSYTTLIKGYAQNNQWSEAMELFREMRNLGIMLNEVTLATVISACSHLGGIWDCRMLQSLAIKLKLEGRVFVSTNLLHMYCLCLCLKDARKLFDEMPERNLVTWNVMLNGYSKAGLIEQAEELFDQITEKDIVSWGTMIDGCLRKNQLDEALVYYTEMLRCGMKPSEVMMVDLLSASARSVGSSKGLQLHGTIVKRGFDCYDFLQATIIHFYAVSNDIKLALQQFEASVKDHIASRNALIAGFVKNGMVEQAREVFDQTHDKDIFSWNAMISGYAQSLSPQLALHLFREMISSSQVKPDAITMVSVFSAISSLGSLEEGKRAHDYLNFSTIPPNDNLTAAIIDMYAKCGSIETALNIFHQTKNISSSTISPWNAIICGSATHGHAKLALDLYSDLQSLPIKPNSITFVGVLSACCHAGLVELGKTYFESMKSDHGIEPDIKHYGCMVDLLGKAGRLEEAKEMIKKMPVKADVMIWGMLLSASRTHGNVEIAELAATELAAIDPSHGGCKVMLSNVYADAGRWEDVALVREEMRTRDVEWSRAFSGVV

SEQ ID NO: 49201 - DNA, 1663 bp, Arabidopsis thaliana
  misc_feature (1)..(1663): Ceres Seq. ID no. 13647024
  misc_feature: MA Experiment ID: 20000328 Result: Down-regulated in Transcription
  misc_feature: MA Experiment 20000328 PARAMETER Experiment Name: At_42deg_Heat_Sub_P Parameter: Age (day) Value: 14
  misc_feature: MA Experiment 20000328 PARAMETER Experiment Name: At_42deg_Heat_Sub_P Parameter: Organism Value: A. thaliana
  misc_feature: MA Experiment 20000328 PARAMETER Experiment Name: At_42deg_Heat_Sub_P Parameter: Plant Line Value: WS
  misc_feature: MA Experiment 20000328 PARAMETER Experiment Name: At_42deg_Heat_Sub_P Parameter: Temperature (deg C) Value: 42 vs. 22
  misc_feature: MA Experiment 20000328 PARAMETER Experiment Name: At_42deg_Heat_Sub_P Parameter: Timepoint (hr) Value: 6
  misc_feature: MA Experiment 20000328 PARAMETER Experiment Name: At_42deg_Heat_Sub_P Parameter: Tissue Value: Aerial
aaaacaacaaccctaaatccttatctctatccttgcgcttgatccagattcggttstgaytcggagctgccatggaacgtatcatcggcggcaagtacaagctcggacggaagattggcggtggttcctttggagagattttcctagctacgcacatcgataccttcgagattgtagctgttaagatcgagaacagtaaaacaaaacatcctcagcttctctatgaagctaagctatatagaactcttgaaggaggaagtggaattccgcgcataagatggtttggagttgatggaacagagaatgctttagtgatggatttgctcggtccaagtctcgaagatcttttcgtctactgtgggagaaaattttcaccaaagacggtcttgatgttggctgatcaaatgctaactagaatagaatatgtacattccaaaggatatctgcatagagatataaaaccagataactttctcatgggcctaggccgcaaagcgaatcaggtttatctaattgactttggactggccaaaagatatcgtgatgccaacaccaaccgccacatcccttatagggaaaacaagaatttaacaggaactgcacgatatgcaagttgcaatacacatcttggtattgagcaaggtagacgggatgacctagagtctcttggatatgtgcttctgtacttcttaagaggaagccttccatggcagggtcttaaggctgttgacaagaagcaaaagtatgacaaaatttgtgagaagaagatatcaactcctattgaggttctatgcaaaagccaccccgtggagtttgcttcatattttcattattgccacacactgacatttgatcaacgccctgattatggattcttgaagcggctttttcgtgatttattctcacgggaaggatatgagtttgactatatatatgactggactattataaagtatcagcaatcacagaaaactagaagtcagtctcaggccgttcctgggtctagtaatgctcgtgcaataccaatggacacaagcaatcatcgaggaggaactaagatttcacatgaagcccaagtctctgaccgtgtcagaccggctaatgccagtggtccaagcccacagattaataccgctgtagggaggagtctgggttttgatcaagtccacaagaatatgaacatgccatcatccacttcattatctcctgcgggtacctcaaaaagaaatgtcagacccgaaacctcaaattctgggtttgggagcgggaataaaaccggcggttggacttcaccattcatgtcaccggggaaatgatgcaaaaaaagttggagtatatcattcatctgatctgctgagcaagattatgtgtgcctttgggtctaaactgtgatttctgcagtgaaaagctctagactgaggttgaagatctgaatggagtttttccatgaacagcttactgtttgacaaaaggcatgaagattatgtttgctttccttcaagattctcacaaatgactgacttcaacctttgtataaaatcttgcaaccgggcgtgtaatttggttcttgtgattcattctcccaagttttcttctataaaactttgttcgtatttctgtacgtagttccctgtgttggggcataacctgggtttgctgtgtc

SEQ ID NO: 49202 - protein, 414 aa, Arabidopsis thaliana
  peptide (1)..(414): Ceres Seq. ID no. 15219128
  misc_feature (1)..(411): Homolog of NCBI NO: 18087640 NR Description: AT5g44100/MLN1_2 [Arabidopsis thaliana]
  misc_feature (1)..(411): Homolog of NCBI NO: 15240091 NR Description: casein kinase, putative [Arabidopsis thaliana]
  misc_feature (1)..(399): Homolog of NCBI NO: 22327902 NR Description: casein kinase, putative [Arabidopsis thaliana]
  misc_feature (1)..(398): Homolog of NCBI NO: 15236114 NR Description: casein kinase, putative [Arabidopsis thaliana]
  misc_feature (1)..(392): Homolog of NCBI NO: 34910448 NR Description: putative casein kinase I [Oryza sativa (japonica
  misc_feature (1)..(302): Homolog of NCBI NO: 34904322 NR Description: unnamed protein product [Oryza sativa (japonica
  misc_feature (1)..(306): Homolog of NCBI NO: 7434338 NR Description: protein kinase homolog F16A16.10 - Arabidopsis
  misc_feature (1)..(306): Homolog of NCBI NO: 7488241 NR Description: protein kinase homolog F16A16.30 - Arabidopsis
  misc_feature (1)..(414): Homolog of NCBI NO: 22329010 NR Description: casein kinase I, putative [Arabidopsis thaliana]
  misc_feature (1)..(414): Homolog of NCBI NO: 22329008 NR Description: casein kinase, putative [Arabidopsis thaliana]
MERIIGGKYKLGRKIGGGSFGEIFLATHIDTFEIVAVKIENSKTKHPQLLYEAKLYRTLEGGSGIPRIRWFGVDGTENALVMDLLGPSLEDLFVYCGRKFSPKTVLMLADQMLTRIEYVHSKGYLHRDIKPDNFLMGLGRKANQVYLIDFGLAKRYRDANTNRHIPYRENKNLTGTARYASCNTHLGIEQGRRDDLESLGYVLLYFLRGSLPWQGLKAVDKKQKYDKICEKKISTPIEVLCKSHPVEFASYFHYCHTLTFDQRPDYGFLKRLFRDLFSREGYEFDYIYDWTIIKYQQSQKTRSQSQAVPGSSNARAIPMDTSNHRGGTKISHEAQVSDRVRPANASGPSPQINTAVGRSLGFDQVHKNMNMPSSTSLSPAGTSKRNVRPETSNSGFGSGNKTGGWTSPFMSPGK

SEQ ID NO: 49203 - protein, 333 aa, Arabidopsis thaliana
  peptide (1)..(333): Ceres Seq. ID no. 15219129
  misc_feature (1)..(330): Homolog of NCBI NO: 18087640 NR Description: AT5g44100/MLN1_2 [Arabidopsis thaliana]
  misc_feature (1)..(330): Homolog of NCBI NO: 15240091 NR Description: casein kinase, putative [Arabidopsis thaliana]
  misc_feature (1)..(318): Homolog of NCBI NO: 22327902 NR Description: casein kinase, putative [Arabidopsis thaliana]
  misc_feature (1)..(317): Homolog of NCBI NO: 15236114 NR Description: casein kinase, putative [Arabidopsis thaliana]
  misc_feature (1)..(311): Homolog of NCBI NO: 34910448 NR Description: putative casein kinase I [Oryza sativa (japonica
  misc_feature (1)..(221): Homolog of NCBI NO: 34904322 NR Description: unnamed protein product [Oryza sativa (japonica
  misc_feature (1)..(225): Homolog of NCBI NO: 7434338 NR Description: protein kinase homolog F16A16.10 - Arabidopsis
  misc_feature (1)..(225): Homolog of NCBI NO: 7488241 NR Description: protein kinase homolog F16A16.30 - Arabidopsis
  misc_feature (1)..(333): Homolog of NCBI NO: 22329010 NR Description: casein kinase I, putative [Arabidopsis thaliana]
  misc_feature (1)..(333): Homolog of NCBI NO: 22329008 NR Description: casein kinase, putative [Arabidopsis thaliana]
MDLLGPSLEDLFVYCGRKFSPKTVLMLADQMLTRIEYVHSKGYLHRDIKPDNFLMGLGRKANQVYLIDFGLAKRYRDANTNRHIPYRENKNLTGTARYASCNTHLGIEQGRRDDLESLGYVLLYFLRGSLPWQGLKAVDKKQKYDKICEKKISTPIEVLCKSHPVEFASYFHYCHTLTFDQRPDYGFLKRLFRDLFSREGYEFDYIYDWTIIKYQQSQKTRSQSQAVPGSSNARAIPMDTSNHRGGTKISHEAQVSDRVRPANASGPSPQINTAVGRSLGFDQVHKNMNMPSSTSLSPAGTSKRNVRPETSNSGFGSGNKTGGWTSPFMSPGK

SEQ ID NO: 49204 - protein, 308 aa, Arabidopsis thaliana
  peptide (1)..(308): Ceres Seq. ID no. 15219130
  misc_feature (1)..(305): Homolog of NCBI NO: 18087640 NR Description: AT5g44100/MLN1_2 [Arabidopsis thaliana]
  misc_feature (1)..(305): Homolog of NCBI NO: 15240091 NR Description: casein kinase, putative [Arabidopsis thaliana]
  misc_feature (1)..(293): Homolog of NCBI NO: 22327902 NR Description: casein kinase, putative [Arabidopsis thaliana]
  misc_feature (1)..(292): Homolog of NCBI NO: 15236114 NR Description: casein kinase, putative [Arabidopsis thaliana]
  misc_feature (1)..(286): Homolog of NCBI NO: 34910448 NR Description: putative casein kinase I [Oryza sativa (japonica
  misc_feature (1)..(196): Homolog of NCBI NO: 34904322 NR Description: unnamed protein product [Oryza sativa (japonica
  misc_feature (1)..(200): Homolog of NCBI NO: 7434338 NR Description: protein kinase homolog F16A16.10 - Arabidopsis
  misc_feature (1)..(200): Homolog of NCBI NO: 7488241 NR Description: protein kinase homolog F16A16.30 - Arabidopsis
  misc_feature (1)..(308): Homolog of NCBI NO: 22329010 NR Description: casein kinase I, putative [Arabidopsis thaliana]
  misc_feature (1)..(308): Homolog of NCBI NO: 22329008 NR Description: casein kinase, putative [Arabidopsis thaliana]
MLADQMLTRIEYVHSKGYLHRDIKPDNFLMGLGRKANQVYLIDFGLAKRYRDANTNRHIPYRENKNLTGTARYASCNTHLGIEQGRRDDLESLGYVLLYFLRGSLPWQGLKAVDKKQKYDKICEKKISTPIEVLCKSHPVEFASYFHYCHTLTFDQRPDYGFLKRLFRDLFSREGYEFDYIYDWTIIKYQQSQKTRSQSQAVPGSSNARAIPMDTSNHRGGTKISHEAQVSDRVRPANASGPSPQINTAVGRSLGFDQVHKNMNMPSSTSLSPAGTSKRNVRPETSNSGFGSGNKTGGWTSPFMSPGK

SEQ ID NO: 49205 - DNA, 2463 bp, Arabidopsis thaliana; identical to SEQ ID NO: 36172
  misc_feature (1)..(2463): Ceres Seq. ID no. 12601343
  misc_feature: MA Experiment ID: 108434 Result: Up-regulated in Transcription
  misc_feature: MA Experiment 108434 PARAMETER Experiment Name: At_Root_Tips_cDNA_P Parameter: Tissue Value: Root Tips
  misc_feature: MA Experiment ID: 108463 Result: Down-regulated in Transcription
  misc_feature: MA Experiment 108463 PARAMETER Experiment Name: At_Germinating_Seeds_cDNA_P Parameter: Age (day) Value: 3 vs. 0
  misc_feature: MA Experiment 108463 PARAMETER Experiment Name: At_Germinating_Seeds_cDNA_P Parameter: Tissue Value: Germinating Seeds
  misc_feature: MA Experiment ID: 108464 Result: Down-regulated in Transcription
  misc_feature: MA Experiment 108464 PARAMETER Experiment Name: At_Germinating_Seeds_cDNA_P Parameter: Age (day) Value: 4 vs. 0
  misc_feature: MA Experiment 108464 PARAMETER Experiment Name: At_Germinating_Seeds_cDNA_P Parameter: Tissue Value: Germinating Seeds
  misc_feature: MA Experiment ID: 108576 Result: Up-regulated in Transcription
  misc_feature: MA Experiment 108576 PARAMETER Experiment Name: At_42deg_Heat_cDNA_P Parameter: Temperature (deg C) Value: 42 vs. 22
  misc_feature: MA Experiment 108576 PARAMETER Experiment Name: At_42deg_Heat_cDNA_P Parameter: Timepoint (hr) Value: 1
  misc_feature: MA Experiment 108576 PARAMETER Experiment Name: At_42deg_Heat_cDNA_P Parameter: Tissue Value: Aerial
  misc_feature: MA Experiment ID: 108577 Result: Up-regulated in Transcription
  misc_feature: MA Experiment 108577 PARAMETER Experiment Name: At_42deg_Heat_cDNA_P Parameter: Temperature (deg C) Value: 42 vs. 22
  misc_feature: MA Experiment 108577 PARAMETER Experiment Name: At_42deg_Heat_cDNA_P Parameter: Timepoint (hr) Value: 6
  misc_feature: MA Experiment 108577 PARAMETER Experiment Name: At_42deg_Heat_cDNA_P Parameter: Tissue Value: Aerial
  misc_feature: MA Experiment ID: 108595 Result: Down-regulated in Transcription
  misc_feature: MA Experiment 108595 PARAMETER Experiment Name: At_Ler-pi_Ovule_cDNA_P Parameter: Plant Line Value: null
  misc_feature: MA Experiment ID: 20000070 Result: Down-regulated in Transcription
  misc_feature: MA Experiment 20000070 PARAMETER Experiment Name: At_100uM_ABA_Mutants_cDNA_P Parameter: Plant Line Value: CS24
  misc_feature: MA Experiment 20000070 PARAMETER Experiment Name: At_100uM_ABA_Mutants_cDNA_P Parameter: Timepoint (hr) Value: 6
  misc_feature: MA Experiment 20000070 PARAMETER Experiment Name: At_100uM_ABA_Mutants_cDNA_P Parameter: Tissue Value: Aerial
  misc_feature: MA Experiment 20000070 PARAMETER Experiment Name: At_100uM_ABA_Mutants_cDNA_P Parameter: Treatment Value: 100uM ABA vs. No Treatment
  misc_feature: MA Experiment ID: 20000071 Result: Down-regulated in Transcription
  misc_feature: MA Experiment 20000071 PARAMETER Experiment Name: At_100uM_ABA_Mutants_cDNA_P Parameter: Plant Line Value: CS8104
  misc_feature: MA Experiment 20000071 PARAMETER Experiment Name: At_100uM_ABA_Mutants_cDNA_P Parameter: Timepoint (hr) Value: 6
  misc_feature: MA Experiment 20000071 PARAMETER Experiment Name: At_100uM_ABA_Mutants_cDNA_P Parameter: Tissue Value: Aerial
  misc_feature: MA Experiment 20000071 PARAMETER Experiment Name: At_100uM_ABA_Mutants_cDNA_P Parameter: Treatment Value: 100uM ABA vs. No Treatment
  misc_feature: MA Experiment ID: 20000072 Result: Down-regulated in Transcription
  misc_feature: MA Experiment 20000072 PARAMETER Experiment Name: At_100uM_ABA_Mutants_cDNA_P Parameter: Plant Line Value: CS8105
  misc_feature: MA Experiment 20000072 PARAMETER Experiment Name: At_100uM_ABA_Mutants_cDNA_P Parameter: Timepoint (hr) Value: 6
  misc_feature: MA Experiment 20000072 PARAMETER Experiment Name: At_100uM_ABA_Mutants_cDNA_P Parameter: Tissue Value: Aerial
  misc_feature: MA Experiment 20000072 PARAMETER Experiment Name: At_100uM_ABA_Mutants_cDNA_P Parameter: Treatment Value: 100uM ABA vs. No Treatment
  misc_feature: MA Experiment ID: 20000087 Result: Down-regulated in Transcription
  misc_feature: MA Experiment 20000087 PARAMETER Experiment Name: At_100uM_ABA_Mutants_cDNA_P Parameter: Plant Line Value: WS
  misc_feature: MA Experiment 20000087 PARAMETER Experiment Name: At_100uM_ABA_Mutants_cDNA_P Parameter: Timepoint (hr) Value: 6
  misc_feature: MA Experiment 20000087 PARAMETER Experiment Name: At_100uM_ABA_Mutants_cDNA_P Parameter: Tissue Value: Aerial
  misc_feature: MA Experiment 20000087 PARAMETER Experiment Name: At_100uM_ABA_Mutants_cDNA_P Parameter: Treatment Value: 100uM ABA vs. No Treatment
  misc_feature: MA Experiment ID: 20000093 Result: Up-regulated in Transcription
  misc_feature: MA Experiment 20000093 PARAMETER Experiment Name: At_42deg_Heat_cDNA_P Parameter: Temperature (deg C) Value: 42 vs. 22
  misc_feature: MA Experiment 20000093 PARAMETER Experiment Name: At_42deg_Heat_cDNA_P Parameter: Timepoint (hr) Value: 0.5
  misc_feature: MA Experiment 20000093 PARAMETER Experiment Name: At_42deg_Heat_cDNA_P Parameter: Tissue Value: Aerial
  misc_feature: MA Experiment ID: 20000111 Result: Up-regulated in Transcription
  misc_feature: MA Experiment 20000111 PARAMETER Experiment Name: At_42deg_Heat_cDNA_P Parameter: Temperature (deg C) Value: 42 vs. 22
  misc_feature: MA Experiment 20000111 PARAMETER Experiment Name: At_42deg_Heat_cDNA_P Parameter: Timepoint (hr) Value: 6
  misc_feature: MA Experiment 20000111 PARAMETER Experiment Name: At_42deg_Heat_cDNA_P Parameter: Tissue Value: Aerial
  misc_feature: MA Experiment ID: 20000112 Result: Up-regulated in Transcription
  misc_feature: MA Experiment 20000112 PARAMETER Experiment Name: At_42deg_Heat_cDNA_P Parameter: Temperature (deg C) Value: 42 vs. 22
  misc_feature: MA Experiment 20000112 PARAMETER Experiment Name: At_42deg_Heat_cDNA_P Parameter: Timepoint (hr) Value: 2
  misc_feature: MA Experiment 20000112 PARAMETER Experiment Name: At_42deg_Heat_cDNA_P Parameter: Tissue Value: Aerial
  misc_feature: MA Experiment ID: 20000113 Result: Up-regulated in Transcription
  misc_feature: MA Experiment 20000113 PARAMETER Experiment Name: At_42deg_Heat_cDNA_P Parameter: Temperature (deg C) Value: 42 vs. 22
  misc_feature: MA Experiment 20000113 PARAMETER Experiment Name: At_42deg_Heat_cDNA_P Parameter: Timepoint (hr) Value: 8
  misc_feature: MA Experiment 20000113 PARAMETER Experiment Name: At_42deg_Heat_cDNA_P Parameter: Tissue Value: Aerial
  misc_feature: MA Experiment ID: 20000144 Result: Up-regulated in Transcription
  misc_feature: MA Experiment 20000144 PARAMETER Experiment Name: At_42deg_Heat_cDNA_P Parameter: Temperature (deg C) Value: 42 vs. 22
  misc_feature: MA Experiment 20000144 PARAMETER Experiment Name: At_42deg_Heat_cDNA_P Parameter: Timepoint (hr) Value: 1
  misc_feature: MA Experiment 20000144 PARAMETER Experiment Name: At_42deg_Heat_cDNA_P Parameter: Tissue Value: Aerial
  misc_feature: MA Experiment ID: 20000171 Result: Up-regulated in Transcription
  misc_feature: MA Experiment 20000171 PARAMETER Experiment Name: At_42deg_Heat_P Parameter: Age (day) Value: 14
  misc_feature: MA Experiment 20000171 PARAMETER Experiment Name: At_42deg_Heat_P Parameter: Organism Value: A. thaliana
  misc_feature: MA Experiment 20000171 PARAMETER Experiment Name: At_42deg_Heat_P Parameter: Plant Line Value: WS
  misc_feature: MA Experiment 20000171 PARAMETER Experiment Name: At_42deg_Heat_P Parameter: Temperature (deg C) Value: 42 vs. 22
  misc_feature: MA Experiment 20000171 PARAMETER Experiment Name: At_42deg_Heat_P Parameter: Timepoint (hr) Value: 1
  misc_feature: MA Experiment 20000171 PARAMETER Experiment Name: At_42deg_Heat_P Parameter: Tissue Value: Aerial
  misc_feature: MA Experiment ID: 20000173 Result: Up-regulated in Transcription
  misc_feature: MA Experiment 20000173 PARAMETER Experiment Name: At_42deg_Heat_P Parameter: Age (day) Value: 14
  misc_feature: MA Experiment 20000173 PARAMETER Experiment Name: At_42deg_Heat_P Parameter: Organism Value: A. thaliana
  misc_feature: MA Experiment 20000173 PARAMETER Experiment Name: At_42deg_Heat_P Parameter: Plant Line Value: WS
  misc_feature: MA Experiment 20000173 PARAMETER Experiment Name: At_42deg_Heat_P Parameter: Temperature (deg C) Value: 42 vs. 22
  misc_feature: MA Experiment 20000173 PARAMETER Experiment Name: At_42deg_Heat_P Parameter: Timepoint (hr) Value: 6
  misc_feature: MA Experiment 20000173 PARAMETER Experiment Name: At_42deg_Heat_P Parameter: Tissue Value: Aerial
  misc_feature: MA Experiment ID: 20000224 Result: Up-regulated in Transcription
  misc_feature: MA Experiment ID: 20001248 Result: Down-regulated in Transcription
  misc_feature: MA Experiment 20001248 PARAMETER Experiment Name: At_Far-red-induction_P Parameter: Age (day) Value: 7
  misc_feature: MA Experiment 20001248 PARAMETER Experiment Name: At_Far-red-induction_P Parameter: Light Value: Far-red vs. White
  misc_feature: MA Experiment 20001248 PARAMETER Experiment Name: At_Far-red-induction_P Parameter: Organism Value: A. thaliana
  misc_feature: MA Experiment 20001248 PARAMETER Experiment Name: At_Far-red-induction_P Parameter: Plant Line Value: Columbia
  misc_feature: MA Experiment 20001248 PARAMETER Experiment Name: At_Far-red-induction_P Parameter: Timepoint (hr) Value: 4
  misc_feature: MA Experiment 20001248 PARAMETER Experiment Name: At_Far-red-induction_P Parameter: Tissue Value: Whole Plant
  misc_feature: MA Experiment ID: 20001450 Result: Down-regulated in Transcription
  misc_feature: MA Experiment 20001450 PARAMETER Experiment Name: At_Far-red-induction_P Parameter: Age (day) Value: 7
  misc_feature: MA Experiment 20001450 PARAMETER Experiment Name: At_Far-red-induction_P Parameter: Light Value: Far-red vs. White
  misc_feature: MA Experiment 20001450 PARAMETER Experiment Name: At_Far-red-induction_P Parameter: Organism Value: A. thaliana
  misc_feature: MA Experiment 20001450 PARAMETER Experiment Name: At_Far-red-induction_P Parameter: Plant Line Value: Columbia
  misc_feature: MA Experiment 20001450 PARAMETER Experiment Name: At_Far-red-induction_P Parameter: Timepoint (hr) Value: 8
  misc_feature: MA Experiment 20001450 PARAMETER Experiment Name: At_Far-red-induction_P Parameter: Tissue Value: Whole Plant

SEQ ID NO: 49206 - protein, 718 aa, Arabidopsis thaliana; identical to SEQ ID NO: 36173
  peptide (1)..(718): Ceres Seq. ID no. 12601344
  misc_feature (80)..(675): Pfam Name: Hsp70 protein Pfam Description: Hsp70 protein
  misc_feature (80)..(675): Pfam Name: Hsp70 protein Pfam Description: Hsp70 protein
  misc_feature (80)..(675): Pfam Name: Hsp70 protein Pfam Description: Hsp70 protein
  misc_feature (79)..(666): Homolog of NCBI NO: 23040330 NR Description: hypothetical protein [Trichodesmium erythraeum
  misc_feature (79)..(668): Homolog of NCBI NO: 17230482 NR Description: DnaK-type molecular chaperone [Nostoc sp. PCC
  misc_feature (79)..(668): Homolog of NCBI NO: 3121997 NR Description: Chaperone protein dnaK (Heat shock protein 70)
  misc_feature (64)..(718): Homolog of NCBI NO: 7441862 NR Description: dnaK-type molecular chaperone hsp70b precursor,
  misc_feature (134)..(702): Homolog of NCBI NO: 1708311 NR Description: Stromal 70 kDa heat shock-related protein,
  misc_feature (79)..(666): Homolog of NCBI NO: 23040330 NR Description: hypothetical protein [Trichodesmium erythraeum
  misc_feature (79)..(668): Homolog of NCBI NO: 3121997 NR Description: Chaperone protein dnaK (Heat shock protein 70)
  misc_feature (134)..(702): Homolog of NCBI NO: 1708311 NR Description: Stromal 70 kDa heat shock-related protein,
  misc_feature (64)..(718): Homolog of NCBI NO: 7441862 NR Description: dnaK-type molecular chaperone hsp70b precursor,
  misc_feature (79)..(668): Homolog of NCBI NO: 3121997 NR Description: Chaperone protein dnaK (Heat shock protein 70)
  misc_feature (79)..(668): Homolog of NCBI NO: 17230482 NR Description: DnaK-type molecular chaperone [Nostoc sp. PCC
  misc_feature (79)..(666): Homolog of NCBI NO: 23040330 NR Description: hypothetical protein [Trichodesmium erythraeum
  misc_feature (1)..(718): Homolog of NCBI NO: 7441880 NR Description: dnaK-type molecular chaperone HSC70-9,
  misc_feature (1)..(718): Homolog of NCBI NO: 7441856 NR Description: heat shock protein, 70K, chloroplast - cucumber
  misc_feature (1)..(718): Homolog of NCBI NO: 1928991 NR Description: heat shock protein 70 precursor [Citrullus
  misc_feature (1)..(718): Homolog of NCBI NO: 399942 NR Description: Stromal 70 kDa heat shock-related protein,
  misc_feature (1)..(718): Homolog of NCBI NO: 445605 NR Description: heat shock protein hsp70
  misc_feature (1)..(718): Homolog of NCBI NO: 7441880 NR Description: dnaK-type molecular chaperone HSC70-9,
  misc_feature (1)..(718): Homolog of NCBI NO: 7441856 NR Description: heat shock protein, 70K, chloroplast - cucumber
  misc_feature (1)..(718): Homolog of NCBI NO: 1928991 NR Description: heat shock protein 70 precursor [Citrullus
  misc_feature (1)..(718): Homolog of NCBI NO: 399942 NR Description: Stromal 70 kDa heat shock-related protein,
  misc_feature (1)..(718): Homolog of NCBI NO: 445605 NR Description: heat shock protein hsp70
  misc_feature (134)..(702): Homolog of NCBI NO: 1708311 NR Description: Stromal 70 kDa heat shock-related protein,
  misc_feature (64)..(718): Homolog of NCBI NO: 7441862 NR Description: dnaK-type molecular chaperone hsp70b precursor,
  misc_feature (79)..(668): Homolog of NCBI NO: 17230482 NR Description: DnaK-type molecular chaperone [Nostoc sp. PCC
  misc_feature (1)..(718): Homolog of NCBI NO: 445605 NR Description: heat shock protein hsp70
  misc_feature (1)..(718): Homolog of NCBI NO: 399942 NR Description: Stromal 70 kDa heat shock-related protein,
  misc_feature (1)..(718): Homolog of NCBI NO: 1928991 NR Description: heat shock protein 70 precursor [Citrullus
  misc_feature (1)..(718): Homolog of NCBI NO: 7441856 NR Description: heat shock protein, 70K, chloroplast - cucumber
  misc_feature (1)..(718): Homolog of NCBI NO: 7441880 NR Description: dnaK-type molecular chaperone HSC70-9,

SEQ ID NO: 49207 - protein, 685 aa, Arabidopsis thaliana; identical to SEQ ID NO: 36174
  peptide (1)..(685): Ceres Seq. ID no. 12601345
  misc_feature (47)..(642): Pfam Name: Hsp70 protein Pfam Description: Hsp70 protein
  misc_feature (47)..(642): Pfam Name: Hsp70 protein Pfam Description: Hsp70 protein
  misc_feature (47)..(642): Pfam Name: Hsp70 protein Pfam Description: Hsp70 protein
  misc_feature (46)..(633): Homolog of NCBI NO: 23040330 NR Description: hypothetical protein [Trichodesmium erythraeum
  misc_feature (46)..(635): Homolog of NCBI NO: 17230482 NR Description: DnaK-type molecular chaperone [Nostoc sp. PCC
  misc_feature (46)..(635): Homolog of NCBI NO: 3121997 NR Description: Chaperone protein dnaK (Heat shock protein 70)
  misc_feature (31)..(685): Homolog of NCBI NO: 7441862 NR Description: dnaK-type molecular chaperone hsp70b precursor,
  misc_feature (101)..(669): Homolog of NCBI NO: 1708311 NR Description: Stromal 70 kDa heat shock-related protein,
  misc_feature (46)..(633): Homolog of NCBI NO: 23040330 NR Description: hypothetical protein [Trichodesmium erythraeum
  misc_feature (46)..(635): Homolog of NCBI NO: 3121997 NR Description: Chaperone protein dnaK (Heat shock protein 70)
  misc_feature (101)..(669): Homolog of NCBI NO: 1708311 NR Description: Stromal 70 kDa heat shock-related protein,
  misc_feature (31)..(685): Homolog of NCBI NO: 7441862 NR Description: dnaK-type molecular chaperone hsp70b precursor,
  misc_feature (46)..(635): Homolog of NCBI NO: 3121997 NR Description: Chaperone protein dnaK (Heat shock protein 70)
  misc_feature (46)..(635): Homolog of NCBI NO: 17230482 NR Description: DnaK-type molecular chaperone [Nostoc sp. PCC
  misc_feature (46)..(633): Homolog of NCBI NO: 23040330 NR Description: hypothetical protein [Trichodesmium erythraeum
  misc_feature (1)..(685): Homolog of NCBI NO: 7441880 NR Description: dnaK-type molecular chaperone HSC70-9,
  misc_feature (1)..(685): Homolog of NCBI NO: 7441856 NR Description: heat shock protein, 70K, chloroplast - cucumber
  misc_feature (1)..(685): Homolog of NCBI NO: 1928991 NR Description: heat shock protein 70 precursor [Citrullus
  misc_feature (1)..(685): Homolog of NCBI NO: 399942 NR Description: Stromal 70 kDa heat shock-related protein,
  misc_feature (1)..(685): Homolog of NCBI NO: 445605 NR Description: heat shock protein hsp70
  misc_feature (1)..(685): Homolog of NCBI NO: 7441880 NR Description: dnaK-type molecular chaperone HSC70-9,
  misc_feature (1)..(685): Homolog of NCBI NO: 7441856 NR Description: heat shock protein, 70K, chloroplast - cucumber
  misc_feature (1)..(685): Homolog of NCBI NO: 1928991 NR Description: heat shock protein 70 precursor [Citrullus
  misc_feature (1)..(685): Homolog of NCBI NO: 399942 NR Description: Stromal 70 kDa heat shock-related protein,
  misc_feature (1)..(685): Homolog of NCBI NO: 445605 NR Description: heat shock protein hsp70
  misc_feature (101)..(669): Homolog of NCBI NO: 1708311 NR Description: Stromal 70 kDa heat shock-related protein,
  misc_feature (31)..(685): Homolog of NCBI NO: 7441862 NR Description: dnaK-type molecular chaperone hsp70b precursor,
  misc_feature (46)..(635): Homolog of NCBI NO: 17230482 NR Description: DnaK-type molecular chaperone [Nostoc sp. PCC
  misc_feature (1)..(685): Homolog of NCBI NO: 445605 NR Description: heat shock protein hsp70
  misc_feature (1)..(685): Homolog of NCBI NO: 399942 NR Description: Stromal 70 kDa heat shock-related protein,
  misc_feature (1)..(685): Homolog of NCBI NO: 1928991 NR Description: heat shock protein 70 precursor [Citrullus
  misc_feature (1)..(685): Homolog of NCBI NO: 7441856 NR Description: heat shock protein, 70K, chloroplast - cucumber
  misc_feature (1)..(685): Homolog of NCBI NO: 7441880 NR Description: dnaK-type molecular chaperone HSC70-9,

SEQ ID NO: 49208 - protein, 662 aa, Arabidopsis thaliana; identical to SEQ ID NO: 36175
  peptide (1)..(662): Ceres Seq. ID no. 12601346
  misc_feature (24)..(619): Pfam Name: Hsp70 protein Pfam Description: Hsp70 protein
  misc_feature (24)..(619): Pfam Name: Hsp70 protein Pfam Description: Hsp70 protein
  misc_feature (24)..(619): Pfam Name: Hsp70 protein Pfam Description: Hsp70 protein
  misc_feature (23)..(610): Homolog of NCBI NO: 23040330 NR Description: hypothetical protein [Trichodesmium erythraeum
  misc_feature (23)..(612): Homolog of NCBI NO: 17230482 NR Description: DnaK-type molecular chaperone [Nostoc sp. PCC
  misc_feature (23)..(612): Homolog of NCBI NO: 3121997 NR Description: Chaperone protein dnaK (Heat shock protein 70)
  misc_feature (8)..(662): Homolog of NCBI NO: 7441862 NR Description: dnaK-type molecular chaperone hsp70b precursor,
  misc_feature (78)..(646): Homolog of NCBI NO: 1708311 NR Description: Stromal 70 kDa heat shock-related protein,
  misc_feature (23)..(610): Homolog of NCBI NO: 23040330 NR Description: hypothetical protein [Trichodesmium erythraeum
  misc_feature (23)..(612): Homolog of NCBI NO: 3121997 NR Description: Chaperone protein dnaK (Heat shock protein 70)
  misc_feature (78)..(646): Homolog of NCBI NO: 1708311 NR Description: Stromal 70 kDa heat shock-related protein,
  misc_feature (8)..(662): Homolog of NCBI NO: 7441862 NR Description: dnaK-type molecular chaperone hsp70b precursor,
  misc_feature (23)..(612): Homolog of NCBI NO: 3121997 NR Description: Chaperone protein dnaK (Heat shock protein 70)
  misc_feature (23)..(612): Homolog of NCBI NO: 17230482 NR Description: DnaK-type molecular chaperone [Nostoc sp. PCC
  misc_feature (23)..(610): Homolog of NCBI NO: 23040330 NR Description: hypothetical protein [Trichodesmium erythraeum
  misc_feature (1)..(662): Homolog of NCBI NO: 7441880 NR Description: dnaK-type molecular chaperone HSC70-9,
  misc_feature (1)..(662): Homolog of NCBI NO: 7441856 NR Description: heat shock protein, 70K, chloroplast - cucumber
  misc_feature (1)..(662): Homolog of NCBI NO: 1928991 NR Description: heat shock protein 70 precursor [Citrullus
  misc_feature (1)..(662): Homolog of NCBI NO: 399942 NR Description: Stromal 70 kDa heat shock-related protein,
  misc_feature (1)..(662): Homolog of NCBI NO: 445605 NR Description: heat shock protein hsp70
  misc_feature (1)..(662): Homolog of NCBI NO: 7441880 NR Description: dnaK-type molecular chaperone HSC70-9,
  misc_feature (1)..(662): Homolog of NCBI NO: 7441856 NR Description: heat shock protein, 70K, chloroplast - cucumber
  misc_feature (1)..(662): Homolog of NCBI NO: 1928991 NR Description: heat shock protein 70 precursor [Citrullus
  misc_feature (1)..(662): Homolog of NCBI NO: 399942 NR Description: Stromal 70 kDa heat shock-related protein,
  misc_feature (1)..(662): Homolog of NCBI NO: 445605 NR Description: heat shock protein hsp70
  misc_feature (78)..(646): Homolog of NCBI NO: 1708311 NR Description: Stromal 70 kDa heat shock-related protein,
  misc_feature (8)..(662): Homolog of NCBI NO: 7441862 NR Description: dnaK-type molecular chaperone hsp70b precursor,
  misc_feature (23)..(612): Homolog of NCBI NO: 17230482 NR Description: DnaK-type molecular chaperone [Nostoc sp. PCC
  misc_feature (1)..(662): Homolog of NCBI NO: 445605 NR Description: heat shock protein hsp70
  misc_feature (1)..(662): Homolog of NCBI NO: 399942 NR Description: Stromal 70 kDa heat shock-related protein,
  misc_feature (1)..(662): Homolog of NCBI NO: 1928991 NR Description: heat shock protein 70 precursor [Citrullus
  misc_feature (1)..(662): Homolog of NCBI NO: 7441856 NR Description: heat shock protein, 70K, chloroplast - cucumber
  misc_feature (1)..(662): Homolog of NCBI NO: 7441880 NR Description: dnaK-type molecular chaperone HSC70-9,

SEQ ID NO: 49209 - DNA, 1614 bp, Arabidopsis thaliana
  misc_feature (1)..(1614): Ceres Seq. ID no. 13647099
agcgagagattatgaaattgacttttggccaaaacgctaactttaatcgcaaaagtaagaaaatctagtaaaacagatgctgagagcaaaatctgcgatcttctgctatttccccatttgaaactccaccgttcaagccggtcactgctccaacggaccggcggaacaaggagacaaaaagatgggtgaatctccagatttcataagcgatctacctcaaagcattattgagaatatccttactcggctttcgattagagatgcaataagaacaagtgtattatctagcaaatggagatataaatggtctacactcactgatcttgtctttgatgagaaatgtgtttctccttctaatgaccgttgtgttgttgagactaatcttgtgagattcattactggagtgcttctccttcaccaaggacctatccacaagtttcagctctctacttctttcaaacaatgtcgtccagatattgatcagtggttgctttttctttcgaggaacgggattaaggagcttgttcttaagttaggtgaaggagaattcagggttcctgcatgtctctttaactgtttgaaattgacctgtttggagttatgtcattgtgagtttgatccgcctcagtatttcaaagggttttcgtatctgaagagtttaaaccttcaccagatccttgttgctcctgaggttattgaaagtctgatctcaggatgtccgcttctcgagttcctgtctttgtcttactttgacagtttggttttgagtatatcagctccgaatctcatgtacttgtatctagacggcgaattcaaagacattttcctcgagaatacgcccaagctagttgcaatatcggtttcaatgtacatgcatgaggatgttactgattttgagcagagttcggattataatctcgttaagttccttggtggtgtgccccttcttgagaagctcgtcggttatatctacttcacaaagtacttgagtataggagatgacccgggaaggcttccacttacttacatacatcttaaaactatagaactttaccaagtatgctttgaagatgccgatgaggtgctagttcttcttcgtttggtcactcactctcccaaccttaaagagctcaaagtttcggcttcaccagtccaaccatttcctcttgaagaagaaggttttgaccttttcgaaagagattacttcgactacaaactcccaagccttgaaagcgtgaagataacagacgcctctggcatcagatatgaattggaatttatcagattcttgctgggaacttcaccagttttggagacagtcactgtatcatcaagtttatcagataaagatgcgaaaatggatatggttatcgaattgctcaggtatccacgtgtctctcctcgagctcagctcctcttccttcaagactgaaatctgattccccttctccatctctctccctctctctctttctgttatcatgtctaaacatgttttggtgttgaatctgttggaggaaatatataattgtggaaagataacaaaactgttgaatctgcaggagtgaacttagttgaccaaagatagtaaaaaagagttactacttgtacttg

SEQ ID NO: 49210 - protein, 416 aa, Arabidopsis thaliana
  peptide (1)..(416): Ceres Seq. ID no. 13647100
  misc_feature (1)..(228): Homolog of NCBI NO: 15219624 NR Description: F-box protein family [Arabidopsis thaliana]
  misc_feature (6)..(413): Homolog of NCBI NO: 15241204 NR Description: F-box protein family [Arabidopsis thaliana]
  misc_feature (6)..(413): Homolog of NCBI NO: 15241211 NR Description: F-box protein family [Arabidopsis thaliana]
  misc_feature (2)..(380): Homolog of NCBI NO: 34915238 NR Description: putative ribosomal RNA apurinic site specific
  misc_feature (6)..(413): Homolog of NCBI NO: 18398404 NR Description: F-box protein family [Arabidopsis thaliana]
  misc_feature (6)..(327): Homolog of NCBI NO: 15235074 NR Description: F-box protein family [Arabidopsis thaliana]
  misc_feature (6)..(413): Homolog of NCBI NO: 15241200 NR Description: F-box protein family [Arabidopsis thaliana]
  misc_feature (1)..(412): Homolog of NCBI NO: 34901474 NR Description: OSJNBa0040K22.13 [Oryza sativa (japonica
  misc_feature (1)..(416): Homolog of NCBI NO: 39104588 NR Description: unknown protein [Arabidopsis thaliana]
  misc_feature (1)..(416): Homolog of NCBI NO: 15222887 NR Description: F-box protein family [Arabidopsis thaliana]
MGESPDFISDLPQSIIENILTRLSIRDAIRTSVLSSKWRYKWSTLTDLVFDEKCVSPSNDRCVVETNLVRFITGVLLLHQGPIHKFQLSTSFKQCRPDIDQWLLFLSRNGIKELVLKLGEGEFRVPACLFNCLKLTCLELCHCEFDPPQYFKGFSYLKSLNLHQILVAPEVIESLISGCPLLEFLSLSYFDSLVLSISAPNLMYLYLDGEFKDIFLENTPKLVAISVSMYMHEDVTDFEQSSDYNLVKFLGGVPLLEKLVGYIYFTKYLSIGDDPGRLPLTYIHLKTIELYQVCFEDADEVLVLLRLVTHSPNLKELKVSASPVQPFPLEEEGFDLFERDYFDYKLPSLESVKITDASGIRYELEFIRFLLGTSPVLETVTVSSSLSDKDAKMDMVIELLRYPRVSPRAQLLFLQD

SEQ ID NO: 49211 - protein, 214 aa, Arabidopsis thaliana
  peptide (1)..(214): Ceres Seq. ID no. 13647101
  misc_feature (1)..(26): Homolog of NCBI NO: 15219624 NR Description: F-box protein family [Arabidopsis thaliana]
  misc_feature (1)..(211): Homolog of NCBI NO: 15241204 NR Description: F-box protein family [Arabidopsis thaliana]
  misc_feature (1)..(211): Homolog of NCBI NO: 15241211 NR Description: F-box protein family [Arabidopsis thaliana]
  misc_feature (1)..(178): Homolog of NCBI NO: 34915238 NR Description: putative ribosomal RNA apurinic site specific
  misc_feature (1)..(211): Homolog of NCBI NO: 18398404 NR Description: F-box protein family [Arabidopsis thaliana]
  misc_feature (1)..(125): Homolog of NCBI NO: 15235074 NR Description: F-box protein family [Arabidopsis thaliana]
  misc_feature (1)..(211): Homolog of NCBI NO: 15241200 NR Description: F-box protein family [Arabidopsis thaliana]
  misc_feature (1)..(210): Homolog of NCBI NO: 34901474 NR Description: OSJNBa0040K22.13 [Oryza sativa (japonica
  misc_feature (1)..(214): Homolog of NCBI NO: 39104588 NR Description: unknown protein [Arabidopsis thaliana]
  misc_feature (1)..(214): Homolog of NCBI NO: 15222887 NR Description: F-box protein family [Arabidopsis thaliana]
MYLYLDGEFKDIFLENTPKLVAISVSMYMHEDVTDFEQSSDYNLVKFLGGVPLLEKLVGYIYFTKYLSIGDDPGRLPLTYIHLKTIELYQVCFEDADEVLVLLRLVTHSPNLKELKVSASPVQPFPLEEEGFDLFERDYFDYKLPSLESVKITDASGIRYELEFIRFLLGTSPVLETVTVSSSLSDKDAKMDMVIELLRYPRVSPRAQLLFLQD

SEQ ID NO: 49212 - DNA, 1426 bp, Arabidopsis thaliana; identical to SEQ ID NO: 41458
  misc_feature (1)..(1426): Ceres Seq. ID no. 12329714
  misc_feature: MA Experiment ID: 20000179 Result: Up-regulated in Transcription
  misc_feature: MA Experiment 20000179 PARAMETER Experiment Name: At_Germinating_Seeds_P Parameter: Age (hr) Value: 6 vs. 0
  misc_feature: MA Experiment 20000179 PARAMETER Experiment Name: At_Germinating_Seeds_P Parameter: Tissue Value: Germinating Seeds
  misc_feature: MA Experiment ID: 20000180 Result: Up-regulated in Transcription
  misc_feature: MA Experiment 20000180 PARAMETER Experiment Name: At_Germinating_Seeds_P Parameter: Age (hr) Value: 24 vs. 0
  misc_feature: MA Experiment 20000180 PARAMETER Experiment Name: At_Germinating_Seeds_P Parameter: Tissue Value: Germinating Seeds
  misc_feature: MA Experiment ID: 20000185 Result: Down-regulated in Transcription
  misc_feature: MA Experiment 20000185 PARAMETER Experiment Name: At_Roots__P Parameter: Age (day) Value: 7 vs. 21
  misc_feature: MA Experiment 20000185 PARAMETER Experiment Name: At_Roots__P Parameter: Organism Value: A. thaliana
  misc_feature: MA Experiment 20000185 PARAMETER Experiment Name: At_Roots__P Parameter: Tissue Value: Roots vs. Whole Plant
  misc_feature: MA Experiment ID: 20000214 Result: Up-regulated in Transcription
  misc_feature: MA Experiment 20000214 PARAMETER Experiment Name: At_4deg_Cold_P Parameter: Timepoint (hr) Value: 6
  misc_feature: MA Experiment ID: 20000264 Result: Down-regulated in Transcription
  misc_feature: MA Experiment 20000264 PARAMETER Experiment Name: At_Open_Flower_P Parameter: Age (day) Value: 21
  misc_feature: MA Experiment 20000264 PARAMETER Experiment Name: At_Open_Flower_P Parameter: Plant Line Value: WS
  misc_feature: MA Experiment 20000264 PARAMETER Experiment Name: At_Open_Flower_P Parameter: Tissue Value: Open Flower vs. Whole Plant
  misc_feature: MA Experiment ID: 20000269 Result: Down-regulated in Transcription
  misc_feature: MA Experiment 20000269 PARAMETER Experiment Name: At_1mM_KNO3_L-vs-H_Roots_P Parameter: Age (day) Value: 7,10,12
  misc_feature: MA Experiment 20000269 PARAMETER Experiment Name: At_1mM_KNO3_L-vs-H_Roots_P Parameter: Organism Value: A. thaliana
  misc_feature: MA Experiment 20000269 PARAMETER Experiment Name: At_1mM_KNO3_L-vs-H_Roots_P Parameter: Plant Line Value: WS
  misc_feature: MA Experiment 20000269 PARAMETER Experiment Name: At_1mM_KNO3_L-vs-H_Roots_P Parameter: Timepoint (day) Value: 7,10,12
  misc_feature: MA Experiment 20000269 PARAMETER Experiment Name: At_1mM_KNO3_L-vs-H_Roots_P Parameter: Tissue Value: Roots
  misc_feature: MA Experiment 20000269 PARAMETER Experiment Name: At_1mM_KNO3_L-vs-H_Roots_P Parameter: Treatment Value: 1mM KNO3 vs. 50mM KNO3
  misc_feature: MA Experiment ID: 20000286 Result: Down-regulated in Transcription
  misc_feature: MA Experiment 20000286 PARAMETER Experiment Name: At_Open_Flower_P Parameter: Age (day) Value: 21
  misc_feature: MA Experiment 20000286 PARAMETER Experiment Name: At_Open_Flower_P Parameter: Plant Line Value: WS
  misc_feature: MA Experiment 20000286 PARAMETER Experiment Name: At_Open_Flower_P Parameter: Tissue Value: Half Open vs. Whole Plant
  misc_feature: MA Experiment ID: 20000437 Result: Down-regulated in Transcription
  misc_feature: MA Experiment 20000437 PARAMETER Experiment Name: At_Drought_P Parameter: Age (day) Value: 8
  misc_feature: MA Experiment 20000437 PARAMETER Experiment Name: At_Drought_P Parameter: Organism Value: A. thaliana
  misc_feature: MA Experiment 20000437 PARAMETER Experiment Name: At_Drought_P Parameter: Plant Line Value: WS
  misc_feature: MA Experiment 20000437 PARAMETER Experiment Name: At_Drought_P Parameter: Timepoint (hr) Value: 24
  misc_feature: MA Experiment 20000437 PARAMETER Experiment Name: At_Drought_P Parameter: Tissue Value: Whole Plant
  misc_feature: MA Experiment 20000437 PARAMETER Experiment Name: At_Drought_P Parameter: Treatment Value: Drought vs. No Drought
  misc_feature: MA Experiment ID: 20000439 Result: Down-regulated in Transcription
  misc_feature: MA Experiment 20000439 PARAMETER Experiment Name: At_Roots__P Parameter: Age (day) Value: 14 vs. 21
  misc_feature: MA Experiment 20000439 PARAMETER Experiment Name: At_Roots__P Parameter: Organism Value: A. thaliana
  misc_feature: MA Experiment 20000439 PARAMETER Experiment Name: At_Roots__P Parameter: Tissue Value: Roots vs. Whole Plant
  misc_feature: MA Experiment ID: 20000794 Result: Down-regulated in Transcription
  misc_feature: MA Experiment 20000794 PARAMETER Experiment Name: At_Petals_P Parameter: Age (day) Value: 23-25 days
  misc_feature: MA Experiment 20000794 PARAMETER Experiment Name: At_Petals_P Parameter: Plant Line Value: WS
  misc_feature: MA Experiment 20000794 PARAMETER Experiment Name: At_Petals_P Parameter: Tissue Value: Petals vs. Whole plant
  misc_feature: MA Experiment ID: 20001450 Result: Down-regulated in Transcription
  misc_feature: MA Experiment 20001450 PARAMETER Experiment Name: At_Far-red-induction_P Parameter: Age (day) Value: 7
  misc_feature: MA Experiment 20001450 PARAMETER Experiment Name: At_Far-red-induction_P Parameter: Light Value: Far-red vs. White
  misc_feature: MA Experiment 20001450 PARAMETER Experiment Name: At_Far-red-induction_P Parameter: Organism Value: A. thaliana
  misc_feature: MA Experiment 20001450 PARAMETER Experiment Name: At_Far-red-induction_P Parameter: Plant Line Value: Columbia
  misc_feature: MA Experiment 20001450 PARAMETER Experiment Name: At_Far-red-induction_P Parameter: Timepoint (hr) Value: 8
  misc_feature: MA Experiment 20001450 PARAMETER Experiment Name: At_Far-red-induction_P Parameter: Tissue Value: Whole Plant
  misc_feature: MA Experiment ID: 20001557 Result: Down-regulated in Transcription
  misc_feature: MA Experiment 20001557 PARAMETER Experiment Name: At_Drought_Soil_Dry_P Parameter: Age (day) Value: 27
  misc_feature: MA Experiment 20001557 PARAMETER Experiment Name: At_Drought_Soil_Dry_P Parameter: Organism Value: A. thaliana
  misc_feature: MA Experiment 20001557 PARAMETER Experiment Name: At_Drought_Soil_Dry_P Parameter: Plant Line Value: WS
  misc_feature: MA Experiment 20001557 PARAMETER Experiment Name: At_Drought_Soil_Dry_P Parameter: Post Timepoint (hr) Value: 3
  misc_feature: MA Experiment 20001557 PARAMETER Experiment Name: At_Drought_Soil_Dry_P Parameter: Post-Treatment Value: Re-Water vs. No Drought
  misc_feature: MA Experiment 20001557 PARAMETER Experiment Name: At_Drought_Soil_Dry_P Parameter: Timepoint (day) Value: 13
  misc_feature: MA Experiment 20001557 PARAMETER Experiment Name: At_Drought_Soil_Dry_P Parameter: Treatment Value: Drought vs. No Drought

SEQ ID NO: 49213 - protein, 360 aa, Arabidopsis thaliana; identical to SEQ ID NO: 41459
  peptide (1)..(360): Ceres Seq. ID no. 12329715
  misc_feature (208)..(330): Pfam Name: Oxidoreductase NAD-binding domain Pfam Description: Oxidoreductase NAD-binding domain
  misc_feature (208)..(330): Pfam Name: Oxidoreductase NAD-binding domain Pfam Description: Oxidoreductase NAD-binding domain
  misc_feature (54)..(360): Homolog of NCBI NO: 4930123 NR Description: Chain A, Wild-Type Pea Fnr
  misc_feature (1)..(360): Homolog of NCBI NO: 3913651 NR Description: Ferredoxin--NADP reductase, leaf-type isozyme,
  misc_feature (1)..(360): Homolog of NCBI NO: 119906 NR Description: Ferredoxin--NADP reductase, chloroplast precursor
  misc_feature (1)..(360): Homolog of NCBI NO: 170111 NR Description: ferredoxin-NADP oxidoreductase
  misc_feature (1)..(360): Homolog of NCBI NO: 729477 NR Description: Ferredoxin--NADP reductase, chloroplast precursor
  misc_feature (54)..(360): Homolog of NCBI NO: 4930123 NR Description: Chain A, Wild-Type Pea Fnr
  misc_feature (1)..(360): Homolog of NCBI NO: 119906 NR Description: Ferredoxin--NADP reductase, chloroplast precursor
  misc_feature (1)..(360): Homolog of NCBI NO: 729477 NR Description: Ferredoxin--NADP reductase, chloroplast precursor
  misc_feature (1)..(360): Homolog of NCBI NO: 15239282 NR Description: ferredoxin-NADP+ reductase
  misc_feature (1)..(360): Homolog of NCBI NO: 5730139 NR Description: ferredoxin-NADP+ reductase [Arabidopsis thaliana]
  misc_feature (1)..(360): Homolog of NCBI NO: 729479 NR Description: Ferredoxin--NADP reductase, chloroplast precursor
  misc_feature (1)..(360): Homolog of NCBI NO: 119905 NR Description: Ferredoxin--NADP reductase, leaf isozyme,
  misc_feature (1)..(360): Homolog of NCBI NO: 6899972 NR Description: chloroplast ferredoxin-NADP+ oxidoreductase
  misc_feature (1)..(360): Homolog of NCBI NO: 170111 NR Description: ferredoxin-NADP oxidoreductase
  misc_feature (1)..(360): Homolog of NCBI NO: 3913651 NR Description: Ferredoxin--NADP reductase, leaf-type isozyme,
  misc_feature (1)..(360): Homolog of NCBI NO: 6899972 NR Description: chloroplast ferredoxin-NADP+ oxidoreductase
  misc_feature (1)..(360): Homolog of NCBI NO: 119905 NR Description: Ferredoxin--NADP reductase, leaf isozyme,
  misc_feature (1)..(360): Homolog of NCBI NO: 729479 NR Description: Ferredoxin--NADP reductase, chloroplast precursor
  misc_feature (1)..(360): Homolog of NCBI NO: 5730139 NR Description: ferredoxin-NADP+ reductase [Arabidopsis thaliana]
  misc_feature (1)..(360): Homolog of NCBI NO: 15239282 NR Description: ferredoxin-NADP+ reductase

SEQ ID NO: 49214 - DNA, 1573 bp, Arabidopsis thaliana
  misc_feature (1)..(1573): Ceres Seq. ID no. 13600765
  misc_feature: MA Experiment ID: 108461 Result: Up-regulated in Transcription
  misc_feature: MA Experiment 108461 PARAMETER Experiment Name: At_Germinating_Seeds_cDNA_P Parameter: Age (day) Value: 1 vs. 0
  misc_feature: MA Experiment 108461 PARAMETER Experiment Name: At_Germinating_Seeds_cDNA_P Parameter: Tissue Value: Germinating Seeds
  misc_feature: MA Experiment ID: 108463 Result: Up-regulated in Transcription
  misc_feature: MA Experiment 108463 PARAMETER Experiment Name: At_Germinating_Seeds_cDNA_P Parameter: Age (day) Value: 3 vs. 0
  misc_feature: MA Experiment 108463 PARAMETER Experiment Name: At_Germinating_Seeds_cDNA_P Parameter: Tissue Value: Germinating Seeds
  misc_feature: MA Experiment ID: 108488 Result: Down-regulated in Transcription
  misc_feature: MA Experiment ID: 108573 Result: Up-regulated in Transcription
  misc_feature: MA Experiment 108573 PARAMETER Experiment Name: At_Drought_cDNA_P Parameter: Timepoint (hr) Value: 6
  misc_feature: MA Experiment 108573 PARAMETER Experiment Name: At_Drought_cDNA_P Parameter: Tissue Value: Aerial
  misc_feature: MA Experiment 108573 PARAMETER Experiment Name: At_Drought_cDNA_P Parameter: Treatment Value: Drought vs. No Drought
  misc_feature: MA Experiment ID: 108608 Result: Down-regulated in Transcription
  misc_feature: MA Experiment 108608 PARAMETER Experiment Name: At_100uM_ABA_cDNA_P Parameter: Timepoint (hr) Value: 1
  misc_feature: MA Experiment 108608 PARAMETER Experiment Name: At_100uM_ABA_cDNA_P Parameter: Tissue Value: Aerial
  misc_feature: MA Experiment 108608 PARAMETER Experiment Name: At_100uM_ABA_cDNA_P Parameter: Treatment Value: 100uM ABA vs. No Treatment
  misc_feature: MA Experiment ID: 20000070 Result: Up-regulated in Transcription
  misc_feature: MA Experiment 20000070 PARAMETER Experiment Name: At_100uM_ABA_Mutants_cDNA_P Parameter: Plant Line Value: CS24
  misc_feature: MA Experiment 20000070 PARAMETER Experiment Name: At_100uM_ABA_Mutants_cDNA_P Parameter: Timepoint (hr) Value: 6
  misc_feature: MA Experiment 20000070 PARAMETER Experiment Name: At_100uM_ABA_Mutants_cDNA_P Parameter: Tissue Value: Aerial
  misc_feature: MA Experiment 20000070 PARAMETER Experiment Name: At_100uM_ABA_Mutants_cDNA_P Parameter: Treatment Value: 100uM ABA vs. No Treatment
  misc_feature: MA Experiment ID: 20000071 Result: Up-regulated in Transcription
  misc_feature: MA Experiment 20000071 PARAMETER Experiment Name: At_100uM_ABA_Mutants_cDNA_P Parameter: Plant Line Value: CS8104
  misc_feature: MA Experiment 20000071 PARAMETER Experiment Name: At_100uM_ABA_Mutants_cDNA_P Parameter: Timepoint (hr) Value: 6
  misc_feature: MA Experiment 20000071 PARAMETER Experiment Name: At_100uM_ABA_Mutants_cDNA_P Parameter: Tissue Value: Aerial
  misc_feature: MA Experiment 20000071 PARAMETER Experiment Name: At_100uM_ABA_Mutants_cDNA_P Parameter: Treatment Value: 100uM ABA vs. No Treatment
  misc_feature: MA Experiment ID: 20000072 Result: Up-regulated in Transcription
  misc_feature: MA Experiment 20000072 PARAMETER Experiment Name: At_100uM_ABA_Mutants_cDNA_P Parameter: Plant Line Value: CS8105
  misc_feature: MA Experiment 20000072 PARAMETER Experiment Name: At_100uM_ABA_Mutants_cDNA_P Parameter: Timepoint (hr) Value: 6
  misc_feature: MA Experiment 20000072 PARAMETER Experiment Name: At_100uM_ABA_Mutants_cDNA_P Parameter: Tissue Value: Aerial
  misc_feature: MA Experiment 20000072 PARAMETER Experiment Name: At_100uM_ABA_Mutants_cDNA_P Parameter: Treatment Value: 100uM ABA vs. No Treatment
  misc_feature: MA Experiment ID: 20000086 Result: Up-regulated in Transcription
  misc_feature: MA Experiment 20000086 PARAMETER Experiment Name: At_100uM_ABA_Mutants_cDNA_P Parameter: Plant Line Value: CS22
  misc_feature: MA Experiment 20000086 PARAMETER Experiment Name: At_100uM_ABA_Mutants_cDNA_P Parameter: Timepoint (hr) Value: 6
  misc_feature: MA Experiment 20000086 PARAMETER Experiment Name: At_100uM_ABA_Mutants_cDNA_P Parameter: Tissue Value: Aerial
  misc_feature: MA Experiment 20000086 PARAMETER Experiment Name: At_100uM_ABA_Mutants_cDNA_P Parameter: Treatment Value: 100uM ABA vs. No Treatment
  misc_feature: MA Experiment ID: 20000088 Result: Up-regulated in Transcription
  misc_feature: MA Experiment 20000088 PARAMETER Experiment Name: At_100uM_ABA_Mutants_cDNA_P Parameter: Plant Line Value: Landsberg
  misc_feature: MA Experiment 20000088 PARAMETER Experiment Name: At_100uM_ABA_Mutants_cDNA_P Parameter: Timepoint (hr) Value: 6
  misc_feature: MA Experiment 20000088 PARAMETER Experiment Name: At_100uM_ABA_Mutants_cDNA_P Parameter: Tissue Value: Aerial
  misc_feature: MA Experiment 20000088 PARAMETER Experiment Name: At_100uM_ABA_Mutants_cDNA_P Parameter: Treatment Value: 100uM ABA vs. No Treatment
  misc_feature: MA Experiment ID: 20000307 Result: Up-regulated in Transcription
  misc_feature: MA Experiment 20000307 PARAMETER Experiment Name: At_Germinating_Seeds_Sub_P Parameter: Age (hr) Value: 24 vs. 0
  misc_feature: MA Experiment 20000307 PARAMETER Experiment Name: At_Germinating_Seeds_Sub_P Parameter: Organism Value: A. thaliana
  misc_feature: MA Experiment 20000307 PARAMETER Experiment Name: At_Germinating_Seeds_Sub_P Parameter: Plant Line Value: WS
  misc_feature: MA Experiment 20000307 PARAMETER Experiment Name: At_Germinating_Seeds_Sub_P Parameter: Tissue Value: Germinating Seeds
  misc_feature: MA Experiment ID: 20000328 Result: Down-regulated in Transcription
  misc_feature: MA Experiment 20000328 PARAMETER Experiment Name: At_42deg_Heat_Sub_P Parameter: Age (day) Value: 14
  misc_feature: MA Experiment 20000328 PARAMETER Experiment Name: At_42deg_Heat_Sub_P Parameter: Organism Value: A. thaliana
  misc_feature: MA Experiment 20000328 PARAMETER Experiment Name: At_42deg_Heat_Sub_P Parameter: Plant Line Value: WS
  misc_feature: MA Experiment 20000328 PARAMETER Experiment Name: At_42deg_Heat_Sub_P Parameter: Temperature (deg C) Value: 42 vs. 22
  misc_feature: MA Experiment 20000328 PARAMETER Experiment Name: At_42deg_Heat_Sub_P Parameter: Timepoint (hr) Value: 6
  misc_feature: MA Experiment 20000328 PARAMETER Experiment Name: At_42deg_Heat_Sub_P Parameter: Tissue Value: Aerial
  misc_feature: MA Experiment ID: 20000349 Result: Up-regulated in Transcription
  misc_feature: MA Experiment 20000349 PARAMETER Experiment Name: At_100uM_ABA_Sub_P Parameter: Age (day) Value: 14
  misc_feature: MA Experiment 20000349 PARAMETER Experiment Name: At_100uM_ABA_Sub_P Parameter: Organism Value: A. thaliana
  misc_feature: MA Experiment 20000349 PARAMETER Experiment Name: At_100uM_ABA_Sub_P Parameter: Plant Line Value: WS
  misc_feature: MA Experiment 20000349 PARAMETER Experiment Name: At_100uM_ABA_Sub_P Parameter: Timepoint (hr) Value: 6
  misc_feature: MA Experiment 20000349 PARAMETER Experiment Name: At_100uM_ABA_Sub_P Parameter: Tissue Value: Aerial
  misc_feature: MA Experiment 20000349 PARAMETER Experiment Name: At_100uM_ABA_Sub_P Parameter: Treatment Value: 100uM ABA vs. No Treatment
  misc_feature: MA Experiment ID: 20000355 Result: Down-regulated in Transcription
  misc_feature: MA Experiment 20000355 PARAMETER Experiment Name: At_Siliques_Sub_P Parameter: Age (day) Value: 21
  misc_feature: MA Experiment 20000355 PARAMETER Experiment Name: At_Siliques_Sub_P Parameter: Organism Value: A. thaliana
  misc_feature: MA Experiment 20000355 PARAMETER Experiment Name: At_Siliques_Sub_P Parameter: Plant Line Value: WS
  misc_feature: MA Experiment 20000355 PARAMETER Experiment Name: At_Siliques_Sub_P Parameter: Tissue Value: Less Than 5mm Siliques vs. Whole Plant
acaagtaaactctctctgattctctctttctctctttctctcgctctctatctctctctctcctctgtttgttatatcaattaatcaagaagatttcttgtgtttttttttctgaaaaagaagatttcttgagagaaaataaggtggattgaaggattatcctttaagaatggtggtggaggaggagaatagaagcatggaggaaggacttcttcagcatcaaaacgacagagatgatcgtcgtatcacagcttgtgtcatcctcagcacttttgtcgctgtttgtagtgccttcagctacggatgtgccgctggttatacttcaggcgctgagactgctatcatgaaggagttagacctttctatggcacaattttcagcgtttggctcctttctgaatgtgggaggtgcggtgggggccttgttcagcggtcaattggcagtcatcctcggcagaagacgaacgttgtgggcatgcgattttttctgcgtttttggctggctctccattgctttcgcaaagaatgtcttctggctggacttgggaagaatttccttgggcataggagtcggcttgattagctacgtggtcccagtctatattgcggaaatcactccaaaacatgttcgtggcgcatttactgcttcaaaccagcttcttcaaaacagtggagtttccctgatttatttttttgggactgtaattaattggcgggttatggccgttataggtgcaattccatgcatccttcaaacgatcggtatattttttataccggaatctccaagatggctggctaaaatccgtttaagtaaagaagtagaaagttctttgcatcgacttagagggaaagatactgatgtttcaggtgaagcagctgaaattcaggttatgacaaaaatgcttgaagaagattcaaagtctagtttctctgacatgtttcagaagaagtacagacgaactcttgtggttggaattggtttaatgttgatacaacaattatctggagctagcggtatcacatattattcaaatgccatatttagaaaagctggcttttcagagagacttggatcaatgatatttggtgtgttcgtgatcccaaaagctttggttggtctgattcttgtggatagatggggaagacgaccactcctattggcttctgctgttggaatgtccatcggatccttgcttattggagttagcttcacgttacagcaaatgaatgtgcttcctgaattgatcccaattttcgtcttcgtaaacattctggtctacttcggatgttttgcattcggtataggagggctaccttgggtcattatgtctgagatctttccgataaatataaaagtttcagcaggaacaattgtagcattaacatcatggactagtgggtggttcgtgagttacgctttcaactttatgtttgaatggagcgcacaaggaacattttacatatttgcggctgtcggaggaatgtcattcatttttatttggatgctcgtaccggaaaccaaaggacaatcattggaagaattacaagcttcgcttacggggacatcctaa

SEQ ID NO: 49215 - protein, 467 aa, Arabidopsis thaliana
  peptide (1)..(467): Ceres Seq. ID no. 13600766
  misc_feature (32)..(412): Pfam Name: Sugar (and other) transporter Pfam Description: Sugar (and other) transporter
  misc_feature (32)..(412): Pfam Name: Sugar (and other) transporter Pfam Description: Sugar (and other) transporter
  misc_feature (184)..(467): Homolog of NCBI NO: 15081630 NR Description: AT3g05160/T12H1_13 [Arabidopsis thaliana]
  misc_feature (389)..(460): Homolog of NCBI NO: 6729026 NR Description: putative sugar transporter [Arabidopsis thaliana]
  misc_feature (1)..(310): Homolog of NCBI NO: 6729026 NR Description: putative sugar transporter [Arabidopsis thaliana]
  misc_feature (2)..(463): Homolog of NCBI NO: 18421106 NR Description: sugar-porter family protein 1 [Arabidopsis
  misc_feature (2)..(463): Homolog of NCBI NO: 14585699 NR Description: sugar-porter family protein 1 [Arabidopsis
  misc_feature (184)..(467): Homolog of NCBI NO: 15081630 NR Description: AT3g05160/T12H1_13 [Arabidopsis thaliana]
  misc_feature (1)..(310): Homolog of NCBI NO: 6729026 NR Description: putative sugar transporter [Arabidopsis thaliana]
  misc_feature (2)..(463): Homolog of NCBI NO: 14585699 NR Description: sugar-porter family protein 1 [Arabidopsis
  misc_feature (1)..(467): Homolog of NCBI NO: 18397141 NR Description: sugar transporter, putative [Arabidopsis thaliana]
  misc_feature (1)..(433): Homolog of NCBI NO: 20260272 NR Description: putative sugar transporter [Arabidopsis thaliana]
  misc_feature (10)..(467): Homolog of NCBI NO: 18397139 NR Description: sugar transporter, putative [Arabidopsis
  misc_feature (2)..(412): Homolog of NCBI NO: 6729026 NR Description: putative sugar transporter [Arabidopsis thaliana]
  misc_feature (1)..(463): Homolog of NCBI NO: 18421108 NR Description: sugar-porter family protein 2 [Arabidopsis
  misc_feature (2)..(463): Homolog of NCBI NO: 18421106 NR Description: sugar-porter family protein 1 [Arabidopsis
  misc_feature (389)..(460): Homolog of NCBI NO: 6729026 NR Description: putative sugar transporter [Arabidopsis thaliana]
  misc_feature (1)..(463): Homolog of NCBI NO: 18421108 NR Description: sugar-porter family protein 2 [Arabidopsis
  misc_feature (2)..(412): Homolog of NCBI NO: 6729026 NR Description: putative sugar transporter [Arabidopsis thaliana]
  misc_feature (10)..(467): Homolog of NCBI NO: 18397139 NR Description: sugar transporter, putative [Arabidopsis
  misc_feature (1)..(433): Homolog of NCBI NO: 20260272 NR Description: putative sugar transporter [Arabidopsis thaliana]
  misc_feature (1)..(467): Homolog of NCBI NO: 18397141 NR Description: sugar transporter, putative [Arabidopsis thaliana]
MVVEEENRSMEEGLLQHQNDRDDRRITACVILSTFVAVCSAFSYGCAAGYTSGAETAIMKELDLSMAQFSAFGSFLNVGGAVGALFSGQLAVILGRRRTLWACDFFCVFGWLSIAFAKNVFWLDLGRISLGIGVGLISYVVPVYIAEITPKHVRGAFTASNQLLQNSGVSLIYFFGTVINWRVMAVIGAIPCILQTIGIFFIPESPRWLAKIRLSKEVESSLHRLRGKDTDVSGEAAEIQVMTKMLEEDSKSSFSDMFQKKYRRTLVVGIGLMLIQQLSGASGITYYSNAIFRKAGFSERLGSMIFGVFVIPKALVGLILVDRWGRRPLLLASAVGMSIGSLLIGVSFTLQQMNVLPELIPIFVFVNILVYFGCFAFGIGGLPWVIMSEIFPINIKVSAGTIVALTSWTSGWFVSYAFNFMFEWSAQGTFYIFAAVGGMSFIFIWMLVPETKGQSLEELQASLTGTS

SEQ ID NO: 49216 - protein, 458 aa, Arabidopsis thaliana
  peptide (1)..(458): Ceres Seq. ID no. 13600767
  misc_feature (23)..(403): Pfam Name: Sugar (and other) transporter Pfam Description: Sugar (and other) transporter
  misc_feature (23)..(403): Pfam Name: Sugar (and other) transporter Pfam Description: Sugar (and other) transporter
  misc_feature (175)..(458): Homolog of NCBI NO: 15081630 NR Description: AT3g05160/T12H1_13 [Arabidopsis thaliana]
  misc_feature (380)..(451): Homolog of NCBI NO: 6729026 NR Description: putative sugar transporter [Arabidopsis thaliana]
  misc_feature (1)..(301): Homolog of NCBI NO: 6729026 NR Description: putative sugar transporter [Arabidopsis thaliana]
  misc_feature (1)..(454): Homolog of NCBI NO: 18421106 NR Description: sugar-porter family protein 1 [Arabidopsis
  misc_feature (1)..(454): Homolog of NCBI NO: 14585699 NR Description: sugar-porter family protein 1 [Arabidopsis
  misc_feature (175)..(458): Homolog of NCBI NO: 15081630 NR Description: AT3g05160/T12H1_13 [Arabidopsis thaliana]
  misc_feature (1)..(301): Homolog of NCBI NO: 6729026 NR Description: putative sugar transporter [Arabidopsis thaliana]
  misc_feature (1)..(454): Homolog of NCBI NO: 14585699 NR Description: sugar-porter family protein 1 [Arabidopsis
  misc_feature (1)..(458): Homolog of NCBI NO: 18397141 NR Description: sugar transporter, putative [Arabidopsis thaliana]
  misc_feature (1)..(424): Homolog of NCBI NO: 20260272 NR Description: putative sugar transporter [Arabidopsis thaliana]
  misc_feature (1)..(458): Homolog of NCBI NO: 18397139 NR Description: sugar transporter, putative [Arabidopsis
  misc_feature (1)..(403): Homolog of NCBI NO: 6729026 NR Description: putative sugar transporter [Arabidopsis thaliana]
  misc_feature (1)..(454): Homolog of NCBI NO: 18421108 NR Description: sugar-porter family protein 2 [Arabidopsis
  misc_feature (1)..(454): Homolog of NCBI NO: 18421106 NR Description: sugar-porter family protein 1 [Arabidopsis
  misc_feature (380)..(451): Homolog of NCBI NO: 6729026 NR Description: putative sugar transporter [Arabidopsis thaliana]
  misc_feature (1)..(454): Homolog of NCBI NO: 18421108 NR Description: sugar-porter family protein 2 [Arabidopsis
  misc_feature (1)..(403): Homolog of NCBI NO: 6729026 NR Description: putative sugar transporter [Arabidopsis thaliana]
  misc_feature (1)..(458): Homolog of NCBI NO: 18397139 NR Description: sugar transporter, putative [Arabidopsis
  misc_feature (1)..(424): Homolog of NCBI NO: 20260272 NR Description: putative sugar transporter [Arabidopsis thaliana]
  misc_feature (1)..(458): Homolog of NCBI NO: 18397141 NR Description: sugar transporter, putative [Arabidopsis thaliana]
MEEGLLQHQNDRDDRRITACVILSTFVAVCSAFSYGCAAGYTSGAETAIMKELDLSMAQFSAFGSFLNVGGAVGALFSGQLAVILGRRRTLWACDFFCVFGWLSIAFAKNVFWLDLGRISLGIGVGLISYVVPVYIAEITPKHVRGAFTASNQLLQNSGVSLIYFFGTVINWRVMAVIGAIPCILQTIGIFFIPESPRWLAKIRLSKEVESSLHRLRGKDTDVSGEAAEIQVMTKMLEEDSKSSFSDMFQKKYRRTLVVGIGLMLIQQLSGASGITYYSNAIFRKAGFSERLGSMIFGVFVIPKALVGLILVDRWGRRPLLLASAVGMSIGSLLIGVSFTLQQMNVLPELIPIFVFVNILVYFGCFAFGIGGLPWVIMSEIFPINIKVSAGTIVALTSWTSGWFVSYAFNFMFEWSAQGTFYIFAAVGGMSFIFIWMLVPETKGQSLEELQASLTGTS

SEQ ID NO: 49217 - protein, 409 aa, Arabidopsis thaliana
  peptide (1)..(409): Ceres Seq. ID no. 13600768
  misc_feature (1)..(354): Pfam Name: Sugar (and other) transporter Pfam Description: Sugar (and other) transporter
  misc_feature (1)..(354): Pfam Name: Sugar (and other) transporter Pfam Description: Sugar (and other) transporter
  misc_feature (126)..(409): Homolog of NCBI NO: 15081630 NR Description: AT3g05160/T12H1_13 [Arabidopsis thaliana]
  misc_feature (331)..(402): Homolog of NCBI NO: 6729026 NR Description: putative sugar transporter [Arabidopsis thaliana]
  misc_feature (1)..(252): Homolog of NCBI NO: 6729026 NR Description: putative sugar transporter [Arabidopsis thaliana]
  misc_feature (1)..(405): Homolog of NCBI NO: 18421106 NR Description: sugar-porter family protein 1 [Arabidopsis
  misc_feature (1)..(405): Homolog of NCBI NO: 14585699 NR Description: sugar-porter family protein 1 [Arabidopsis
  misc_feature (126)..(409): Homolog of NCBI NO: 15081630 NR Description: AT3g05160/T12H1_13 [Arabidopsis thaliana]
  misc_feature (1)..(252): Homolog of NCBI NO: 6729026 NR Description: putative sugar transporter [Arabidopsis thaliana]
  misc_feature (1)..(405): Homolog of NCBI NO: 14585699 NR Description: sugar-porter family protein 1 [Arabidopsis
  misc_feature (1)..(409): Homolog of NCBI NO: 18397141 NR Description: sugar transporter, putative [Arabidopsis thaliana]
  misc_feature (1)..(375): Homolog of NCBI NO: 20260272 NR Description: putative sugar transporter [Arabidopsis thaliana]
  misc_feature (1)..(409): Homolog of NCBI NO: 18397139 NR Description: sugar transporter, putative [Arabidopsis
  misc_feature (1)..(354): Homolog of NCBI NO: 6729026 NR Description: putative sugar transporter [Arabidopsis thaliana]
  misc_feature (1)..(405): Homolog of NCBI NO: 18421108 NR Description: sugar-porter family protein 2 [Arabidopsis
  misc_feature (1)..(405): Homolog of NCBI NO: 18421106 NR Description: sugar-porter family protein 1 [Arabidopsis
  misc_feature (331)..(402): Homolog of NCBI NO: 6729026 NR Description: putative sugar transporter [Arabidopsis thaliana]
  misc_feature (1)..(405): Homolog of NCBI NO: 18421108 NR Description: sugar-porter family protein 2 [Arabidopsis
  misc_feature (1)..(354): Homolog of NCBI NO: 6729026 NR Description: putative sugar transporter [Arabidopsis thaliana]
  misc_feature (1)..(409): Homolog of NCBI NO: 18397139 NR Description: sugar transporter, putative [Arabidopsis
  misc_feature (1)..(375): Homolog of NCBI NO: 20260272 NR Description: putative sugar transporter [Arabidopsis thaliana]
  misc_feature (1)..(409): Homolog of NCBI NO: 18397141 NR Description: sugar transporter, putative [Arabidopsis thaliana]
MKELDLSMAQFSAFGSFLNVGGAVGALFSGQLAVILGRRRTLWACDFFCVFGWLSIAFAKNVFWLDLGRISLGIGVGLISYVVPVYIAEITPKHVRGAFTASNQLLQNSGVSLIYFFGTVINWRVMAVIGAIPCILQTIGIFFIPESPRWLAKIRLSKEVESSLHRLRGKDTDVSGEAAEIQVMTKMLEEDSKSSFSDMFQKKYRRTLVVGIGLMLIQQLSGASGITYYSNAIFRKAGFSERLGSMIFGVFVIPKALVGLILVDRWGRRPLLLASAVGMSIGSLLIGVSFTLQQMNVLPELIPIFVFVNILVYFGCFAFGIGGLPWVIMSEIFPINIKVSAGTIVALTSWTSGWFVSYAFNFMFEWSAQGTFYIFAAVGGMSFIFIWMLVPETKGQSLEELQASLTGTS

SEQ ID NO: 49218 - DNA, 839 bp, Arabidopsis thaliana; identical to SEQ ID NO: 21803
  misc_feature (1)..(839): Ceres Seq. ID no. 12601485
  misc_feature: MA Experiment ID: 108434 Result: Up-regulated in Transcription
  misc_feature: MA Experiment 108434 PARAMETER Experiment Name: At_Root_Tips_cDNA_P Parameter: Tissue Value: Root Tips
  misc_feature: MA Experiment ID: 108435 Result: Up-regulated in Transcription
  misc_feature: MA Experiment 108435 PARAMETER Experiment Name: At_stm_Mutants_cDNA_P Parameter: Plant Line Value: wt Landsburg vs stm
  misc_feature: MA Experiment 108435 PARAMETER Experiment Name: At_stm_Mutants_cDNA_P Parameter: Tissue Value: Shoot Apical Meristem Region
  misc_feature: MA Experiment ID: 108488 Result: Up-regulated in Transcription
  misc_feature: MA Experiment ID: 108573 Result: Up-regulated in Transcription
  misc_feature: MA Experiment 108573 PARAMETER Experiment Name: At_Drought_cDNA_P Parameter: Timepoint (hr) Value: 6
  misc_feature: MA Experiment 108573 PARAMETER Experiment Name: At_Drought_cDNA_P Parameter: Tissue Value: Aerial
  misc_feature: MA Experiment 108573 PARAMETER Experiment Name: At_Drought_cDNA_P Parameter: Treatment Value: Drought vs. No Drought
  misc_feature: MA Experiment ID: 108576 Result: Down-regulated in Transcription
  misc_feature: MA Experiment 108576 PARAMETER Experiment Name: At_42deg_Heat_cDNA_P Parameter: Temperature (deg C) Value: 42 vs. 22
  misc_feature: MA Experiment 108576 PARAMETER Experiment Name: At_42deg_Heat_cDNA_P Parameter: Timepoint (hr) Value: 1
  misc_feature: MA Experiment 108576 PARAMETER Experiment Name: At_42deg_Heat_cDNA_P Parameter: Tissue Value: Aerial
  misc_feature: MA Experiment ID: 108595 Result: Up-regulated in Transcription
  misc_feature: MA Experiment 108595 PARAMETER Experiment Name: At_Ler-pi_Ovule_cDNA_P Parameter: Plant Line Value: null
  misc_feature: MA Experiment ID: 20000030 Result: Up-regulated in Transcription
  misc_feature: MA Experiment 20000030 PARAMETER Experiment Name: At_CS6630_Roots_cDNA_P Parameter: Plant Line Value: CS6630 vs. WS
  misc_feature: MA Experiment 20000030 PARAMETER Experiment Name: At_CS6630_Roots_cDNA_P Parameter: Tissue Value: Roots
  misc_feature: MA Experiment ID: 20000071 Result: Up-regulated in Transcription
  misc_feature: MA Experiment 20000071 PARAMETER Experiment Name: At_100uM_ABA_Mutants_cDNA_P Parameter: Plant Line Value: CS8104
  misc_feature: MA Experiment 20000071 PARAMETER Experiment Name: At_100uM_ABA_Mutants_cDNA_P Parameter: Timepoint (hr) Value: 6
  misc_feature: MA Experiment 20000071 PARAMETER Experiment Name: At_100uM_ABA_Mutants_cDNA_P Parameter: Tissue Value: Aerial
  misc_feature: MA Experiment 20000071 PARAMETER Experiment Name: At_100uM_ABA_Mutants_cDNA_P Parameter: Treatment Value: 100uM ABA vs. No Treatment
  misc_feature: MA Experiment ID: 20000072 Result: Up-regulated in Transcription
  misc_feature: MA Experiment 20000072 PARAMETER Experiment Name: At_100uM_ABA_Mutants_cDNA_P Parameter: Plant Line Value: CS8105
  misc_feature: MA Experiment 20000072 PARAMETER Experiment Name: At_100uM_ABA_Mutants_cDNA_P Parameter: Timepoint (hr) Value: 6
  misc_feature: MA Experiment 20000072 PARAMETER Experiment Name: At_100uM_ABA_Mutants_cDNA_P Parameter: Tissue Value: Aerial
  misc_feature: MA Experiment 20000072 PARAMETER Experiment Name: At_100uM_ABA_Mutants_cDNA_P Parameter: Treatment Value: 100uM ABA vs. No Treatment
  misc_feature: MA Experiment ID: 20000087 Result: Up-regulated in Transcription
  misc_feature: MA Experiment 20000087 PARAMETER Experiment Name: At_100uM_ABA_Mutants_cDNA_P Parameter: Plant Line Value: WS
  misc_feature: MA Experiment 20000087 PARAMETER Experiment Name: At_100uM_ABA_Mutants_cDNA_P Parameter: Timepoint (hr) Value: 6
  misc_feature: MA Experiment 20000087 PARAMETER Experiment Name: At_100uM_ABA_Mutants_cDNA_P Parameter: Tissue Value: Aerial
  misc_feature: MA Experiment 20000087 PARAMETER Experiment Name: At_100uM_ABA_Mutants_cDNA_P Parameter: Treatment Value: 100uM ABA vs. No Treatment
  misc_feature: MA Experiment ID: 20000111 Result: Down-regulated in Transcription
  misc_feature: MA Experiment 20000111 PARAMETER Experiment Name: At_42deg_Heat_cDNA_P Parameter: Temperature (deg C) Value: 42 vs. 22
  misc_feature: MA Experiment 20000111 PARAMETER Experiment Name: At_42deg_Heat_cDNA_P Parameter: Timepoint (hr) Value: 6
  misc_feature: MA Experiment 20000111 PARAMETER Experiment Name: At_42deg_Heat_cDNA_P Parameter: Tissue Value: Aerial
  misc_feature: MA Experiment ID: 20000113 Result: Down-regulated in Transcription
  misc_feature: MA Experiment 20000113 PARAMETER Experiment Name: At_42deg_Heat_cDNA_P Parameter: Temperature (deg C) Value: 42 vs. 22
  misc_feature: MA Experiment 20000113 PARAMETER Experiment Name: At_42deg_Heat_cDNA_P Parameter: Timepoint (hr) Value: 8
  misc_feature: MA Experiment 20000113 PARAMETER Experiment Name: At_42deg_Heat_cDNA_P Parameter: Tissue Value: Aerial
  misc_feature: MA Experiment ID: 20000117 Result: Up-regulated in Transcription
  misc_feature: MA Experiment 20000117 PARAMETER Experiment Name: At_100uM_ABA_Mutants_cDNA_P Parameter: Plant Line Value: Columbia
  misc_feature: MA Experiment 20000117 PARAMETER Experiment Name: At_100uM_ABA_Mutants_cDNA_P Parameter: Timepoint (hr) Value: 6
  misc_feature: MA Experiment 20000117 PARAMETER Experiment Name: At_100uM_ABA_Mutants_cDNA_P Parameter: Tissue Value: Aerial
  misc_feature: MA Experiment 20000117 PARAMETER Experiment Name: At_100uM_ABA_Mutants_cDNA_P Parameter: Treatment Value: 100uM ABA vs. No Treatment
  misc_feature: MA Experiment ID: 20000144 Result: Down-regulated in Transcription
  misc_feature: MA Experiment 20000144 PARAMETER Experiment Name: At_42deg_Heat_cDNA_P Parameter: Temperature (deg C) Value: 42 vs. 22
  misc_feature: MA Experiment 20000144 PARAMETER Experiment Name: At_42deg_Heat_cDNA_P Parameter: Timepoint (hr) Value: 1
  misc_feature: MA Experiment 20000144 PARAMETER Experiment Name: At_42deg_Heat_cDNA_P Parameter: Tissue Value: Aerial
  misc_feature: MA Experiment ID: 20000171 Result: Down-regulated in Transcription
  misc_feature: MA Experiment 20000171 PARAMETER Experiment Name: At_42deg_Heat_P Parameter: Age (day) Value: 14
  misc_feature: MA Experiment 20000171 PARAMETER Experiment Name: At_42deg_Heat_P Parameter: Organism Value: A. thaliana
  misc_feature: MA Experiment 20000171 PARAMETER Experiment Name: At_42deg_Heat_P Parameter: Plant Line Value: WS
  misc_feature: MA Experiment 20000171 PARAMETER Experiment Name: At_42deg_Heat_P Parameter: Temperature (deg C) Value: 42 vs. 22
  misc_feature: MA Experiment 20000171 PARAMETER Experiment Name: At_42deg_Heat_P Parameter: Timepoint (hr) Value: 1
  misc_feature: MA Experiment 20000171 PARAMETER Experiment Name: At_42deg_Heat_P Parameter: Tissue Value: Aerial
  misc_feature: MA Experiment ID: 20000173 Result: Down-regulated in Transcription
  misc_feature: MA Experiment 20000173 PARAMETER Experiment Name: At_42deg_Heat_P Parameter: Age (day) Value: 14
  misc_feature: MA Experiment 20000173 PARAMETER Experiment Name: At_42deg_Heat_P Parameter: Organism Value: A. thaliana
  misc_feature: MA Experiment 20000173 PARAMETER Experiment Name: At_42deg_Heat_P Parameter: Plant Line Value: WS
  misc_feature: MA Experiment 20000173 PARAMETER Experiment Name: At_42deg_Heat_P Parameter: Temperature (deg C) Value: 42 vs. 22
  misc_feature: MA Experiment 20000173 PARAMETER Experiment Name: At_42deg_Heat_P Parameter: Timepoint (hr) Value: 6
  misc_feature: MA Experiment 20000173 PARAMETER Experiment Name: At_42deg_Heat_P Parameter: Tissue Value: Aerial
  misc_feature: MA Experiment ID: 20000185 Result: Down-regulated in Transcription
  misc_feature: MA Experiment 20000185 PARAMETER Experiment Name: At_Roots__P Parameter: Age (day) Value: 7 vs. 21
  misc_feature: MA Experiment 20000185 PARAMETER Experiment Name: At_Roots__P Parameter: Organism Value: A. thaliana
  misc_feature: MA Experiment 20000185 PARAMETER Experiment Name: At_Roots__P Parameter: Tissue Value: Roots vs. Whole Plant
  misc_feature: MA Experiment ID: 20000227 Result: Down-regulated in Transcription
  misc_feature: MA Experiment 20000227 PARAMETER Experiment Name: At_Root-Tips-vs-Tops_P Parameter: Tissue Value: Root Tips vs. Root Tops
  misc_feature: MA Experiment ID: 20000234 Result: Up-regulated in Transcription
  misc_feature: MA Experiment 20000234 PARAMETER Experiment Name: At_Siliques_P Parameter: Age (day) Value: 21
  misc_feature: MA Experiment 20000234 PARAMETER Experiment Name: At_Siliques_P Parameter: Organism Value: A. thaliana
  misc_feature: MA Experiment 20000234 PARAMETER Experiment Name: At_Siliques_P Parameter: Plant Line Value: WS
  misc_feature: MA Experiment 20000234 PARAMETER Experiment Name: At_Siliques_P Parameter: Tissue Value: Less Than 5mm Siliques vs. Whole Plant
  misc_feature: MA Experiment ID: 20000264 Result: Up-regulated in Transcription
  misc_feature: MA Experiment 20000264 PARAMETER Experiment Name: At_Open_Flower_P Parameter: Age (day) Value: 21
  misc_feature: MA Experiment 20000264 PARAMETER Experiment Name: At_Open_Flower_P Parameter: Plant Line Value: WS
  misc_feature: MA Experiment 20000264 PARAMETER Experiment Name: At_Open_Flower_P Parameter: Tissue Value: Open Flower vs. Whole Plant
  misc_feature: MA Experiment ID: 20000265 Result: Up-regulated in Transcription
  misc_feature: MA Experiment 20000265 PARAMETER Experiment Name: At_Open_Flower_P Parameter: Age (day) Value: 21
  misc_feature: MA Experiment 20000265 PARAMETER Experiment Name: At_Open_Flower_P Parameter: Plant Line Value: WS
  misc_feature: MA Experiment 20000265 PARAMETER Experiment Name: At_Open_Flower_P Parameter: Tissue Value: Closed Flower vs. Whole Plant
  misc_feature: MA Experiment ID: 20000286 Result: Up-regulated in Transcription
  misc_feature: MA Experiment 20000286 PARAMETER Experiment Name: At_Open_Flower_P Parameter: Age (day) Value: 21
  misc_feature: MA Experiment 20000286 PARAMETER Experiment Name: At_Open_Flower_P Parameter: Plant Line Value: WS
  misc_feature: MA Experiment 20000286 PARAMETER Experiment Name: At_Open_Flower_P Parameter: Tissue Value: Half Open vs. Whole Plant
  misc_feature: MA Experiment ID: 20000451 Result: Up-regulated in Transcription
  misc_feature: MA Experiment 20000451 PARAMETER Experiment Name: At_CS6879_Shoots-Roots_P Parameter: Age (day) Value: 14
  misc_feature: MA Experiment 20000451 PARAMETER Experiment Name: At_CS6879_Shoots-Roots_P Parameter: Organism Value: A. thaliana
  misc_feature: MA Experiment 20000451 PARAMETER Experiment Name: At_CS6879_Shoots-Roots_P Parameter: Plant Line Value: CS6879 vs. WS
  misc_feature: MA Experiment 20000451 PARAMETER Experiment Name: At_CS6879_Shoots-Roots_P Parameter: Tissue Value: Roots
  misc_feature: MA Experiment ID: 20000495 Result: Up-regulated in Transcription
  misc_feature: MA Experiment 20000495 PARAMETER Experiment Name: At_Guard_Cells_P Parameter: Harvest Date Value: 8/2/2002
  misc_feature: MA Experiment 20000495 PARAMETER Experiment Name: At_Guard_Cells_P Parameter: Organism Value: A. thaliana
  misc_feature: MA Experiment 20000495 PARAMETER Experiment Name: At_Guard_Cells_P Parameter: Tissue Value: Guard Cells vs. Leaves
  misc_feature: MA Experiment ID: 20000496 Result: Up-regulated in Transcription
  misc_feature: MA Experiment 20000496 PARAMETER Experiment Name: At_Guard_Cells_P Parameter: Harvest Date Value: 7/19/2002
  misc_feature: MA Experiment 20000496 PARAMETER Experiment Name: At_Guard_Cells_P Parameter: Organism Value: Canola
  misc_feature: MA Experiment 20000496 PARAMETER Experiment Name: At_Guard_Cells_P Parameter: Tissue Value: Guard Cells vs. Leaves
  misc_feature: MA Experiment ID: 20000573 Result: Down-regulated in Transcription
  misc_feature: MA Experiment 20000573 PARAMETER Experiment Name: At_100uM_ABA_Mutants__P Parameter: Organism Value: A. thaliana
  misc_feature: MA Experiment 20000573 PARAMETER Experiment Name: At_100uM_ABA_Mutants__P Parameter: Plant Line Value: CS22 vs. Ler wt
  misc_feature: MA Experiment 20000573 PARAMETER Experiment Name: At_100uM_ABA_Mutants__P Parameter: Timepoint (hr) Value: N/A
  misc_feature: MA Experiment 20000573 PARAMETER Experiment Name: At_100uM_ABA_Mutants__P Parameter: Tissue Value: Whole Plant
  misc_feature: MA Experiment 20000573 PARAMETER Experiment Name: At_100uM_ABA_Mutants__P Parameter: Treatment Value: None
  misc_feature: MA Experiment ID: 20001555 Result: Up-regulated in Transcription
  misc_feature: MA Experiment 20001555 PARAMETER Experiment Name: At_Drought_Soil_Dry_P Parameter: Age (day) Value: 24
  misc_feature: MA Experiment 20001555 PARAMETER Experiment Name: At_Drought_Soil_Dry_P Parameter: Organism Value: A. thaliana
  misc_feature: MA Experiment 20001555 PARAMETER Experiment Name: At_Drought_Soil_Dry_P Parameter: Plant Line Value: WS
  misc_feature: MA Experiment 20001555 PARAMETER Experiment Name: At_Drought_Soil_Dry_P Parameter: Post Timepoint (hr) Value: None
  misc_feature: MA Experiment 20001555 PARAMETER Experiment Name: At_Drought_Soil_Dry_P Parameter: Post-Treatment Value: None
  misc_feature: MA Experiment 20001555 PARAMETER Experiment Name: At_Drought_Soil_Dry_P Parameter: Timepoint (day) Value: 10
  misc_feature: MA Experiment 20001555 PARAMETER Experiment Name: At_Drought_Soil_Dry_P Parameter: Treatment Value: Drought vs. No Drought
  misc_feature: MA Experiment ID: 20001559 Result: Up-regulated in Transcription
  misc_feature: MA Experiment 20001559 PARAMETER Experiment Name: At_Drought_Soil_Dry_P Parameter: Age (day) Value: 28
  misc_feature: MA Experiment 20001559 PARAMETER Experiment Name: At_Drought_Soil_Dry_P Parameter: Organism Value: A. thaliana
  misc_feature: MA Experiment 20001559 PARAMETER Experiment Name: At_Drought_Soil_Dry_P Parameter: Plant Line Value: WS
  misc_feature: MA Experiment 20001559 PARAMETER Experiment Name: At_Drought_Soil_Dry_P Parameter: Post Timepoint (hr) Value: 29
  misc_feature: MA Experiment 20001559 PARAMETER Experiment Name: At_Drought_Soil_Dry_P Parameter: Post-Treatment Value: Re-Water vs. No Drought
  misc_feature: MA Experiment 20001559 PARAMETER Experiment Name: At_Drought_Soil_Dry_P Parameter: Timepoint (day) Value: 14
  misc_feature: MA Experiment 20001559 PARAMETER Experiment Name: At_Drought_Soil_Dry_P Parameter: Treatment Value: Drought vs. No Drought
  misc_feature: MA Experiment ID: 20001904 Result: Up-regulated in Transcription
  misc_feature: MA Experiment 20001904 PARAMETER Experiment Name: At_Drought_Reproduction_P Parameter: Age (day) Value: 37
  misc_feature: MA Experiment 20001904 PARAMETER Experiment Name: At_Drought_Reproduction_P Parameter: Organism Value: A. thaliana
  misc_feature: MA Experiment 20001904 PARAMETER Experiment Name: At_Drought_Reproduction_P Parameter: Plant Line Value: WS
  misc_feature: MA Experiment 20001904 PARAMETER Experiment Name: At_Drought_Reproduction_P Parameter: Timepoint (day) Value: 7
  misc_feature: MA Experiment 20001904 PARAMETER Experiment Name: At_Drought_Reproduction_P Parameter: Tissue Value: Rosettes
  misc_feature: MA Experiment 20001904 PARAMETER Experiment Name: At_Drought_Reproduction_P Parameter: Treatment Value: Drought vs. No Drought
  misc_feature: MA Experiment ID: 20001905 Result: Up-regulated in Transcription
  misc_feature: MA Experiment 20001905 PARAMETER Experiment Name: At_Drought_Reproduction_P Parameter: Age (day) Value: 40
  misc_feature: MA Experiment 20001905 PARAMETER Experiment Name: At_Drought_Reproduction_P Parameter: Organism Value: A. thaliana
  misc_feature: MA Experiment 20001905 PARAMETER Experiment Name: At_Drought_Reproduction_P Parameter: Plant Line Value: WS
  misc_feature: MA Experiment 20001905 PARAMETER Experiment Name: At_Drought_Reproduction_P Parameter: Timepoint (day) Value: 10
  misc_feature: MA Experiment 20001905 PARAMETER Experiment Name: At_Drought_Reproduction_P Parameter: Tissue Value: Rosettes
  misc_feature: MA Experiment 20001905 PARAMETER Experiment Name: At_Drought_Reproduction_P Parameter: Treatment Value: Drought vs. No Drought

SEQ ID NO: 49219 - protein, 212 aa, Arabidopsis thaliana; identical to SEQ ID NO: 21804
  peptide (1)..(212): Ceres Seq. ID no. 12601486
  misc_feature (86)..(197): Pfam Name: Glyoxalase/Bleomycin resistance Pfam Description: Glyoxalase/Bleomycin resistance
  misc_feature (86)..(197): Pfam Name: Glyoxalase/Bleomycin resistance Pfam Description: Glyoxalase/Bleomycin resistance
  misc_feature (86)..(208): Homolog of NCBI NO: 26990157 NR Description: glyoxalase family protein [Pseudomonas putida
  misc_feature (86)..(201): Homolog of NCBI NO: 16263553 NR Description: Hypothetical protein [Sinorhizobium meliloti]
  misc_feature (86)..(208): Homolog of NCBI NO: 26990157 NR Description: glyoxalase family protein [Pseudomonas putida
  misc_feature (67)..(197): Homolog of NCBI NO: 28565534 NR Description: early tobacco anther 1 [Nicotiana tabacum]
  misc_feature (47)..(212): Homolog of NCBI NO: 18422918 NR Description: expressed protein
  misc_feature (86)..(201): Homolog of NCBI NO: 16263553 NR Description: Hypothetical protein [Sinorhizobium meliloti]
  misc_feature (67)..(197): Homolog of NCBI NO: 28565534 NR Description: early tobacco anther 1 [Nicotiana tabacum]
  misc_feature (47)..(212): Homolog of NCBI NO: 18422918 NR Description: expressed protein

SEQ ID NO: 49220 - protein, 166 aa, Arabidopsis thaliana; identical to SEQ ID NO: 21805
  peptide (1)..(166): Ceres Seq. ID no. 12601487
  misc_feature (40)..(151): Pfam Name: Glyoxalase/Bleomycin resistance Pfam Description: Glyoxalase/Bleomycin resistance
  misc_feature (40)..(151): Pfam Name: Glyoxalase/Bleomycin resistance Pfam Description: Glyoxalase/Bleomycin resistance
  misc_feature (40)..(162): Homolog of NCBI NO: 26990157 NR Description: glyoxalase family protein [Pseudomonas putida
  misc_feature (40)..(155): Homolog of NCBI NO: 16263553 NR Description: Hypothetical protein [Sinorhizobium meliloti]
  misc_feature (40)..(162): Homolog of NCBI NO: 26990157 NR Description: glyoxalase family protein [Pseudomonas putida
  misc_feature (21)..(151): Homolog of NCBI NO: 28565534 NR Description: early tobacco anther 1 [Nicotiana tabacum]
  misc_feature (1)..(166): Homolog of NCBI NO: 18422918 NR Description: expressed protein
  misc_feature (40)..(155): Homolog of NCBI NO: 16263553 NR Description: Hypothetical protein [Sinorhizobium meliloti]
  misc_feature (21)..(151): Homolog of NCBI NO: 28565534 NR Description: early tobacco anther 1 [Nicotiana tabacum]
  misc_feature (1)..(166): Homolog of NCBI NO: 18422918 NR Description: expressed protein

SEQ ID NO: 49221 - protein, 138 aa, Arabidopsis thaliana; identical to SEQ ID NO: 21806
  peptide (1)..(138): Ceres Seq. ID no. 12601488
  misc_feature (12)..(123): Pfam Name: Glyoxalase/Bleomycin resistance Pfam Description: Glyoxalase/Bleomycin resistance
  misc_feature (12)..(123): Pfam Name: Glyoxalase/Bleomycin resistance Pfam Description: Glyoxalase/Bleomycin resistance
  misc_feature (12)..(134): Homolog of NCBI NO: 26990157 NR Description: glyoxalase family protein [Pseudomonas putida
  misc_feature (12)..(127): Homolog of NCBI NO: 16263553 NR Description: Hypothetical protein [Sinorhizobium meliloti]
  misc_feature (12)..(134): Homolog of NCBI NO: 26990157 NR Description: glyoxalase family protein [Pseudomonas putida
  misc_feature (1)..(123): Homolog of NCBI NO: 28565534 NR Description: early tobacco anther 1 [Nicotiana tabacum]
  misc_feature (1)..(138): Homolog of NCBI NO: 18422918 NR Description: expressed protein
  misc_feature (12)..(127): Homolog of NCBI NO: 16263553 NR Description: Hypothetical protein [Sinorhizobium meliloti]
  misc_feature (1)..(123): Homolog of NCBI NO: 28565534 NR Description: early tobacco anther 1 [Nicotiana tabacum]
  misc_feature (1)..(138): Homolog of NCBI NO: 18422918 NR Description: expressed protein

SEQ ID NO: 49222 - DNA, 904 bp, Arabidopsis thaliana
  misc_feature (1)..(904): Ceres Seq. ID no. 13647008
  misc_feature: MA Experiment ID: 20000184 Result: Down-regulated in Transcription
  misc_feature: MA Experiment 20000184 PARAMETER Experiment Name: At_Shoots__P Parameter: Age (day) Value: 7
  misc_feature: MA Experiment 20000184 PARAMETER Experiment Name: At_Shoots__P Parameter: Tissue Value: Shoots vs. Whole Plant
  misc_feature: MA Experiment ID: 20000227 Result: Down-regulated in Transcription
  misc_feature: MA Experiment 20000227 PARAMETER Experiment Name: At_Root-Tips-vs-Tops_P Parameter: Tissue Value: Root Tips vs. Root Tops
  misc_feature: MA Experiment ID: 20000265 Result: Down-regulated in Transcription
  misc_feature: MA Experiment 20000265 PARAMETER Experiment Name: At_Open_Flower_P Parameter: Age (day) Value: 21
  misc_feature: MA Experiment 20000265 PARAMETER Experiment Name: At_Open_Flower_P Parameter: Plant Line Value: WS
  misc_feature: MA Experiment 20000265 PARAMETER Experiment Name: At_Open_Flower_P Parameter: Tissue Value: Closed Flower vs. Whole Plant
gacaagattctatgaggatttttcagtaaatggatagcctgacacgagaaagctgacctcactcgctacttgggttgattgagtatatatatgtaagtatcgccgttgagaaattgggactctgatctgttgcagaaagccgaaagctttggtctttggagctctaacctctgcctctgaacacacacagaatctcccatggctgcatttgcaacggcagaagcgtgtgacagcaacgcagaactaatatcaaatggagacttacgcgctcttcacccaatcttcaagatctatggccaaagaagatgcttctcaggaccaatcgtgactctcaaggtctttgaagacaatgtcctcgtcagaaaccaactagaaacgaaaggagaaggcggagtcttagttatagacggtggtggaagcatgagatgcgcgcttgttggaggaaacctcggacagttagctcagaacaacgggtggtcggggattgttgtgaatggatgcgttagagatgtggatgagatcaatgactgcgatgttggggtcagggcattgggatctaacccgttgaaatctactaagaaaggtcatggtgagaagaatgtgccggttcatattggaggaactttgattagagatggagagtggctatatgctgatagtgatggtatcttgatctccaagaccgaactctctgtttgagtcagaacgtttccgtgatagtgctaagagactacagcttcttggagcaaggtggtttattggaattcttaagaatctgtttaatactccaaataatcatttttattacaatatacttacgttttatgaaattacaaaataaaagtctatatagttcaacaagtttggatcatgtgatagtataagaaactctcatgaatgaaag

SEQ ID NO: 49223 - protein, 166 aa, Arabidopsis thaliana
  peptide (1)..(166): Ceres Seq. ID no. 13647009
  misc_feature (9)..(159): Pfam Name: Demethylmenaquinone methyltransferase Pfam Description: Demethylmenaquinone methyltransferase
  misc_feature (4)..(166): Homolog of NCBI NO: 23103535 NR Description: hypothetical protein [Azotobacter vinelandii]
  misc_feature (1)..(166): Homolog of NCBI NO: 23468849 NR Description: hypothetical protein [Pseudomonas syringae pv.
  misc_feature (8)..(164): Homolog of NCBI NO: 17546073 NR Description: PROBABLE
  misc_feature (1)..(164): Homolog of NCBI NO: 22978085 NR Description: hypothetical protein [Ralstonia metallidurans]
  misc_feature (1)..(164): Homolog of NCBI NO: 22982141 NR Description: hypothetical protein [Burkholderia fungorum]
  misc_feature (1)..(166): Homolog of NCBI NO: 15232963 NR Description: dimethylmenaquinone methyltransferase family
  misc_feature (1)..(166): Homolog of NCBI NO: 21537415 NR Description: S-adenosylmethionine:2-demethylmenaquinone
  misc_feature (1)..(166): Homolog of NCBI NO: 15237348 NR Description: dimethylmenaquinone methyltransferase family
  misc_feature (1)..(166): Homolog of NCBI NO: 34910724 NR Description: S-adenosylmethionine:2-demethylmenaquinone
  misc_feature (1)..(166): Homolog of NCBI NO: 15241161 NR Description: dimethylmenaquinone methyltransferase family
MAAFATAEACDSNAELISNGDLRALHPIFKIYGQRRCFSGPIVTLKVFEDNVLVRNQLETKGEGGVLVIDGGGSMRCALVGGNLGQLAQNNGWSGIVVNGCVRDVDEINDCDVGVRALGSNPLKSTKKGHGEKNVPVHIGGTLIRDGEWLYADSDGILISKTELSV

SEQ ID NO: 49224 - protein, 92 aa, Arabidopsis thaliana
  peptide (1)..(92): Ceres Seq. ID no. 13647010
  misc_feature (1)..(85): Pfam Name: Demethylmenaquinone methyltransferase Pfam Description: Demethylmenaquinone methyltransferase
  misc_feature (1)..(92): Homolog of NCBI NO: 23103535 NR Description: hypothetical protein [Azotobacter vinelandii]
  misc_feature (1)..(92): Homolog of NCBI NO: 23468849 NR Description: hypothetical protein [Pseudomonas syringae pv.
  misc_feature (1)..(90): Homolog of NCBI NO: 17546073 NR Description: PROBABLE
  misc_feature (1)..(90): Homolog of NCBI NO: 22978085 NR Description: hypothetical protein [Ralstonia metallidurans]
  misc_feature (1)..(90): Homolog of NCBI NO: 22982141 NR Description: hypothetical protein [Burkholderia fungorum]
  misc_feature (1)..(92): Homolog of NCBI NO: 15232963 NR Description: dimethylmenaquinone methyltransferase family
  misc_feature (1)..(92): Homolog of NCBI NO: 21537415 NR Description: S-adenosylmethionine:2-demethylmenaquinone
  misc_feature (1)..(92): Homolog of NCBI NO: 15237348 NR Description: dimethylmenaquinone methyltransferase family
  misc_feature (1)..(92): Homolog of NCBI NO: 34910724 NR Description: S-adenosylmethionine:2-demethylmenaquinone
  misc_feature (1)..(92): Homolog of NCBI NO: 15241161 NR Description: dimethylmenaquinone methyltransferase family
MRCALVGGNLGQLAQNNGWSGIVVNGCVRDVDEINDCDVGVRALGSNPLKSTKKGHGEKNVPVHIGGTLIRDGEWLYADSDGILISKTELSV

SEQ ID NO: 49225 - DNA, 2589 bp, Arabidopsis thaliana; identical to SEQ ID NO: 46443
  misc_feature (1)..(2589): Ceres Seq. ID no. 12600667
  misc_feature: MA Experiment ID: 20000169 Result: Up-regulated in Transcription
  misc_feature: MA Experiment 20000169 PARAMETER Experiment Name: At_100uM_ABA_P Parameter: Age (day) Value: 14
  misc_feature: MA Experiment 20000169 PARAMETER Experiment Name: At_100uM_ABA_P Parameter: Organism Value: A. thaliana
  misc_feature: MA Experiment 20000169 PARAMETER Experiment Name: At_100uM_ABA_P Parameter: Plant Line Value: WS
  misc_feature: MA Experiment 20000169 PARAMETER Experiment Name: At_100uM_ABA_P Parameter: Timepoint (hr) Value: 6
  misc_feature: MA Experiment 20000169 PARAMETER Experiment Name: At_100uM_ABA_P Parameter: Tissue Value: Aerial
  misc_feature: MA Experiment 20000169 PARAMETER Experiment Name: At_100uM_ABA_P Parameter: Treatment Value: 100uM ABA vs. No Treatment
  misc_feature: MA Experiment ID: 20000179 Result: Up-regulated in Transcription
  misc_feature: MA Experiment 20000179 PARAMETER Experiment Name: At_Germinating_Seeds_P Parameter: Age (hr) Value: 6 vs. 0
  misc_feature: MA Experiment 20000179 PARAMETER Experiment Name: At_Germinating_Seeds_P Parameter: Tissue Value: Germinating Seeds
  misc_feature: MA Experiment ID: 20000180 Result: Up-regulated in Transcription
  misc_feature: MA Experiment 20000180 PARAMETER Experiment Name: At_Germinating_Seeds_P Parameter: Age (hr) Value: 24 vs. 0
  misc_feature: MA Experiment 20000180 PARAMETER Experiment Name: At_Germinating_Seeds_P Parameter: Tissue Value: Germinating Seeds
  misc_feature: MA Experiment ID: 20000185 Result: Down-regulated in Transcription
  misc_feature: MA Experiment 20000185 PARAMETER Experiment Name: At_Roots__P Parameter: Age (day) Value: 7 vs. 21
  misc_feature: MA Experiment 20000185 PARAMETER Experiment Name: At_Roots__P Parameter: Organism Value: A. thaliana
  misc_feature: MA Experiment 20000185 PARAMETER Experiment Name: At_Roots__P Parameter: Tissue Value: Roots vs. Whole Plant
  misc_feature: MA Experiment ID: 20000211 Result: Down-regulated in Transcription
  misc_feature: MA Experiment 20000211 PARAMETER Experiment Name: At_0.001percent_MeJA__P Parameter: Age (day) Value: 14
  misc_feature: MA Experiment 20000211 PARAMETER Experiment Name: At_0.001percent_MeJA__P Parameter: Organism Value: A. thaliana
  misc_feature: MA Experiment 20000211 PARAMETER Experiment Name: At_0.001percent_MeJA__P Parameter: Plant Line Value: WS
  misc_feature: MA Experiment 20000211 PARAMETER Experiment Name: At_0.001percent_MeJA__P Parameter: Timepoint (hr) Value: 1
  misc_feature: MA Experiment 20000211 PARAMETER Experiment Name: At_0.001percent_MeJA__P Parameter: Tissue Value: Aerial
  misc_feature: MA Experiment 20000211 PARAMETER Experiment Name: At_0.001percent_MeJA__P Parameter: Treatment Value: 0.001percent MeJA vs. No Treatment
  misc_feature: MA Experiment ID: 20000213 Result: Down-regulated in Transcription
  misc_feature: MA Experiment 20000213 PARAMETER Experiment Name: At_4deg_Cold_P Parameter: Timepoint (hr) Value: 2
  misc_feature: MA Experiment ID: 20000227 Result: Up-regulated in Transcription
  misc_feature: MA Experiment 20000227 PARAMETER Experiment Name: At_Root-Tips-vs-Tops_P Parameter: Tissue Value: Root Tips vs. Root Tops
  misc_feature: MA Experiment ID: 20000234 Result: Down-regulated in Transcription
  misc_feature: MA Experiment 20000234 PARAMETER Experiment Name: At_Siliques_P Parameter: Age (day) Value: 21
  misc_feature: MA Experiment 20000234 PARAMETER Experiment Name: At_Siliques_P Parameter: Organism Value: A. thaliana
  misc_feature: MA Experiment 20000234 PARAMETER Experiment Name: At_Siliques_P Parameter: Plant Line Value: WS
  misc_feature: MA Experiment 20000234 PARAMETER Experiment Name: At_Siliques_P Parameter: Tissue Value: Less Than 5mm Siliques vs. Whole Plant
  misc_feature: MA Experiment ID: 20000235 Result: Down-regulated in Transcription
  misc_feature: MA Experiment 20000235 PARAMETER Experiment Name: At_Siliques_P Parameter: Age (day) Value: 21
  misc_feature: MA Experiment 20000235 PARAMETER Experiment Name: At_Siliques_P Parameter: Organism Value: A. thaliana
  misc_feature: MA Experiment 20000235 PARAMETER Experiment Name: At_Siliques_P Parameter: Plant Line Value: WS
  misc_feature: MA Experiment 20000235 PARAMETER Experiment Name: At_Siliques_P Parameter: Tissue Value: 5-10mm Siliques vs. Whole Plant
  misc_feature: MA Experiment ID: 20000265 Result: Down-regulated in Transcription
  misc_feature: MA Experiment 20000265 PARAMETER Experiment Name: At_Open_Flower_P Parameter: Age (day) Value: 21
  misc_feature: MA Experiment 20000265 PARAMETER Experiment Name: At_Open_Flower_P Parameter: Plant Line Value: WS
  misc_feature: MA Experiment 20000265 PARAMETER Experiment Name: At_Open_Flower_P Parameter: Tissue Value: Closed Flower vs. Whole Plant
  misc_feature: MA Experiment ID: 20000268 Result: Down-regulated in Transcription
  misc_feature: MA Experiment 20000268 PARAMETER Experiment Name: At_100mM_NaCl__P Parameter: Age (day) Value: 14
  misc_feature: MA Experiment 20000268 PARAMETER Experiment Name: At_100mM_NaCl__P Parameter: Organism Value: A. thaliana
  misc_feature: MA Experiment 20000268 PARAMETER Experiment Name: At_100mM_NaCl__P Parameter: Plant Line Value: WS
  misc_feature: MA Experiment 20000268 PARAMETER Experiment Name: At_100mM_NaCl__P Parameter: Timepoint (hr) Value: 6
  misc_feature: MA Experiment 20000268 PARAMETER Experiment Name: At_100mM_NaCl__P Parameter: Tissue Value: Whole Plant
  misc_feature: MA Experiment 20000268 PARAMETER Experiment Name: At_100mM_NaCl__P Parameter: Treatment Value: 100mM NaCl vs. No Treatment
  misc_feature: MA Experiment ID: 20000269 Result: Down-regulated in Transcription
  misc_feature: MA Experiment 20000269 PARAMETER Experiment Name: At_1mM_KNO3_L-vs-H_Roots_P Parameter: Age (day) Value: 7,10,12
  misc_feature: MA Experiment 20000269 PARAMETER Experiment Name: At_1mM_KNO3_L-vs-H_Roots_P Parameter: Organism Value: A. thaliana
  misc_feature: MA Experiment 20000269 PARAMETER Experiment Name: At_1mM_KNO3_L-vs-H_Roots_P Parameter: Plant Line Value: WS
  misc_feature: MA Experiment 20000269 PARAMETER Experiment Name: At_1mM_KNO3_L-vs-H_Roots_P Parameter: Timepoint (day) Value: 7,10,12
  misc_feature: MA Experiment 20000269 PARAMETER Experiment Name: At_1mM_KNO3_L-vs-H_Roots_P Parameter: Tissue Value: Roots
  misc_feature: MA Experiment 20000269 PARAMETER Experiment Name: At_1mM_KNO3_L-vs-H_Roots_P Parameter: Treatment Value: 1mM KNO3 vs. 50mM KNO3
  misc_feature: MA Experiment ID: 20000286 Result: Down-regulated in Transcription
  misc_feature: MA Experiment 20000286 PARAMETER Experiment Name: At_Open_Flower_P Parameter: Age (day) Value: 21
  misc_feature: MA Experiment 20000286 PARAMETER Experiment Name: At_Open_Flower_P Parameter: Plant Line Value: WS
  misc_feature: MA Experiment 20000286 PARAMETER Experiment Name: At_Open_Flower_P Parameter: Tissue Value: Half Open vs. Whole Plant
  misc_feature: MA Experiment ID: 20000308 Result: Down-regulated in Transcription
  misc_feature: MA Experiment 20000308 PARAMETER Experiment Name: At_100mM_NaCl__P Parameter: Age (day) Value: 17
  misc_feature: MA Experiment 20000308 PARAMETER Experiment Name: At_100mM_NaCl__P Parameter: Organism Value: A. thaliana
  misc_feature: MA Experiment 20000308 PARAMETER Experiment Name: At_100mM_NaCl__P Parameter: Plant Line Value: WS
  misc_feature: MA Experiment 20000308 PARAMETER Experiment Name: At_100mM_NaCl__P Parameter: Timepoint (hr) Value: 72
  misc_feature: MA Experiment 20000308 PARAMETER Experiment Name: At_100mM_NaCl__P Parameter: Tissue Value: Whole Plant
  misc_feature: MA Experiment 20000308 PARAMETER Experiment Name: At_100mM_NaCl__P Parameter: Treatment Value: 100mM NaCl vs. No Treatment
  misc_feature: MA Experiment ID: 20000438 Result: Down-regulated in Transcription
  misc_feature: MA Experiment 20000438 PARAMETER Experiment Name: At_Shoots__P Parameter: Age (day) Value: 14
  misc_feature: MA Experiment 20000438 PARAMETER Experiment Name: At_Shoots__P Parameter: Tissue Value: Shoots vs. Whole Plant
  misc_feature: MA Experiment ID: 20000439 Result: Down-regulated in Transcription
  misc_feature: MA Experiment 20000439 PARAMETER Experiment Name: At_Roots__P Parameter: Age (day) Value: 14 vs. 21
  misc_feature: MA Experiment 20000439 PARAMETER Experiment Name: At_Roots__P Parameter: Organism Value: A. thaliana
  misc_feature: MA Experiment 20000439 PARAMETER Experiment Name: At_Roots__P Parameter: Tissue Value: Roots vs. Whole Plant
  misc_feature: MA Experiment ID: 20000441 Result: Up-regulated in Transcription
  misc_feature: MA Experiment 20000441 PARAMETER Experiment Name: At_1uM_BR-BRZ__P Parameter: Tissue Value: Shoot Apices
  misc_feature: MA Experiment 20000441 PARAMETER Experiment Name: At_1uM_BR-BRZ__P Parameter: Treatment Value: 1uM BR vs. No Treatment
  misc_feature: MA Experiment ID: 20000443 Result: Up-regulated in Transcription
  misc_feature: MA Experiment 20000443 PARAMETER Experiment Name: At_1uM_BR-BRZ__P Parameter: Tissue Value: Shoot Apices
  misc_feature: MA Experiment 20000443 PARAMETER Experiment Name: At_1uM_BR-BRZ__P Parameter: Treatment Value: 1uM BRZ vs. No Treatment
  misc_feature: MA Experiment ID: 20000452 Result: Down-regulated in Transcription
  misc_feature: MA Experiment 20000452 PARAMETER Experiment Name: At_CS6879_Shoots-Roots_P Parameter: Age (day) Value: 14
  misc_feature: MA Experiment 20000452 PARAMETER Experiment Name: At_CS6879_Shoots-Roots_P Parameter: Organism Value: A. thaliana
  misc_feature: MA Experiment 20000452 PARAMETER Experiment Name: At_CS6879_Shoots-Roots_P Parameter: Plant Line Value: CS6879 vs. WS
  misc_feature: MA Experiment 20000452 PARAMETER Experiment Name: At_CS6879_Shoots-Roots_P Parameter: Tissue Value: Shoots
  misc_feature: MA Experiment ID: 20000456 Result: Down-regulated in Transcription
  misc_feature: MA Experiment 20000456 PARAMETER Experiment Name: At_100uM_BA_P Parameter: Age (day) Value: 14
  misc_feature: MA Experiment 20000456 PARAMETER Experiment Name: At_100uM_BA_P Parameter: Organism Value: A. thaliana
  misc_feature: MA Experiment 20000456 PARAMETER Experiment Name: At_100uM_BA_P Parameter: Plant Line Value: WS
  misc_feature: MA Experiment 20000456 PARAMETER Experiment Name: At_100uM_BA_P Parameter: Timepoint (hr) Value: 6
  misc_feature: MA Experiment 20000456 PARAMETER Experiment Name: At_100uM_BA_P Parameter: Tissue Value: Aerial
  misc_feature: MA Experiment 20000456 PARAMETER Experiment Name: At_100uM_BA_P Parameter: Treatment Value: 100uM BA vs. No Treatment
  misc_feature: MA Experiment ID: 20000573 Result: Up-regulated in Transcription
  misc_feature: MA Experiment 20000573 PARAMETER Experiment Name: At_100uM_ABA_Mutants__P Parameter: Organism Value: A. thaliana
  misc_feature: MA Experiment 20000573 PARAMETER Experiment Name: At_100uM_ABA_Mutants__P Parameter: Plant Line Value: CS22 vs. Ler wt
  misc_feature: MA Experiment 20000573 PARAMETER Experiment Name: At_100uM_ABA_Mutants__P Parameter: Timepoint (hr) Value: N/A
  misc_feature: MA Experiment 20000573 PARAMETER Experiment Name: At_100uM_ABA_Mutants__P Parameter: Tissue Value: Whole Plant
  misc_feature: MA Experiment 20000573 PARAMETER Experiment Name: At_100uM_ABA_Mutants__P Parameter: Treatment Value: None
  misc_feature: MA Experiment ID: 20000709 Result: Up-regulated in Transcription
  misc_feature: MA Experiment 20000709 PARAMETER Experiment Name: At_15mM_NH4NO3_L-to-H_P Parameter: Age (hr) Value: 14
  misc_feature: MA Experiment 20000709 PARAMETER Experiment Name: At_15mM_NH4NO3_L-to-H_P Parameter: Organism Value: A. thaliana
  misc_feature: MA Experiment 20000709 PARAMETER Experiment Name: At_15mM_NH4NO3_L-to-H_P Parameter: Plant Line Value: WS
  misc_feature: MA Experiment 20000709 PARAMETER Experiment Name: At_15mM_NH4NO3_L-to-H_P Parameter: Timepoint (hr) Value: 4
  misc_feature: MA Experiment 20000709 PARAMETER Experiment Name: At_15mM_NH4NO3_L-to-H_P Parameter: Tissue Value: Aerial
  misc_feature: MA Experiment 20000709 PARAMETER Experiment Name: At_15mM_NH4NO3_L-to-H_P Parameter: Treatment Value: 15mM NH4NO3 vs. 30mM Mannitol
  misc_feature: MA Experiment ID: 20000794 Result: Up-regulated in Transcription
  misc_feature: MA Experiment 20000794 PARAMETER Experiment Name: At_Petals_P Parameter: Age (day) Value: 23-25 days
  misc_feature: MA Experiment 20000794 PARAMETER Experiment Name: At_Petals_P Parameter: Plant Line Value: WS
  misc_feature: MA Experiment 20000794 PARAMETER Experiment Name: At_Petals_P Parameter: Tissue Value: Petals vs. Whole plant
  misc_feature: MA Experiment ID: 20001247 Result: Up-regulated in Transcription
  misc_feature: MA Experiment 20001247 PARAMETER Experiment Name: At_Far-red-induction_P Parameter: Age (day) Value: 7
  misc_feature: MA Experiment 20001247 PARAMETER Experiment Name: At_Far-red-induction_P Parameter: Light Value: Far-red vs. White
  misc_feature: MA Experiment 20001247 PARAMETER Experiment Name: At_Far-red-induction_P Parameter: Organism Value: A. thaliana
  misc_feature: MA Experiment 20001247 PARAMETER Experiment Name: At_Far-red-induction_P Parameter: Plant Line Value: Columbia
  misc_feature: MA Experiment 20001247 PARAMETER Experiment Name: At_Far-red-induction_P Parameter: Timepoint (hr) Value: 1
  misc_feature: MA Experiment 20001247 PARAMETER Experiment Name: At_Far-red-induction_P Parameter: Tissue Value: Whole Plant
  misc_feature: MA Experiment ID: 20001248 Result: Up-regulated in Transcription
  misc_feature: MA Experiment 20001248 PARAMETER Experiment Name: At_Far-red-induction_P Parameter: Age (day) Value: 7
  misc_feature: MA Experiment 20001248 PARAMETER Experiment Name: At_Far-red-induction_P Parameter: Light Value: Far-red vs. White
  misc_feature: MA Experiment 20001248 PARAMETER Experiment Name: At_Far-red-induction_P Parameter: Organism Value: A. thaliana
  misc_feature: MA Experiment 20001248 PARAMETER Experiment Name: At_Far-red-induction_P Parameter: Plant Line Value: Columbia
  misc_feature: MA Experiment 20001248 PARAMETER Experiment Name: At_Far-red-induction_P Parameter: Timepoint (hr) Value: 4
  misc_feature: MA Experiment 20001248 PARAMETER Experiment Name: At_Far-red-induction_P Parameter: Tissue Value: Whole Plant
  misc_feature: MA Experiment ID: 20001450 Result: Up-regulated in Transcription
  misc_feature: MA Experiment 20001450 PARAMETER Experiment Name: At_Far-red-induction_P Parameter: Age (day) Value: 7
  misc_feature: MA Experiment 20001450 PARAMETER Experiment Name: At_Far-red-induction_P Parameter: Light Value: Far-red vs. White
  misc_feature: MA Experiment 20001450 PARAMETER Experiment Name: At_Far-red-induction_P Parameter: Organism Value: A. thaliana
  misc_feature: MA Experiment 20001450 PARAMETER Experiment Name: At_Far-red-induction_P Parameter: Plant Line Value: Columbia
  misc_feature: MA Experiment 20001450 PARAMETER Experiment Name: At_Far-red-induction_P Parameter: Timepoint (hr) Value: 8
  misc_feature: MA Experiment 20001450 PARAMETER Experiment Name: At_Far-red-induction_P Parameter: Tissue Value: Whole Plant
  misc_feature: MA Experiment ID: 20001451 Result: Up-regulated in Transcription
  misc_feature: MA Experiment 20001451 PARAMETER Experiment Name: At_Far-red-induction_P Parameter: Age (day) Value: 7
  misc_feature: MA Experiment 20001451 PARAMETER Experiment Name: At_Far-red-induction_P Parameter: Light Value: Far-red vs. White
  misc_feature: MA Experiment 20001451 PARAMETER Experiment Name: At_Far-red-induction_P Parameter: Organism Value: A. thaliana
  misc_feature: MA Experiment 20001451 PARAMETER Experiment Name: At_Far-red-induction_P Parameter: Plant Line Value: Columbia
  misc_feature: MA Experiment 20001451 PARAMETER Experiment Name: At_Far-red-induction_P Parameter: Timepoint (hr) Value: 24
  misc_feature: MA Experiment 20001451 PARAMETER Experiment Name: At_Far-red-induction_P Parameter: Tissue Value: Whole Plant
  misc_feature: MA Experiment ID: 20001556 Result: Down-regulated in Transcription
  misc_feature: MA Experiment 20001556 PARAMETER Experiment Name: At_Drought_Soil_Dry_P Parameter: Age (day) Value: 26
  misc_feature: MA Experiment 20001556 PARAMETER Experiment Name: At_Drought_Soil_Dry_P Parameter: Organism Value: A. thaliana
  misc_feature: MA Experiment 20001556 PARAMETER Experiment Name: At_Drought_Soil_Dry_P Parameter: Plant Line Value: WS
  misc_feature: MA Experiment 20001556 PARAMETER Experiment Name: At_Drought_Soil_Dry_P Parameter: Post Timepoint (hr) Value: None
  misc_feature: MA Experiment 20001556 PARAMETER Experiment Name: At_Drought_Soil_Dry_P Parameter: Post-Treatment Value: None
  misc_feature: MA Experiment 20001556 PARAMETER Experiment Name: At_Drought_Soil_Dry_P Parameter: Timepoint (day) Value: 12
  misc_feature: MA Experiment 20001556 PARAMETER Experiment Name: At_Drought_Soil_Dry_P Parameter: Treatment Value: Drought vs. No Drought
  misc_feature: MA Experiment ID: 20001559 Result: Down-regulated in Transcription
  misc_feature: MA Experiment 20001559 PARAMETER Experiment Name: At_Drought_Soil_Dry_P Parameter: Age (day) Value: 28
  misc_feature: MA Experiment 20001559 PARAMETER Experiment Name: At_Drought_Soil_Dry_P Parameter: Organism Value: A. thaliana
  misc_feature: MA Experiment 20001559 PARAMETER Experiment Name: At_Drought_Soil_Dry_P Parameter: Plant Line Value: WS
  misc_feature: MA Experiment 20001559 PARAMETER Experiment Name: At_Drought_Soil_Dry_P Parameter: Post Timepoint (hr) Value: 29
  misc_feature: MA Experiment 20001559 PARAMETER Experiment Name: At_Drought_Soil_Dry_P Parameter: Post-Treatment Value: Re-Water vs. No Drought
  misc_feature: MA Experiment 20001559 PARAMETER Experiment Name: At_Drought_Soil_Dry_P Parameter: Timepoint (day) Value: 14
  misc_feature: MA Experiment 20001559 PARAMETER Experiment Name: At_Drought_Soil_Dry_P Parameter: Treatment Value: Drought vs. No Drought
  misc_feature: MA Experiment ID: 20001560 Result: Down-regulated in Transcription
  misc_feature: MA Experiment 20001560 PARAMETER Experiment Name: At_Drought_Soil_Dry_P Parameter: Age (day) Value: 28
  misc_feature: MA Experiment 20001560 PARAMETER Experiment Name: At_Drought_Soil_Dry_P Parameter: Organism Value: A. thaliana
  misc_feature: MA Experiment 20001560 PARAMETER Experiment Name: At_Drought_Soil_Dry_P Parameter: Plant Line Value: WS
  misc_feature: MA Experiment 20001560 PARAMETER Experiment Name: At_Drought_Soil_Dry_P Parameter: Post Timepoint (hr) Value: None
  misc_feature: MA Experiment 20001560 PARAMETER Experiment Name: At_Drought_Soil_Dry_P Parameter: Post-Treatment Value: None
  misc_feature: MA Experiment 20001560 PARAMETER Experiment Name: At_Drought_Soil_Dry_P Parameter: Timepoint (day) Value: 14
  misc_feature: MA Experiment 20001560 PARAMETER Experiment Name: At_Drought_Soil_Dry_P Parameter: Treatment Value: Drought vs. No Drought
  misc_feature: MA Experiment ID: 20001757 Result: Up-regulated in Transcription
  misc_feature: MA Experiment 20001757 PARAMETER Experiment Name: At_50mM_NH4NO3_L-to-H_P Parameter: Timepoint (hr) Value: 6
  misc_feature: MA Experiment 20001757 PARAMETER Experiment Name: At_50mM_NH4NO3_L-to-H_P Parameter: Tissue Value: Leaf
  misc_feature: MA Experiment 20001757 PARAMETER Experiment Name: At_50mM_NH4NO3_L-to-H_P Parameter: Treatment Value: 50mM NH4NO3 vs 100mM Mannitol
  misc_feature: MA Experiment ID: 20001769 Result: Down-regulated in Transcription
  misc_feature: MA Experiment 20001769 PARAMETER Experiment Name: At_Far-red-enriched-adult_P Parameter: Age (day) Value: 28
  misc_feature: MA Experiment 20001769 PARAMETER Experiment Name: At_Far-red-enriched-adult_P Parameter: Light Value: Far-red enriched vs. White
  misc_feature: MA Experiment 20001769 PARAMETER Experiment Name: At_Far-red-enriched-adult_P Parameter: Organism Value: A. thaliana
  misc_feature: MA Experiment 20001769 PARAMETER Experiment Name: At_Far-red-enriched-adult_P Parameter: Plant Line Value: Columbia
  misc_feature: MA Experiment 20001769 PARAMETER Experiment Name: At_Far-red-enriched-adult_P Parameter: Timepoint (hr) Value: 4
  misc_feature: MA Experiment 20001769 PARAMETER Experiment Name: At_Far-red-enriched-adult_P Parameter: Tissue Value: Aerial
  misc_feature: MA Experiment ID: 20001905 Result: Down-regulated in Transcription
  misc_feature: MA Experiment 20001905 PARAMETER Experiment Name: At_Drought_Reproduction_P Parameter: Age (day) Value: 40
  misc_feature: MA Experiment 20001905 PARAMETER Experiment Name: At_Drought_Reproduction_P Parameter: Organism Value: A. thaliana
  misc_feature: MA Experiment 20001905 PARAMETER Experiment Name: At_Drought_Reproduction_P Parameter: Plant Line Value: WS
  misc_feature: MA Experiment 20001905 PARAMETER Experiment Name: At_Drought_Reproduction_P Parameter: Timepoint (day) Value: 10
  misc_feature: MA Experiment 20001905 PARAMETER Experiment Name: At_Drought_Reproduction_P Parameter: Tissue Value: Rosettes
  misc_feature: MA Experiment 20001905 PARAMETER Experiment Name: At_Drought_Reproduction_P Parameter: Treatment Value: Drought vs. No Drought
  misc_feature: MA Experiment ID: 20001911 Result: Down-regulated in Transcription
  misc_feature: MA Experiment 20001911 PARAMETER Experiment Name: At_Drought_Reproduction_P Parameter: Age (day) Value: 40
  misc_feature: MA Experiment 20001911 PARAMETER Experiment Name: At_Drought_Reproduction_P Parameter: Organism Value: A. thaliana
  misc_feature: MA Experiment 20001911 PARAMETER Experiment Name: At_Drought_Reproduction_P Parameter: Plant Line Value: WS
  misc_feature: MA Experiment 20001911 PARAMETER Experiment Name: At_Drought_Reproduction_P Parameter: Timepoint (day) Value: 10
  misc_feature: MA Experiment 20001911 PARAMETER Experiment Name: At_Drought_Reproduction_P Parameter: Tissue Value: Flowers
  misc_feature: MA Experiment 20001911 PARAMETER Experiment Name: At_Drought_Reproduction_P Parameter: Treatment Value: Drought vs. No Drought

SEQ ID NO: 49226 - protein, 798 aa, Arabidopsis thaliana; identical to SEQ ID NO: 46444
  peptide (1)..(798): Ceres Seq. ID no. 12600668
  misc_feature (424)..(654): Pfam Name: Glycosyl hydrolase family 3 C terminal domain Pfam Description: Glycosyl hydrolase family 3 C terminal domain
  misc_feature (424)..(654): Pfam Name: Glycosyl hydrolase family 3 C terminal domain Pfam Description: Glycosyl hydrolase family 3 C terminal domain
  misc_feature (424)..(654): Pfam Name: Glycosyl hydrolase family 3 C terminal domain Pfam Description: Glycosyl hydrolase family 3 C terminal domain
  misc_feature (226)..(795): Homolog of NCBI NO: 15238197 NR Description: glycosyl hydrolase family 3
  misc_feature (40)..(794): Homolog of NCBI NO: 15218202 NR Description: glycosyl hydrolase family 3
  misc_feature (37)..(786): Homolog of NCBI NO: 25453520 NR Description: beta-1,4-xylosidase [imported] - Arabidopsis
  misc_feature (37)..(786): Homolog of NCBI NO: 15230897 NR Description: glycosyl hydrolase family 3; protein id:
  misc_feature (52)..(792): Homolog of NCBI NO: 18025340 NR Description: alpha-L-arabinofuranosidase/beta-D-xylosidase
  misc_feature (226)..(795): Homolog of NCBI NO: 15238197 NR Description: glycosyl hydrolase family 3
  misc_feature (37)..(786): Homolog of NCBI NO: 25453520 NR Description: beta-1,4-xylosidase [imported] - Arabidopsis
  misc_feature (52)..(792): Homolog of NCBI NO: 18025340 NR Description: alpha-L-arabinofuranosidase/beta-D-xylosidase
  misc_feature (37)..(786): Homolog of NCBI NO: 15230897 NR Description: glycosyl hydrolase family 3; protein id:
  misc_feature (37)..(786): Homolog of NCBI NO: 25453520 NR Description: beta-1,4-xylosidase [imported] - Arabidopsis
  misc_feature (40)..(794): Homolog of NCBI NO: 15218202 NR Description: glycosyl hydrolase family 3
  misc_feature (226)..(795): Homolog of NCBI NO: 15238197 NR Description: glycosyl hydrolase family 3
  misc_feature (33)..(795): Homolog of NCBI NO: 18378991 NR Description: glycosyl hydrolase family 3
  misc_feature (38)..(795): Homolog of NCBI NO: 25518461 NR Description: hypothetical protein T14P4.8 - Arabidopsis
  misc_feature (38)..(795): Homolog of NCBI NO: 15237736 NR Description: glycosyl hydrolase family 3; protein id:
  misc_feature (35)..(792): Homolog of NCBI NO: 38344900 NR Description: OSJNBb0079B02.3 [Oryza sativa (japonica
  misc_feature (25)..(792): Homolog of NCBI NO: 15242492 NR Description: glycosyl hydrolase family 3
  misc_feature (33)..(795): Homolog of NCBI NO: 18378991 NR Description: glycosyl hydrolase family 3
  misc_feature (38)..(795): Homolog of NCBI NO: 25518461 NR Description: hypothetical protein T14P4.8 - Arabidopsis
  misc_feature (38)..(795): Homolog of NCBI NO: 15237736 NR Description: glycosyl hydrolase family 3; protein id:
  misc_feature (35)..(792): Homolog of NCBI NO: 38344900 NR Description: OSJNBb0079B02.3 [Oryza sativa (japonica
  misc_feature (25)..(792): Homolog of NCBI NO: 15242492 NR Description: glycosyl hydrolase family 3
  misc_feature (52)..(792): Homolog of NCBI NO: 18025340 NR Description: alpha-L-arabinofuranosidase/beta-D-xylosidase
  misc_feature (37)..(786): Homolog of NCBI NO: 15230897 NR Description: glycosyl hydrolase family 3; protein id:
  misc_feature (40)..(794): Homolog of NCBI NO: 15218202 NR Description: glycosyl hydrolase family 3
  misc_feature (25)..(792): Homolog of NCBI NO: 15242492 NR Description: glycosyl hydrolase family 3
  misc_feature (35)..(792): Homolog of NCBI NO: 38344900 NR Description: OSJNBb0079B02.3 [Oryza sativa (japonica
  misc_feature (38)..(795): Homolog of NCBI NO: 15237736 NR Description: glycosyl hydrolase family 3; protein id:
  misc_feature (38)..(795): Homolog of NCBI NO: 25518461 NR Description: hypothetical protein T14P4.8 - Arabidopsis
  misc_feature (33)..(795): Homolog of NCBI NO: 18378991 NR Description: glycosyl hydrolase family 3

SEQ ID NO: 49227 - protein, 774 aa, Arabidopsis thaliana; identical to SEQ ID NO: 46445
  peptide (1)..(774): Ceres Seq. ID no. 12600669
  misc_feature (400)..(630): Pfam Name: Glycosyl hydrolase family 3 C terminal domain Pfam Description: Glycosyl hydrolase family 3 C terminal domain
  misc_feature (400)..(630): Pfam Name: Glycosyl hydrolase family 3 C terminal domain Pfam Description: Glycosyl hydrolase family 3 C terminal domain
  misc_feature (400)..(630): Pfam Name: Glycosyl hydrolase family 3 C terminal domain Pfam Description: Glycosyl hydrolase family 3 C terminal domain
  misc_feature (202)..(771): Homolog of NCBI NO: 15238197 NR Description: glycosyl hydrolase family 3
  misc_feature (16)..(770): Homolog of NCBI NO: 15218202 NR Description: glycosyl hydrolase family 3
  misc_feature (13)..(762): Homolog of NCBI NO: 25453520 NR Description: beta-1,4-xylosidase [imported] - Arabidopsis
  misc_feature (13)..(762): Homolog of NCBI NO: 15230897 NR Description: glycosyl hydrolase family 3; protein id:
  misc_feature (28)..(768): Homolog of NCBI NO: 18025340 NR Description: alpha-L-arabinofuranosidase/beta-D-xylosidase
  misc_feature (202)..(771): Homolog of NCBI NO: 15238197 NR Description: glycosyl hydrolase family 3
  misc_feature (13)..(762): Homolog of NCBI NO: 25453520 NR Description: beta-1,4-xylosidase [imported] - Arabidopsis
  misc_feature (28)..(768): Homolog of NCBI NO: 18025340 NR Description: alpha-L-arabinofuranosidase/beta-D-xylosidase
  misc_feature (13)..(762): Homolog of NCBI NO: 15230897 NR Description: glycosyl hydrolase family 3; protein id:
  misc_feature (13)..(762): Homolog of NCBI NO: 25453520 NR Description: beta-1,4-xylosidase [imported] - Arabidopsis
  misc_feature (16)..(770): Homolog of NCBI NO: 15218202 NR Description: glycosyl hydrolase family 3
  misc_feature (202)..(771): Homolog of NCBI NO: 15238197 NR Description: glycosyl hydrolase family 3
  misc_feature (9)..(771): Homolog of NCBI NO: 18378991 NR Description: glycosyl hydrolase family 3
  misc_feature (14)..(771): Homolog of NCBI NO: 25518461 NR Description: hypothetical protein T14P4.8 - Arabidopsis
  misc_feature (14)..(771): Homolog of NCBI NO: 15237736 NR Description: glycosyl hydrolase family 3; protein id:
  misc_feature (11)..(768): Homolog of NCBI NO: 38344900 NR Description: OSJNBb0079B02.3 [Oryza sativa (japonica
  misc_feature (1)..(768): Homolog of NCBI NO: 15242492 NR Description: glycosyl hydrolase family 3
  misc_feature (9)..(771): Homolog of NCBI NO: 18378991 NR Description: glycosyl hydrolase family 3
  misc_feature (14)..(771): Homolog of NCBI NO: 25518461 NR Description: hypothetical protein T14P4.8 - Arabidopsis
  misc_feature (14)..(771): Homolog of NCBI NO: 15237736 NR Description: glycosyl hydrolase family 3; protein id:
  misc_feature (11)..(768): Homolog of NCBI NO: 38344900 NR Description: OSJNBb0079B02.3 [Oryza sativa (japonica
  misc_feature (1)..(768): Homolog of NCBI NO: 15242492 NR Description: glycosyl hydrolase family 3
  misc_feature (28)..(768): Homolog of NCBI NO: 18025340 NR Description: alpha-L-arabinofuranosidase/beta-D-xylosidase
  misc_feature (13)..(762): Homolog of NCBI NO: 15230897 NR Description: glycosyl hydrolase family 3; protein id:
  misc_feature (16)..(770): Homolog of NCBI NO: 15218202 NR Description: glycosyl hydrolase family 3
  misc_feature (1)..(768): Homolog of NCBI NO: 15242492 NR Description: glycosyl hydrolase family 3
  misc_feature (11)..(768): Homolog of NCBI NO: 38344900 NR Description: OSJNBb0079B02.3 [Oryza sativa (japonica
  misc_feature (14)..(771): Homolog of NCBI NO: 15237736 NR Description: glycosyl hydrolase family 3; protein id:
  misc_feature (14)..(771): Homolog of NCBI NO: 25518461 NR Description: hypothetical protein T14P4.8 - Arabidopsis
  misc_feature (9)..(771): Homolog of NCBI NO: 18378991 NR Description: glycosyl hydrolase family 3

SEQ ID NO: 49228 - protein, 626 aa, Arabidopsis thaliana; identical to SEQ ID NO: 46446
  peptide (1)..(626): Ceres Seq. ID no. 12600670
  misc_feature (252)..(482): Pfam Name: Glycosyl hydrolase family 3 C terminal domain Pfam Description: Glycosyl hydrolase family 3 C terminal domain
  misc_feature (252)..(482): Pfam Name: Glycosyl hydrolase family 3 C terminal domain Pfam Description: Glycosyl hydrolase family 3 C terminal domain
  misc_feature (252)..(482): Pfam Name: Glycosyl hydrolase family 3 C terminal domain Pfam Description: Glycosyl hydrolase family 3 C terminal domain
  misc_feature (54)..(623): Homolog of NCBI NO: 15238197 NR Description: glycosyl hydrolase family 3
  misc_feature (1)..(622): Homolog of NCBI NO: 15218202 NR Description: glycosyl hydrolase family 3
  misc_feature (1)..(614): Homolog of NCBI NO: 25453520 NR Description: beta-1,4-xylosidase [imported] - Arabidopsis
  misc_feature (1)..(614): Homolog of NCBI NO: 15230897 NR Description: glycosyl hydrolase family 3; protein id:
  misc_feature (1)..(620): Homolog of NCBI NO: 18025340 NR Description: alpha-L-arabinofuranosidase/beta-D-xylosidase
  misc_feature (54)..(623): Homolog of NCBI NO: 15238197 NR Description: glycosyl hydrolase family 3
  misc_feature (1)..(614): Homolog of NCBI NO: 25453520 NR Description: beta-1,4-xylosidase [imported] - Arabidopsis
  misc_feature (1)..(620): Homolog of NCBI NO: 18025340 NR Description: alpha-L-arabinofuranosidase/beta-D-xylosidase
  misc_feature (1)..(614): Homolog of NCBI NO: 15230897 NR Description: glycosyl hydrolase family 3; protein id:
  misc_feature (1)..(614): Homolog of NCBI NO: 25453520 NR Description: beta-1,4-xylosidase [imported] - Arabidopsis
  misc_feature (1)..(622): Homolog of NCBI NO: 15218202 NR Description: glycosyl hydrolase family 3
  misc_feature (54)..(623): Homolog of NCBI NO: 15238197 NR Description: glycosyl hydrolase family 3
  misc_feature (1)..(623): Homolog of NCBI NO: 18378991 NR Description: glycosyl hydrolase family 3
  misc_feature (1)..(623): Homolog of NCBI NO: 25518461 NR Description: hypothetical protein T14P4.8 - Arabidopsis
  misc_feature (1)..(623): Homolog of NCBI NO: 15237736 NR Description: glycosyl hydrolase family 3; protein id:
  misc_feature (1)..(620): Homolog of NCBI NO: 38344900 NR Description: OSJNBb0079B02.3 [Oryza sativa (japonica
  misc_feature (1)..(620): Homolog of NCBI NO: 15242492 NR Description: glycosyl hydrolase family 3
  misc_feature (1)..(623): Homolog of NCBI NO: 18378991 NR Description: glycosyl hydrolase family 3
  misc_feature (1)..(623): Homolog of NCBI NO: 25518461 NR Description: hypothetical protein T14P4.8 - Arabidopsis
  misc_feature (1)..(623): Homolog of NCBI NO: 15237736 NR Description: glycosyl hydrolase family 3; protein id:
  misc_feature (1)..(620): Homolog of NCBI NO: 38344900 NR Description: OSJNBb0079B02.3 [Oryza sativa (japonica
  misc_feature (1)..(620): Homolog of NCBI NO: 15242492 NR Description: glycosyl hydrolase family 3
  misc_feature (1)..(620): Homolog of NCBI NO: 18025340 NR Description: alpha-L-arabinofuranosidase/beta-D-xylosidase
  misc_feature (1)..(614): Homolog of NCBI NO: 15230897 NR Description: glycosyl hydrolase family 3; protein id:
  misc_feature (1)..(622): Homolog of NCBI NO: 15218202 NR Description: glycosyl hydrolase family 3
  misc_feature (1)..(620): Homolog of NCBI NO: 15242492 NR Description: glycosyl hydrolase family 3
  misc_feature (1)..(620): Homolog of NCBI NO: 38344900 NR Description: OSJNBb0079B02.3 [Oryza sativa (japonica
  misc_feature (1)..(623): Homolog of NCBI NO: 15237736 NR Description: glycosyl hydrolase family 3; protein id:
  misc_feature (1)..(623): Homolog of NCBI NO: 25518461 NR Description: hypothetical protein T14P4.8 - Arabidopsis
  misc_feature (1)..(623): Homolog of NCBI NO: 18378991 NR Description: glycosyl hydrolase family 3

SEQ ID NO: 49229 - DNA, 640 bp, Arabidopsis thaliana; identical to SEQ ID NO: 38920
  misc_feature (1)..(640): Ceres Seq. ID no. 12652846
  misc_feature: MA Experiment ID: 108434 Result: Down-regulated in Transcription
  misc_feature: MA Experiment 108434 PARAMETER Experiment Name: At_Root_Tips_cDNA_P Parameter: Tissue Value: Root Tips
  misc_feature: MA Experiment ID: 108462 Result: Up-regulated in Transcription
  misc_feature: MA Experiment 108462 PARAMETER Experiment Name: At_Germinating_Seeds_cDNA_P Parameter: Age (day) Value: 2 vs. 0
  misc_feature: MA Experiment 108462 PARAMETER Experiment Name: At_Germinating_Seeds_cDNA_P Parameter: Tissue Value: Germinating Seeds
  misc_feature: MA Experiment ID: 108488 Result: Up-regulated in Transcription
  misc_feature: MA Experiment ID: 108605 Result: Up-regulated in Transcription
  misc_feature: MA Experiment 108605 PARAMETER Experiment Name: At_100uM_ABA_cDNA_P Parameter: Timepoint (hr) Value: 6
  misc_feature: MA Experiment 108605 PARAMETER Experiment Name: At_100uM_ABA_cDNA_P Parameter: Tissue Value: Aerial
  misc_feature: MA Experiment 108605 PARAMETER Experiment Name: At_100uM_ABA_cDNA_P Parameter: Treatment Value: 100uM ABA vs. No Treatment
  misc_feature: MA Experiment ID: 20000169 Result: Up-regulated in Transcription
  misc_feature: MA Experiment 20000169 PARAMETER Experiment Name: At_100uM_ABA_P Parameter: Age (day) Value: 14
  misc_feature: MA Experiment 20000169 PARAMETER Experiment Name: At_100uM_ABA_P Parameter: Organism Value: A. thaliana
  misc_feature: MA Experiment 20000169 PARAMETER Experiment Name: At_100uM_ABA_P Parameter: Plant Line Value: WS
  misc_feature: MA Experiment 20000169 PARAMETER Experiment Name: At_100uM_ABA_P Parameter: Timepoint (hr) Value: 6
  misc_feature: MA Experiment 20000169 PARAMETER Experiment Name: At_100uM_ABA_P Parameter: Tissue Value: Aerial
  misc_feature: MA Experiment 20000169 PARAMETER Experiment Name: At_100uM_ABA_P Parameter: Treatment Value: 100uM ABA vs. No Treatment
  misc_feature: MA Experiment ID: 20000180 Result: Up-regulated in Transcription
  misc_feature: MA Experiment 20000180 PARAMETER Experiment Name: At_Germinating_Seeds_P Parameter: Age (hr) Value: 24 vs. 0
  misc_feature: MA Experiment 20000180 PARAMETER Experiment Name: At_Germinating_Seeds_P Parameter: Tissue Value: Germinating Seeds
  misc_feature: MA Experiment ID: 20000184 Result: Up-regulated in Transcription
  misc_feature: MA Experiment 20000184 PARAMETER Experiment Name: At_Shoots__P Parameter: Age (day) Value: 7
  misc_feature: MA Experiment 20000184 PARAMETER Experiment Name: At_Shoots__P Parameter: Tissue Value: Shoots vs. Whole Plant
  misc_feature: MA Experiment ID: 20000227 Result: Down-regulated in Transcription
  misc_feature: MA Experiment 20000227 PARAMETER Experiment Name: At_Root-Tips-vs-Tops_P Parameter: Tissue Value: Root Tips vs. Root Tops
  misc_feature: MA Experiment ID: 20000264 Result: Up-regulated in Transcription
  misc_feature: MA Experiment 20000264 PARAMETER Experiment Name: At_Open_Flower_P Parameter: Age (day) Value: 21
  misc_feature: MA Experiment 20000264 PARAMETER Experiment Name: At_Open_Flower_P Parameter: Plant Line Value: WS
  misc_feature: MA Experiment 20000264 PARAMETER Experiment Name: At_Open_Flower_P Parameter: Tissue Value: Open Flower vs. Whole Plant
  misc_feature: MA Experiment ID: 20000438 Result: Up-regulated in Transcription
  misc_feature: MA Experiment 20000438 PARAMETER Experiment Name: At_Shoots__P Parameter: Age (day) Value: 14
  misc_feature: MA Experiment 20000438 PARAMETER Experiment Name: At_Shoots__P Parameter: Tissue Value: Shoots vs. Whole Plant
  misc_feature: MA Experiment ID: 20000439 Result: Down-regulated in Transcription
  misc_feature: MA Experiment 20000439 PARAMETER Experiment Name: At_Roots__P Parameter: Age (day) Value: 14 vs. 21
  misc_feature: MA Experiment 20000439 PARAMETER Experiment Name: At_Roots__P Parameter: Organism Value: A. thaliana
  misc_feature: MA Experiment 20000439 PARAMETER Experiment Name: At_Roots__P Parameter: Tissue Value: Roots vs. Whole Plant
  misc_feature: MA Experiment ID: 20000451 Result: Up-regulated in Transcription
  misc_feature: MA Experiment 20000451 PARAMETER Experiment Name: At_CS6879_Shoots-Roots_P Parameter: Age (day) Value: 14
  misc_feature: MA Experiment 20000451 PARAMETER Experiment Name: At_CS6879_Shoots-Roots_P Parameter: Organism Value: A. thaliana
  misc_feature: MA Experiment 20000451 PARAMETER Experiment Name: At_CS6879_Shoots-Roots_P Parameter: Plant Line Value: CS6879 vs. WS
  misc_feature: MA Experiment 20000451 PARAMETER Experiment Name: At_CS6879_Shoots-Roots_P Parameter: Tissue Value: Roots
  misc_feature: MA Experiment ID: 20000794 Result: Up-regulated in Transcription
  misc_feature: MA Experiment 20000794 PARAMETER Experiment Name: At_Petals_P Parameter: Age (day) Value: 23-25 days
  misc_feature: MA Experiment 20000794 PARAMETER Experiment Name: At_Petals_P Parameter: Plant Line Value: WS
  misc_feature: MA Experiment 20000794 PARAMETER Experiment Name: At_Petals_P Parameter: Tissue Value: Petals vs. Whole plant
  misc_feature: MA Experiment ID: 20001555 Result: Up-regulated in Transcription
  misc_feature: MA Experiment 20001555 PARAMETER Experiment Name: At_Drought_Soil_Dry_P Parameter: Age (day) Value: 24
  misc_feature: MA Experiment 20001555 PARAMETER Experiment Name: At_Drought_Soil_Dry_P Parameter: Organism Value: A. thaliana
  misc_feature: MA Experiment 20001555 PARAMETER Experiment Name: At_Drought_Soil_Dry_P Parameter: Plant Line Value: WS
  misc_feature: MA Experiment 20001555 PARAMETER Experiment Name: At_Drought_Soil_Dry_P Parameter: Post Timepoint (hr) Value: None
  misc_feature: MA Experiment 20001555 PARAMETER Experiment Name: At_Drought_Soil_Dry_P Parameter: Post-Treatment Value: None
  misc_feature: MA Experiment 20001555 PARAMETER Experiment Name: At_Drought_Soil_Dry_P Parameter: Timepoint (day) Value: 10
  misc_feature: MA Experiment 20001555 PARAMETER Experiment Name: At_Drought_Soil_Dry_P Parameter: Treatment Value: Drought vs. No Drought
  misc_feature: MA Experiment ID: 20001556 Result: Up-regulated in Transcription
  misc_feature: MA Experiment 20001556 PARAMETER Experiment Name: At_Drought_Soil_Dry_P Parameter: Age (day) Value: 26
  misc_feature: MA Experiment 20001556 PARAMETER Experiment Name: At_Drought_Soil_Dry_P Parameter: Organism Value: A. thaliana
  misc_feature: MA Experiment 20001556 PARAMETER Experiment Name: At_Drought_Soil_Dry_P Parameter: Plant Line Value: WS
  misc_feature: MA Experiment 20001556 PARAMETER Experiment Name: At_Drought_Soil_Dry_P Parameter: Post Timepoint (hr) Value: None
  misc_feature: MA Experiment 20001556 PARAMETER Experiment Name: At_Drought_Soil_Dry_P Parameter: Post-Treatment Value: None
  misc_feature: MA Experiment 20001556 PARAMETER Experiment Name: At_Drought_Soil_Dry_P Parameter: Timepoint (day) Value: 12
  misc_feature: MA Experiment 20001556 PARAMETER Experiment Name: At_Drought_Soil_Dry_P Parameter: Treatment Value: Drought vs. No Drought
  misc_feature: MA Experiment ID: 20001559 Result: Up-regulated in Transcription
  misc_feature: MA Experiment 20001559 PARAMETER Experiment Name: At_Drought_Soil_Dry_P Parameter: Age (day) Value: 28
  misc_feature: MA Experiment 20001559 PARAMETER Experiment Name: At_Drought_Soil_Dry_P Parameter: Organism Value: A. thaliana
  misc_feature: MA Experiment 20001559 PARAMETER Experiment Name: At_Drought_Soil_Dry_P Parameter: Plant Line Value: WS
  misc_feature: MA Experiment 20001559 PARAMETER Experiment Name: At_Drought_Soil_Dry_P Parameter: Post Timepoint (hr) Value: 29
  misc_feature: MA Experiment 20001559 PARAMETER Experiment Name: At_Drought_Soil_Dry_P Parameter: Post-Treatment Value: Re-Water vs. No Drought
  misc_feature: MA Experiment 20001559 PARAMETER Experiment Name: At_Drought_Soil_Dry_P Parameter: Timepoint (day) Value: 14
  misc_feature: MA Experiment 20001559 PARAMETER Experiment Name: At_Drought_Soil_Dry_P Parameter: Treatment Value: Drought vs. No Drought
  misc_feature: MA Experiment ID: 20001560 Result: Up-regulated in Transcription
  misc_feature: MA Experiment 20001560 PARAMETER Experiment Name: At_Drought_Soil_Dry_P Parameter: Age (day) Value: 28
  misc_feature: MA Experiment 20001560 PARAMETER Experiment Name: At_Drought_Soil_Dry_P Parameter: Organism Value: A. thaliana
  misc_feature: MA Experiment 20001560 PARAMETER Experiment Name: At_Drought_Soil_Dry_P Parameter: Plant Line Value: WS
  misc_feature: MA Experiment 20001560 PARAMETER Experiment Name: At_Drought_Soil_Dry_P Parameter: Post Timepoint (hr) Value: None
  misc_feature: MA Experiment 20001560 PARAMETER Experiment Name: At_Drought_Soil_Dry_P Parameter: Post-Treatment Value: None
  misc_feature: MA Experiment 20001560 PARAMETER Experiment Name: At_Drought_Soil_Dry_P Parameter: Timepoint (day) Value: 14
  misc_feature: MA Experiment 20001560 PARAMETER Experiment Name: At_Drought_Soil_Dry_P Parameter: Treatment Value: Drought vs. No Drought
  misc_feature: MA Experiment ID: 20001904 Result: Up-regulated in Transcription
  misc_feature: MA Experiment 20001904 PARAMETER Experiment Name: At_Drought_Reproduction_P Parameter: Age (day) Value: 37
  misc_feature: MA Experiment 20001904 PARAMETER Experiment Name: At_Drought_Reproduction_P Parameter: Organism Value: A. thaliana
  misc_feature: MA Experiment 20001904 PARAMETER Experiment Name: At_Drought_Reproduction_P Parameter: Plant Line Value: WS
  misc_feature: MA Experiment 20001904 PARAMETER Experiment Name: At_Drought_Reproduction_P Parameter: Timepoint (day) Value: 7
  misc_feature: MA Experiment 20001904 PARAMETER Experiment Name: At_Drought_Reproduction_P Parameter: Tissue Value: Rosettes
  misc_feature: MA Experiment 20001904 PARAMETER Experiment Name: At_Drought_Reproduction_P Parameter: Treatment Value: Drought vs. No Drought

SEQ ID NO: 49230 - protein, 118 aa, Arabidopsis thaliana; identical to SEQ ID NO: 38921
  peptide (1)..(118): Ceres Seq. ID no. 12652847
  misc_feature (29)..(114): Pfam Name: Protease inhibitor/seed storage/LTP family Pfam Description: Protease inhibitor/seed storage/LTP family
  misc_feature (29)..(114): Pfam Name: Protease inhibitor/seed storage/LTP family Pfam Description: Protease inhibitor/seed storage/LTP family
  misc_feature (29)..(114): Pfam Name: Protease inhibitor/seed storage/LTP family Pfam Description: Protease inhibitor/seed storage/LTP family
  misc_feature (29)..(114): Pfam Name: Protease inhibitor/seed storage/LTP family Pfam Description: Protease inhibitor/seed storage/LTP family
  misc_feature (1)..(118): Homolog of NCBI NO: 5777389 NR Description: non-specific lipid transfer protein [Brassica
  misc_feature (1)..(118): Homolog of NCBI NO: 15224898 NR Description: putative nonspecific lipid-transfer protein
  misc_feature (1)..(118): Homolog of NCBI NO: 2497737 NR Description: NONSPECIFIC LIPID-TRANSFER PROTEIN 3 PRECURSOR
  misc_feature (1)..(118): Homolog of NCBI NO: 2497736 NR Description: NONSPECIFIC LIPID-TRANSFER PROTEIN 2 PRECURSOR
  misc_feature (1)..(118): Homolog of NCBI NO: 2497739 NR Description: NONSPECIFIC LIPID-TRANSFER PROTEIN B PRECURSOR
  misc_feature (1)..(118): Homolog of NCBI NO: 5777389 NR Description: non-specific lipid transfer protein [Brassica
  misc_feature (1)..(118): Homolog of NCBI NO: 2497737 NR Description: NONSPECIFIC LIPID-TRANSFER PROTEIN 3 PRECURSOR
  misc_feature (1)..(118): Homolog of NCBI NO: 2497739 NR Description: NONSPECIFIC LIPID-TRANSFER PROTEIN B PRECURSOR
  misc_feature (1)..(118): Homolog of NCBI NO: 2497736 NR Description: NONSPECIFIC LIPID-TRANSFER PROTEIN 2 PRECURSOR
  misc_feature (1)..(118): Homolog of NCBI NO: 2497737 NR Description: NONSPECIFIC LIPID-TRANSFER PROTEIN 3 PRECURSOR
  misc_feature (1)..(118): Homolog of NCBI NO: 15224898 NR Description: putative nonspecific lipid-transfer protein
  misc_feature (1)..(118): Homolog of NCBI NO: 5777389 NR Description: non-specific lipid transfer protein [Brassica
  misc_feature (1)..(118): Homolog of NCBI NO: 15224899 NR Description: putative nonspecific lipid-transfer protein
  misc_feature (1)..(118): Homolog of NCBI NO: 2497738 NR Description: NONSPECIFIC LIPID-TRANSFER PROTEIN A PRECURSOR
  misc_feature (1)..(118): Homolog of NCBI NO: 11273805 NR Description: lipid transfer protein [imported] - wild cabbage
  misc_feature (1)..(114): Homolog of NCBI NO: 7438295 NR Description: lipid transfer protein wax9C - broccoli
  misc_feature (1)..(118): Homolog of NCBI NO: 2497735 NR Description: NONSPECIFIC LIPID-TRANSFER PROTEIN 1 PRECURSOR
  misc_feature (1)..(118): Homolog of NCBI NO: 15224899 NR Description: putative nonspecific lipid-transfer protein
  misc_feature (1)..(118): Homolog of NCBI NO: 2497738 NR Description: NONSPECIFIC LIPID-TRANSFER PROTEIN A PRECURSOR
  misc_feature (1)..(118): Homolog of NCBI NO: 11273805 NR Description: lipid transfer protein [imported] - wild cabbage
  misc_feature (1)..(114): Homolog of NCBI NO: 7438295 NR Description: lipid transfer protein wax9C - broccoli
  misc_feature (1)..(118): Homolog of NCBI NO: 2497735 NR Description: NONSPECIFIC LIPID-TRANSFER PROTEIN 1 PRECURSOR
  misc_feature (1)..(118): Homolog of NCBI NO: 2497739 NR Description: NONSPECIFIC LIPID-TRANSFER PROTEIN B PRECURSOR
  misc_feature (1)..(118): Homolog of NCBI NO: 2497736 NR Description: NONSPECIFIC LIPID-TRANSFER PROTEIN 2 PRECURSOR
  misc_feature (1)..(118): Homolog of NCBI NO: 2497737 NR Description: NONSPECIFIC LIPID-TRANSFER PROTEIN 3 PRECURSOR
  misc_feature (1)..(118): Homolog of NCBI NO: 15224898 NR Description: putative nonspecific lipid-transfer protein
  misc_feature (1)..(118): Homolog of NCBI NO: 5777389 NR Description: non-specific lipid transfer protein [Brassica
  misc_feature (1)..(118): Homolog of NCBI NO: 15224899 NR Description: putative nonspecific lipid-transfer protein
  misc_feature (1)..(118): Homolog of NCBI NO: 2497738 NR Description: NONSPECIFIC LIPID-TRANSFER PROTEIN A PRECURSOR
  misc_feature (1)..(118): Homolog of NCBI NO: 11273805 NR Description: lipid transfer protein [imported] - wild cabbage
  misc_feature (1)..(114): Homolog of NCBI NO: 7438295 NR Description: lipid transfer protein wax9C - broccoli
  misc_feature (1)..(118): Homolog of NCBI NO: 2497735 NR Description: NONSPECIFIC LIPID-TRANSFER PROTEIN 1 PRECURSOR
  misc_feature (1)..(118): Homolog of NCBI NO: 2497739 NR Description: NONSPECIFIC LIPID-TRANSFER PROTEIN B PRECURSOR
  misc_feature (1)..(118): Homolog of NCBI NO: 2497736 NR Description: NONSPECIFIC LIPID-TRANSFER PROTEIN 2 PRECURSOR
  misc_feature (1)..(118): Homolog of NCBI NO: 15224898 NR Description: putative nonspecific lipid-transfer protein
  misc_feature (1)..(118): Homolog of NCBI NO: 2497735 NR Description: NONSPECIFIC LIPID-TRANSFER PROTEIN 1 PRECURSOR
  misc_feature (1)..(114): Homolog of NCBI NO: 7438295 NR Description: lipid transfer protein wax9C - broccoli
  misc_feature (1)..(118): Homolog of NCBI NO: 11273805 NR Description: lipid transfer protein [imported] - wild cabbage
  misc_feature (1)..(118): Homolog of NCBI NO: 2497738 NR Description: NONSPECIFIC LIPID-TRANSFER PROTEIN A PRECURSOR
  misc_feature (1)..(118): Homolog of NCBI NO: 15224899 NR Description: putative nonspecific lipid-transfer protein

SEQ ID NO: 49231 - protein, 114 aa, Arabidopsis thaliana; identical to SEQ ID NO: 38922
  peptide (1)..(114): Ceres Seq. ID no. 12652848
  misc_feature (25)..(110): Pfam Name: Protease inhibitor/seed storage/LTP family Pfam Description: Protease inhibitor/seed storage/LTP family
  misc_feature (25)..(110): Pfam Name: Protease inhibitor/seed storage/LTP family Pfam Description: Protease inhibitor/seed storage/LTP family
  misc_feature (25)..(110): Pfam Name: Protease inhibitor/seed storage/LTP family Pfam Description: Protease inhibitor/seed storage/LTP family
  misc_feature (25)..(110): Pfam Name: Protease inhibitor/seed storage/LTP family Pfam Description: Protease inhibitor/seed storage/LTP family
  misc_feature (1)..(114): Homolog of NCBI NO: 5777389 NR Description: non-specific lipid transfer protein [Brassica
  misc_feature (1)..(114): Homolog of NCBI NO: 15224898 NR Description: putative nonspecific lipid-transfer protein
  misc_feature (1)..(114): Homolog of NCBI NO: 2497737 NR Description: NONSPECIFIC LIPID-TRANSFER PROTEIN 3 PRECURSOR
  misc_feature (1)..(114): Homolog of NCBI NO: 2497736 NR Description: NONSPECIFIC LIPID-TRANSFER PROTEIN 2 PRECURSOR
  misc_feature (1)..(114): Homolog of NCBI NO: 2497739 NR Description: NONSPECIFIC LIPID-TRANSFER PROTEIN B PRECURSOR
  misc_feature (1)..(114): Homolog of NCBI NO: 5777389 NR Description: non-specific lipid transfer protein [Brassica
  misc_feature (1)..(114): Homolog of NCBI NO: 2497737 NR Description: NONSPECIFIC LIPID-TRANSFER PROTEIN 3 PRECURSOR
  misc_feature (1)..(114): Homolog of NCBI NO: 2497739 NR Description: NONSPECIFIC LIPID-TRANSFER PROTEIN B PRECURSOR
  misc_feature (1)..(114): Homolog of NCBI NO: 2497736 NR Description: NONSPECIFIC LIPID-TRANSFER PROTEIN 2 PRECURSOR
  misc_feature (1)..(114): Homolog of NCBI NO: 2497737 NR Description: NONSPECIFIC LIPID-TRANSFER PROTEIN 3 PRECURSOR
  misc_feature (1)..(114): Homolog of NCBI NO: 15224898 NR Description: putative nonspecific lipid-transfer protein
  misc_feature (1)..(114): Homolog of NCBI NO: 5777389 NR Description: non-specific lipid transfer protein [Brassica
  misc_feature (1)..(114): Homolog of NCBI NO: 15224899 NR Description: putative nonspecific lipid-transfer protein
  misc_feature (1)..(114): Homolog of NCBI NO: 2497738 NR Description: NONSPECIFIC LIPID-TRANSFER PROTEIN A PRECURSOR
  misc_feature (1)..(114): Homolog of NCBI NO: 11273805 NR Description: lipid transfer protein [imported] - wild cabbage
  misc_feature (1)..(110): Homolog of NCBI NO: 7438295 NR Description: lipid transfer protein wax9C - broccoli
  misc_feature (1)..(114): Homolog of NCBI NO: 2497735 NR Description: NONSPECIFIC LIPID-TRANSFER PROTEIN 1 PRECURSOR
  misc_feature (1)..(114): Homolog of NCBI NO: 15224899 NR Description: putative nonspecific lipid-transfer protein
  misc_feature (1)..(114): Homolog of NCBI NO: 2497738 NR Description: NONSPECIFIC LIPID-TRANSFER PROTEIN A PRECURSOR
  misc_feature (1)..(114): Homolog of NCBI NO: 11273805 NR Description: lipid transfer protein [imported] - wild cabbage
  misc_feature (1)..(110): Homolog of NCBI NO: 7438295 NR Description: lipid transfer protein wax9C - broccoli
  misc_feature (1)..(114): Homolog of NCBI NO: 2497735 NR Description: NONSPECIFIC LIPID-TRANSFER PROTEIN 1 PRECURSOR
  misc_feature (1)..(114): Homolog of NCBI NO: 2497739 NR Description: NONSPECIFIC LIPID-TRANSFER PROTEIN B PRECURSOR
  misc_feature (1)..(114): Homolog of NCBI NO: 2497736 NR Description: NONSPECIFIC LIPID-TRANSFER PROTEIN 2 PRECURSOR
  misc_feature (1)..(114): Homolog of NCBI NO: 2497737 NR Description: NONSPECIFIC LIPID-TRANSFER PROTEIN 3 PRECURSOR
  misc_feature (1)..(114): Homolog of NCBI NO: 15224898 NR Description: putative nonspecific lipid-transfer protein
  misc_feature (1)..(114): Homolog of NCBI NO: 5777389 NR Description: non-specific lipid transfer protein [Brassica
  misc_feature (1)..(114): Homolog of NCBI NO: 15224899 NR Description: putative nonspecific lipid-transfer protein
  misc_feature (1)..(114): Homolog of NCBI NO: 2497738 NR Description: NONSPECIFIC LIPID-TRANSFER PROTEIN A PRECURSOR
  misc_feature (1)..(114): Homolog of NCBI NO: 11273805 NR Description: lipid transfer protein [imported] - wild cabbage
  misc_feature (1)..(110): Homolog of NCBI NO: 7438295 NR Description: lipid transfer protein wax9C - broccoli
  misc_feature (1)..(114): Homolog of NCBI NO: 2497735 NR Description: NONSPECIFIC LIPID-TRANSFER PROTEIN 1 PRECURSOR
  misc_feature (1)..(114): Homolog of NCBI NO: 2497739 NR Description: NONSPECIFIC LIPID-TRANSFER PROTEIN B PRECURSOR
  misc_feature (1)..(114): Homolog of NCBI NO: 2497736 NR Description: NONSPECIFIC LIPID-TRANSFER PROTEIN 2 PRECURSOR
  misc_feature (1)..(114): Homolog of NCBI NO: 15224898 NR Description: putative nonspecific lipid-transfer protein
  misc_feature (1)..(114): Homolog of NCBI NO: 2497735 NR Description: NONSPECIFIC LIPID-TRANSFER PROTEIN 1 PRECURSOR
  misc_feature (1)..(110): Homolog of NCBI NO: 7438295 NR Description: lipid transfer protein wax9C - broccoli
  misc_feature (1)..(114): Homolog of NCBI NO: 11273805 NR Description: lipid transfer protein [imported] - wild cabbage
  misc_feature (1)..(114): Homolog of NCBI NO: 2497738 NR Description: NONSPECIFIC LIPID-TRANSFER PROTEIN A PRECURSOR
  misc_feature (1)..(114): Homolog of NCBI NO: 15224899 NR Description: putative nonspecific lipid-transfer protein

SEQ ID NO: 49232 - protein, 104 aa, Arabidopsis thaliana; identical to SEQ ID NO: 38923
  peptide (1)..(104): Ceres Seq. ID no. 12652849
  misc_feature (15)..(100): Pfam Name: Protease inhibitor/seed storage/LTP family Pfam Description: Protease inhibitor/seed storage/LTP family
  misc_feature (15)..(100): Pfam Name: Protease inhibitor/seed storage/LTP family Pfam Description: Protease inhibitor/seed storage/LTP family
  misc_feature (15)..(100): Pfam Name: Protease inhibitor/seed storage/LTP family Pfam Description: Protease inhibitor/seed storage/LTP family
  misc_feature (15)..(100): Pfam Name: Protease inhibitor/seed storage/LTP family Pfam Description: Protease inhibitor/seed storage/LTP family
  misc_feature (1)..(104): Homolog of NCBI NO: 5777389 NR Description: non-specific lipid transfer protein [Brassica
  misc_feature (1)..(104): Homolog of NCBI NO: 15224898 NR Description: putative nonspecific lipid-transfer protein
  misc_feature (1)..(104): Homolog of NCBI NO: 2497737 NR Description: NONSPECIFIC LIPID-TRANSFER PROTEIN 3 PRECURSOR
  misc_feature (1)..(104): Homolog of NCBI NO: 2497736 NR Description: NONSPECIFIC LIPID-TRANSFER PROTEIN 2 PRECURSOR
  misc_feature (1)..(104): Homolog of NCBI NO: 2497739 NR Description: NONSPECIFIC LIPID-TRANSFER PROTEIN B PRECURSOR
  misc_feature (1)..(104): Homolog of NCBI NO: 5777389 NR Description: non-specific lipid transfer protein [Brassica
  misc_feature (1)..(104): Homolog of NCBI NO: 2497737 NR Description: NONSPECIFIC LIPID-TRANSFER PROTEIN 3 PRECURSOR
  misc_feature (1)..(104): Homolog of NCBI NO: 2497739 NR Description: NONSPECIFIC LIPID-TRANSFER PROTEIN B PRECURSOR
  misc_feature (1)..(104): Homolog of NCBI NO: 2497736 NR Description: NONSPECIFIC LIPID-TRANSFER PROTEIN 2 PRECURSOR
  misc_feature (1)..(104): Homolog of NCBI NO: 2497737 NR Description: NONSPECIFIC LIPID-TRANSFER PROTEIN 3 PRECURSOR
  misc_feature (1)..(104): Homolog of NCBI NO: 15224898 NR Description: putative nonspecific lipid-transfer protein
  misc_feature (1)..(104): Homolog of NCBI NO: 5777389 NR Description: non-specific lipid transfer protein [Brassica
  misc_feature (1)..(104): Homolog of NCBI NO: 15224899 NR Description: putative nonspecific lipid-transfer protein
  misc_feature (1)..(104): Homolog of NCBI NO: 2497738 NR Description: NONSPECIFIC LIPID-TRANSFER PROTEIN A PRECURSOR
  misc_feature (1)..(104): Homolog of NCBI NO: 11273805 NR Description: lipid transfer protein [imported] - wild cabbage
  misc_feature (1)..(100): Homolog of NCBI NO: 7438295 NR Description: lipid transfer protein wax9C - broccoli
  misc_feature (1)..(104): Homolog of NCBI NO: 2497735 NR Description: NONSPECIFIC LIPID-TRANSFER PROTEIN 1 PRECURSOR
  misc_feature (1)..(104): Homolog of NCBI NO: 15224899 NR Description: putative nonspecific lipid-transfer protein
  misc_feature (1)..(104): Homolog of NCBI NO: 2497738 NR Description: NONSPECIFIC LIPID-TRANSFER PROTEIN A PRECURSOR
  misc_feature (1)..(104): Homolog of NCBI NO: 11273805 NR Description: lipid transfer protein [imported] - wild cabbage
  misc_feature (1)..(100): Homolog of NCBI NO: 7438295 NR Description: lipid transfer protein wax9C - broccoli
  misc_feature (1)..(104): Homolog of NCBI NO: 2497735 NR Description: NONSPECIFIC LIPID-TRANSFER PROTEIN 1 PRECURSOR
  misc_feature (1)..(104): Homolog of NCBI NO: 2497739 NR Description: NONSPECIFIC LIPID-TRANSFER PROTEIN B PRECURSOR
  misc_feature (1)..(104): Homolog of NCBI NO: 2497736 NR Description: NONSPECIFIC LIPID-TRANSFER PROTEIN 2 PRECURSOR
  misc_feature (1)..(104): Homolog of NCBI NO: 2497737 NR Description: NONSPECIFIC LIPID-TRANSFER PROTEIN 3 PRECURSOR
  misc_feature (1)..(104): Homolog of NCBI NO: 15224898 NR Description: putative nonspecific lipid-transfer protein
  misc_feature (1)..(104): Homolog of NCBI NO: 5777389 NR Description: non-specific lipid transfer protein [Brassica
  misc_feature (1)..(104): Homolog of NCBI NO: 15224899 NR Description: putative nonspecific lipid-transfer protein
  misc_feature (1)..(104): Homolog of NCBI NO: 2497738 NR Description: NONSPECIFIC LIPID-TRANSFER PROTEIN A PRECURSOR
  misc_feature (1)..(104): Homolog of NCBI NO: 11273805 NR Description: lipid transfer protein [imported] - wild cabbage
  misc_feature (1)..(100): Homolog of NCBI NO: 7438295 NR Description: lipid transfer protein wax9C - broccoli
  misc_feature (1)..(104): Homolog of NCBI NO: 2497735 NR Description: NONSPECIFIC LIPID-TRANSFER PROTEIN 1 PRECURSOR
  misc_feature (1)..(104): Homolog of NCBI NO: 2497739 NR Description: NONSPECIFIC LIPID-TRANSFER PROTEIN B PRECURSOR
  misc_feature (1)..(104): Homolog of NCBI NO: 2497736 NR Description: NONSPECIFIC LIPID-TRANSFER PROTEIN 2 PRECURSOR
  misc_feature (1)..(104): Homolog of NCBI NO: 15224898 NR Description: putative nonspecific lipid-transfer protein
  misc_feature (1)..(104): Homolog of NCBI NO: 2497735 NR Description: NONSPECIFIC LIPID-TRANSFER PROTEIN 1 PRECURSOR
  misc_feature (1)..(100): Homolog of NCBI NO: 7438295 NR Description: lipid transfer protein wax9C - broccoli
  misc_feature (1)..(104): Homolog of NCBI NO: 11273805 NR Description: lipid transfer protein [imported] - wild cabbage
  misc_feature (1)..(104): Homolog of NCBI NO: 2497738 NR Description: NONSPECIFIC LIPID-TRANSFER PROTEIN A PRECURSOR
  misc_feature (1)..(104): Homolog of NCBI NO: 15224899 NR Description: putative nonspecific lipid-transfer protein

SEQ ID NO: 49233 - DNA, 3946 bp, Arabidopsis thaliana
  misc_feature (1)..(3946): Ceres Seq. ID no. 13579790
  misc_feature: MA Experiment ID: 20000171 Result: Down-regulated in Transcription
  misc_feature: MA Experiment 20000171 PARAMETER Experiment Name: At_42deg_Heat_P Parameter: Age (day) Value: 14
  misc_feature: MA Experiment 20000171 PARAMETER Experiment Name: At_42deg_Heat_P Parameter: Organism Value: A. thaliana
  misc_feature: MA Experiment 20000171 PARAMETER Experiment Name: At_42deg_Heat_P Parameter: Plant Line Value: WS
  misc_feature: MA Experiment 20000171 PARAMETER Experiment Name: At_42deg_Heat_P Parameter: Temperature (deg C) Value: 42 vs. 22
  misc_feature: MA Experiment 20000171 PARAMETER Experiment Name: At_42deg_Heat_P Parameter: Timepoint (hr) Value: 1
  misc_feature: MA Experiment 20000171 PARAMETER Experiment Name: At_42deg_Heat_P Parameter: Tissue Value: Aerial
  misc_feature: MA Experiment ID: 20000180 Result: Up-regulated in Transcription
  misc_feature: MA Experiment 20000180 PARAMETER Experiment Name: At_Germinating_Seeds_P Parameter: Age (hr) Value: 24 vs. 0
  misc_feature: MA Experiment 20000180 PARAMETER Experiment Name: At_Germinating_Seeds_P Parameter: Tissue Value: Germinating Seeds
  misc_feature: MA Experiment ID: 20000184 Result: Up-regulated in Transcription
  misc_feature: MA Experiment 20000184 PARAMETER Experiment Name: At_Shoots__P Parameter: Age (day) Value: 7
  misc_feature: MA Experiment 20000184 PARAMETER Experiment Name: At_Shoots__P Parameter: Tissue Value: Shoots vs. Whole Plant
  misc_feature: MA Experiment ID: 20000185 Result: Up-regulated in Transcription
  misc_feature: MA Experiment 20000185 PARAMETER Experiment Name: At_Roots__P Parameter: Age (day) Value: 7 vs. 21
  misc_feature: MA Experiment 20000185 PARAMETER Experiment Name: At_Roots__P Parameter: Organism Value: A. thaliana
  misc_feature: MA Experiment 20000185 PARAMETER Experiment Name: At_Roots__P Parameter: Tissue Value: Roots vs. Whole Plant
  misc_feature: MA Experiment ID: 20000235 Result: Up-regulated in Transcription
  misc_feature: MA Experiment 20000235 PARAMETER Experiment Name: At_Siliques_P Parameter: Age (day) Value: 21
  misc_feature: MA Experiment 20000235 PARAMETER Experiment Name: At_Siliques_P Parameter: Organism Value: A. thaliana
  misc_feature: MA Experiment 20000235 PARAMETER Experiment Name: At_Siliques_P Parameter: Plant Line Value: WS
  misc_feature: MA Experiment 20000235 PARAMETER Experiment Name: At_Siliques_P Parameter: Tissue Value: 5-10mm Siliques vs. Whole Plant
  misc_feature: MA Experiment ID: 20000439 Result: Up-regulated in Transcription
  misc_feature: MA Experiment 20000439 PARAMETER Experiment Name: At_Roots__P Parameter: Age (day) Value: 14 vs. 21
  misc_feature: MA Experiment 20000439 PARAMETER Experiment Name: At_Roots__P Parameter: Organism Value: A. thaliana
  misc_feature: MA Experiment 20000439 PARAMETER Experiment Name: At_Roots__P Parameter: Tissue Value: Roots vs. Whole Plant
  misc_feature: MA Experiment ID: 20001247 Result: Up-regulated in Transcription
  misc_feature: MA Experiment 20001247 PARAMETER Experiment Name: At_Far-red-induction_P Parameter: Age (day) Value: 7
  misc_feature: MA Experiment 20001247 PARAMETER Experiment Name: At_Far-red-induction_P Parameter: Light Value: Far-red vs. White
  misc_feature: MA Experiment 20001247 PARAMETER Experiment Name: At_Far-red-induction_P Parameter: Organism Value: A. thaliana
  misc_feature: MA Experiment 20001247 PARAMETER Experiment Name: At_Far-red-induction_P Parameter: Plant Line Value: Columbia
  misc_feature: MA Experiment 20001247 PARAMETER Experiment Name: At_Far-red-induction_P Parameter: Timepoint (hr) Value: 1
  misc_feature: MA Experiment 20001247 PARAMETER Experiment Name: At_Far-red-induction_P Parameter: Tissue Value: Whole Plant
  misc_feature: MA Experiment ID: 20001451 Result: Down-regulated in Transcription
  misc_feature: MA Experiment 20001451 PARAMETER Experiment Name: At_Far-red-induction_P Parameter: Age (day) Value: 7
  misc_feature: MA Experiment 20001451 PARAMETER Experiment Name: At_Far-red-induction_P Parameter: Light Value: Far-red vs. White
  misc_feature: MA Experiment 20001451 PARAMETER Experiment Name: At_Far-red-induction_P Parameter: Organism Value: A. thaliana
  misc_feature: MA Experiment 20001451 PARAMETER Experiment Name: At_Far-red-induction_P Parameter: Plant Line Value: Columbia
  misc_feature: MA Experiment 20001451 PARAMETER Experiment Name: At_Far-red-induction_P Parameter: Timepoint (hr) Value: 24
  misc_feature: MA Experiment 20001451 PARAMETER Experiment Name: At_Far-red-induction_P Parameter: Tissue Value: Whole Plant
  misc_feature: MA Experiment ID: 20001757 Result: Down-regulated in Transcription
  misc_feature: MA Experiment 20001757 PARAMETER Experiment Name: At_50mM_NH4NO3_L-to-H_P Parameter: Timepoint (hr) Value: 6
  misc_feature: MA Experiment 20001757 PARAMETER Experiment Name: At_50mM_NH4NO3_L-to-H_P Parameter: Tissue Value: Leaf
  misc_feature: MA Experiment 20001757 PARAMETER Experiment Name: At_50mM_NH4NO3_L-to-H_P Parameter: Treatment Value: 50mM NH4NO3 vs 100mM Mannitol
atttttgctcacgactaagtcccattcctcgtctcttctttttcttctccttaattagtttgggcaacacgatcacagttgattccttcacaatcgatttgttaaattaagaaatcattttcttctctctctctctctctctgtctaaaatatctatcggttgaagaagatctgaagcttaactttgctctgttacagactctcagggatctgccggctacaaagtccggtggatagtgttattattagacaatggcgtctaataatcatttcatgaacagtagatccaatctatcaacaaactctgatgctgctgaagctgagaggcaccagcagcctgtgtcaaattctgtgacatttgcccgcaggactccctctggccgatatgtcaactactccagagatgatctcgatagcgaacttggaagtgttgatttaactggctattcggttcacattcctccaactccggataaccaacctatggatccgtccatctctcagaaggttgaggagcagtatgtctcgaattccttgttcacgggcggttttaacagcgtcactcgggctcatcttatggaaaaagtgatcgatactgagactagccatccgcagatggcaggtgctaaaggatcttcttgcgcggttcctggttgtgatgtcaaggtgatgagtgatgagagaggtcaagatcttcttccctgtgagtgtgatttcaaaatctgtagggattgctttatggatgctgtgaaaaccggtgggatgtgtcccgggtgtaaggagccttacaggaacacggatttggcggattttgctgataacaacaagcagcaacggcctatgcttccgccaccagcgggcgggtccaagatggacaggagattgtcattgatgaagtcaactaagtctggtttgatgaggagtcaaaccggggattttgatcacaatagatggttgtttgagactagtgggacttacggtttcggtaatgctttctggacaaaagacgggaatttcgggagtgacaaggatgggaatggccacggtatggggccgcaggatctgatgagcagaccgtggagaccacttactcggaaactgcagattcctgcagctgttattagtccttacaggcttttgatacttatccgaattgttgttcttgcgcttttcttgatgtggaggattaagcacaaaaacccagatgcaatatggctatggggaatgtctgtggtttgtgagctttggttcgccttatcttggctacttgatcagcttccaaagctgtgtccgattaacagagctacggatctcaatgttcttaaagaaaaatttgaaacacctacaccgagcaacccgactgggaaatctgatctcccaggactggatatgtttgtatctacagcagatccagagaaagaacctcctcttgtcacttccaacaccattttatcgattctcgctgctgactaccctgtagaaaagcttgcttgctatgtatcagatgatggaggagcgcttttgacattcgaagccatggctgaagcagcgagttttgcaaacatgtgggttcctttctgtcgtaaacacaatatcgagccgaggaatccggattcatactttagtcttaaaagagatccttacaagaacaaagtgaaggctgattttgttaaggatcgaagacgggtgaagcgtgagtatgatgagtttaaggttaggatcaacagcttgcctgactcgatcaggcgccgttctgatgcttatcacgcaagggaagagattaaggccatgaagctgcaaagacaaaacagagatgaagagatagtagagccagtcaagattcctaaagctacatggatggctgatggtactcattggcctggaacttggataaattctggtcctgaccattcccgtagtgaccatgctggtatcattcaggtgatgttgaagccgccaagtgatgagccattacatggagtgtctgaagggttcttagatcttacagatgttgacattcgtcttccgcttcttgtctatgtttcgcgtgagaagcgaccgggttatgatcataacaagaaagcaggagccatgaatgccctggtccgagcttctgcaattatgtccaacggtccattcatactcaatcttgattgtgatcattacatatacaactctcaagctttaagagaaggaatgtgtttcatgatggatcgaggtggtgaccggctttgctatgttcagttcccacaacggtttgaaggtattgacccatcagatcgttatgcgaatcacaacacagtcttctttgatgtgaacatgagagctcttgatgggttgatgggtcctgtttatgtcggaacgggttgtctctttagaagaatcgcgttgtacggattcgatccacctcgggctaaagaacaccatcccggattctgcagttgctgcttctctcgcaagaagaagaaaagccgtgtgccagaagaaaaccgatctttgagaatgggtggtgactcagatgatgatgaagagatgaatctttctttggttccgaagaaattcggaaactccactttccttatcgattcaatcccggttgccgagttccaaggtcgtcctcttgcggatcacccagctgtgcaaaacggacgaccacccggagctctcaccattcctcgcgagcttcttgatgcatcaactgtggcagaagccatagccgtcatctcttgttggtacgaggataaaaccgagtggggatctcggatcggttggatttatggatctgtcacggaagatgtggtcacaggttatagaatgcataaccgaggctggaaatcggtttactgtgtgaccaaaagggatgctttccgtggcacagctccaatcaacttgacggataggcttcaccaggttctccgatgggctactggctcggtagagatcttcttctcaagaaacaatgccttctttgctagcccgagaatgaaaatcctccagagaatcgcttacctaaacgttggaatctacccgttcacatcattcttcctcatagtctactgcttcctcccagctctctccctattctcaggccagttcatagtccaaacactcaatgtcacattccttgtctacctcttaatcatctccattacgctctgcttactcgctctcctcgagatcaaatggtcaggaatctcactcgaggaatggtggcgaaacgagcagttctggctcattggaggaacaagcgctcacttagccgcggttatccaagggctgctcaaagttgttgccggaatcgaaatctcattcacattgacatctaaatccggaggagaggatgtagacgacgaatttgcggatctctacattgtgaaatggacatccctcatgatcccaccaatcacaatcatgatggtgaacctaatcgccatcgcggtcgggtttagcaggacgatatacagtgtgattccgcagtggagtaagttgattggaggagtgttcttcagtttctgggtactggctcatctttatccattcgctaaagggcttatgggaagaagaggaaggactccgaccattgtatatgtctggtctggacttgttgccatcaccatatctctgctttgggttgccattaatccacctgctggttccactcaaatcggaggatctttcactttcccatgattcataggtttggtttctcaaaaattctctttctttagtcctttctaaagatggagacagagattggccaagaaacacacaagtatagttgagccaaaatatagagcaagtcaaagaacttctctcattgtcttttattttttgtttttttatttggttgggaaaggacattttttatttgtctttttaaattttgtaatcttttatctgttgatggaattatttatgctactactgttaattatttattcagttc

SEQ ID NO: 49234 - protein, 1145 aa, Arabidopsis thaliana
  peptide (1)..(1145): Ceres Seq. ID no. 13579791
  misc_feature (256)..(493): Homolog of NCBI NO: 25453526 NR Description: cellulose synthase (EC 2.4.1.-) catalytic subunit
  misc_feature (486)..(1131): Homolog of NCBI NO: 25453526 NR Description: cellulose synthase (EC 2.4.1.-) catalytic subunit
  misc_feature (251)..(493): Homolog of NCBI NO: 21954719 NR Description: cellulose synthase catalytic subunit [Mesotaenium
  misc_feature (551)..(795): Homolog of NCBI NO: 23534479 NR Description: cellulose synthase [Populus tremuloides]
  misc_feature (233)..(493): Homolog of NCBI NO: 23534479 NR Description: cellulose synthase [Populus tremuloides]
  misc_feature (807)..(1131): Homolog of NCBI NO: 23534479 NR Description: cellulose synthase [Populus tremuloides]
  misc_feature (524)..(1136): Homolog of NCBI NO: 21954719 NR Description: cellulose synthase catalytic subunit [Mesotaenium
  misc_feature (256)..(493): Homolog of NCBI NO: 15238454 NR Description: cellulose synthase, catalytic subunit (Ath-B)
  misc_feature (486)..(1131): Homolog of NCBI NO: 15238454 NR Description: cellulose synthase, catalytic subunit (Ath-B)
  misc_feature (9)..(578): Homolog of NCBI NO: 34897878 NR Description: Similar to Arabidopsis thaliana DNA chromosome 4,
MASNNHFMNSRSNLSTNSDAAEAERHQQPVSNSVTFARRTPSGRYVNYSRDDLDSELGSVDLTGYSVHIPPTPDNQPMDPSISQKVEEQYVSNSLFTGGFNSVTRAHLMEKVIDTETSHPQMAGAKGSSCAVPGCDVKVMSDERGQDLLPCECDFKICRDCFMDAVKTGGMCPGCKEPYRNTDLADFADNNKQQRPMLPPPAGGSKMDRRLSLMKSTKSGLMRSQTGDFDHNRWLFETSGTYGFGNAFWTKDGNFGSDKDGNGHGMGPQDLMSRPWRPLTRKLQIPAAVISPYRLLILIRIVVLALFLMWRIKHKNPDAIWLWGMSVVCELWFALSWLLDQLPKLCPINRATDLNVLKEKFETPTPSNPTGKSDLPGLDMFVSTADPEKEPPLVTSNTILSILAADYPVEKLACYVSDDGGALLTFEAMAEAASFANMWVPFCRKHNIEPRNPDSYFSLKRDPYKNKVKADFVKDRRRVKREYDEFKVRINSLPDSIRRRSDAYHAREEIKAMKLQRQNRDEEIVEPVKIPKATWMADGTHWPGTWINSGPDHSRSDHAGIIQVMLKPPSDEPLHGVSEGFLDLTDVDIRLPLLVYVSREKRPGYDHNKKAGAMNALVRASAIMSNGPFILNLDCDHYIYNSQALREGMCFMMDRGGDRLCYVQFPQRFEGIDPSDRYANHNTVFFDVNMRALDGLMGPVYVGTGCLFRRIALYGFDPPRAKEHHPGFCSCCFSRKKKKSRVPEENRSLRMGGDSDDDEEMNLSLVPKKFGNSTFLIDSIPVAEFQGRPLADHPAVQNGRPPGALTIPRELLDASTVAEAIAVISCWYEDKTEWGSRIGWIYGSVTEDVVTGYRMHNRGWKSVYCVTKRDAFRGTAPINLTDRLHQVLRWATGSVEIFFSRNNAFFASPRMKILQRIAYLNVGIYPFTSFFLIVYCFLPALSLFSGQFIVQTLNVTFLVYLLIISITLCLLALLEIKWSGISLEEWWRNEQFWLIGGTSAHLAAVIQGLLKVVAGIEISFTLTSKSGGEDVDDEFADLYIVKWTSLMIPPITIMMVNLIAIAVGFSRTIYSVIPQWSKLIGGVFFSFWVLAHLYPFAKGLMGRRGRTPTIVYVWSGLVAITISLLWVAINPPAGSTQIGGSFTFP

SEQ ID NO: 49235 - protein, 1138 aa, Arabidopsis thaliana
  peptide (1)..(1138): Ceres Seq. ID no. 13579792
  misc_feature (249)..(486): Homolog of NCBI NO: 25453526 NR Description: cellulose synthase (EC 2.4.1.-) catalytic subunit
  misc_feature (479)..(1124): Homolog of NCBI NO: 25453526 NR Description: cellulose synthase (EC 2.4.1.-) catalytic subunit
  misc_feature (244)..(486): Homolog of NCBI NO: 21954719 NR Description: cellulose synthase catalytic subunit [Mesotaenium
  misc_feature (544)..(788): Homolog of NCBI NO: 23534479 NR Description: cellulose synthase [Populus tremuloides]
  misc_feature (226)..(486): Homolog of NCBI NO: 23534479 NR Description: cellulose synthase [Populus tremuloides]
  misc_feature (800)..(1124): Homolog of NCBI NO: 23534479 NR Description: cellulose synthase [Populus tremuloides]
  misc_feature (517)..(1129): Homolog of NCBI NO: 21954719 NR Description: cellulose synthase catalytic subunit [Mesotaenium
  misc_feature (249)..(486): Homolog of NCBI NO: 15238454 NR Description: cellulose synthase, catalytic subunit (Ath-B)
  misc_feature (479)..(1124): Homolog of NCBI NO: 15238454 NR Description: cellulose synthase, catalytic subunit (Ath-B)
  misc_feature (2)..(571): Homolog of NCBI NO: 34897878 NR Description: Similar to Arabidopsis thaliana DNA chromosome 4,
MNSRSNLSTNSDAAEAERHQQPVSNSVTFARRTPSGRYVNYSRDDLDSELGSVDLTGYSVHIPPTPDNQPMDPSISQKVEEQYVSNSLFTGGFNSVTRAHLMEKVIDTETSHPQMAGAKGSSCAVPGCDVKVMSDERGQDLLPCECDFKICRDCFMDAVKTGGMCPGCKEPYRNTDLADFADNNKQQRPMLPPPAGGSKMDRRLSLMKSTKSGLMRSQTGDFDHNRWLFETSGTYGFGNAFWTKDGNFGSDKDGNGHGMGPQDLMSRPWRPLTRKLQIPAAVISPYRLLILIRIVVLALFLMWRIKHKNPDAIWLWGMSVVCELWFALSWLLDQLPKLCPINRATDLNVLKEKFETPTPSNPTGKSDLPGLDMFVSTADPEKEPPLVTSNTILSILAADYPVEKLACYVSDDGGALLTFEAMAEAASFANMWVPFCRKHNIEPRNPDSYFSLKRDPYKNKVKADFVKDRRRVKREYDEFKVRINSLPDSIRRRSDAYHAREEIKAMKLQRQNRDEEIVEPVKIPKATWMADGTHWPGTWINSGPDHSRSDHAGIIQVMLKPPSDEPLHGVSEGFLDLTDVDIRLPLLVYVSREKRPGYDHNKKAGAMNALVRASAIMSNGPFILNLDCDHYIYNSQALREGMCFMMDRGGDRLCYVQFPQRFEGIDPSDRYANHNTVFFDVNMRALDGLMGPVYVGTGCLFRRIALYGFDPPRAKEHHPGFCSCCFSRKKKKSRVPEENRSLRMGGDSDDDEEMNLSLVPKKFGNSTFLIDSIPVAEFQGRPLADHPAVQNGRPPGALTIPRELLDASTVAEAIAVISCWYEDKTEWGSRIGWIYGSVTEDVVTGYRMHNRGWKSVYCVTKRDAFRGTAPINLTDRLHQVLRWATGSVEIFFSRNNAFFASPRMKILQRIAYLNVGIYPFTSFFLIVYCFLPALSLFSGQFIVQTLNVTFLVYLLIISITLCLLALLEIKWSGISLEEWWRNEQFWLIGGTSAHLAAVIQGLLKVVAGIEISFTLTSKSGGEDVDDEFADLYIVKWTSLMIPPITIMMVNLIAIAVGFSRTIYSVIPQWSKLIGGVFFSFWVLAHLYPFAKGLMGRRGRTPTIVYVWSGLVAITISLLWVAINPPAGSTQIGGSFTFP

SEQ ID NO: 49236 - protein, 1068 aa, Arabidopsis thaliana
  peptide (1)..(1068): Ceres Seq. ID no. 13579793
  misc_feature (179)..(416): Homolog of NCBI NO: 25453526 NR Description: cellulose synthase (EC 2.4.1.-) catalytic subunit
  misc_feature (409)..(1054): Homolog of NCBI NO: 25453526 NR Description: cellulose synthase (EC 2.4.1.-) catalytic subunit
  misc_feature (174)..(416): Homolog of NCBI NO: 21954719 NR Description: cellulose synthase catalytic subunit [Mesotaenium
  misc_feature (474)..(718): Homolog of NCBI NO: 23534479 NR Description: cellulose synthase [Populus tremuloides]
  misc_feature (156)..(416): Homolog of NCBI NO: 23534479 NR Description: cellulose synthase [Populus tremuloides]
  misc_feature (730)..(1054): Homolog of NCBI NO: 23534479 NR Description: cellulose synthase [Populus tremuloides]
  misc_feature (447)..(1059): Homolog of NCBI NO: 21954719 NR Description: cellulose synthase catalytic subunit [Mesotaenium
  misc_feature (179)..(416): Homolog of NCBI NO: 15238454 NR Description: cellulose synthase, catalytic subunit (Ath-B)
  misc_feature (409)..(1054): Homolog of NCBI NO: 15238454 NR Description: cellulose synthase, catalytic subunit (Ath-B)
  misc_feature (1)..(501): Homolog of NCBI NO: 34897878 NR Description: Similar to Arabidopsis thaliana DNA chromosome 4,
MDPSISQKVEEQYVSNSLFTGGFNSVTRAHLMEKVIDTETSHPQMAGAKGSSCAVPGCDVKVMSDERGQDLLPCECDFKICRDCFMDAVKTGGMCPGCKEPYRNTDLADFADNNKQQRPMLPPPAGGSKMDRRLSLMKSTKSGLMRSQTGDFDHNRWLFETSGTYGFGNAFWTKDGNFGSDKDGNGHGMGPQDLMSRPWRPLTRKLQIPAAVISPYRLLILIRIVVLALFLMWRIKHKNPDAIWLWGMSVVCELWFALSWLLDQLPKLCPINRATDLNVLKEKFETPTPSNPTGKSDLPGLDMFVSTADPEKEPPLVTSNTILSILAADYPVEKLACYVSDDGGALLTFEAMAEAASFANMWVPFCRKHNIEPRNPDSYFSLKRDPYKNKVKADFVKDRRRVKREYDEFKVRINSLPDSIRRRSDAYHAREEIKAMKLQRQNRDEEIVEPVKIPKATWMADGTHWPGTWINSGPDHSRSDHAGIIQVMLKPPSDEPLHGVSEGFLDLTDVDIRLPLLVYVSREKRPGYDHNKKAGAMNALVRASAIMSNGPFILNLDCDHYIYNSQALREGMCFMMDRGGDRLCYVQFPQRFEGIDPSDRYANHNTVFFDVNMRALDGLMGPVYVGTGCLFRRIALYGFDPPRAKEHHPGFCSCCFSRKKKKSRVPEENRSLRMGGDSDDDEEMNLSLVPKKFGNSTFLIDSIPVAEFQGRPLADHPAVQNGRPPGALTIPRELLDASTVAEAIAVISCWYEDKTEWGSRIGWIYGSVTEDVVTGYRMHNRGWKSVYCVTKRDAFRGTAPINLTDRLHQVLRWATGSVEIFFSRNNAFFASPRMKILQRIAYLNVGIYPFTSFFLIVYCFLPALSLFSGQFIVQTLNVTFLVYLLIISITLCLLALLEIKWSGISLEEWWRNEQFWLIGGTSAHLAAVIQGLLKVVAGIEISFTLTSKSGGEDVDDEFADLYIVKWTSLMIPPITIMMVNLIAIAVGFSRTIYSVIPQWSKLIGGVFFSFWVLAHLYPFAKGLMGRRGRTPTIVYVWSGLVAITISLLWVAINPPAGSTQIGGSFTFP

SEQ ID NO: 49237 - DNA, 1453 bp, Arabidopsis thaliana; identical to SEQ ID NO: 47431
  misc_feature (1)..(1453): Ceres Seq. ID no. 12601489
  misc_feature: MA Experiment ID: 20000171 Result: Down-regulated in Transcription
  misc_feature: MA Experiment 20000171 PARAMETER Experiment Name: At_42deg_Heat_P Parameter: Age (day) Value: 14
  misc_feature: MA Experiment 20000171 PARAMETER Experiment Name: At_42deg_Heat_P Parameter: Organism Value: A. thaliana
  misc_feature: MA Experiment 20000171 PARAMETER Experiment Name: At_42deg_Heat_P Parameter: Plant Line Value: WS
  misc_feature: MA Experiment 20000171 PARAMETER Experiment Name: At_42deg_Heat_P Parameter: Temperature (deg C) Value: 42 vs. 22
  misc_feature: MA Experiment 20000171 PARAMETER Experiment Name: At_42deg_Heat_P Parameter: Timepoint (hr) Value: 1
  misc_feature: MA Experiment 20000171 PARAMETER Experiment Name: At_42deg_Heat_P Parameter: Tissue Value: Aerial
  misc_feature: MA Experiment ID: 20000173 Result: Down-regulated in Transcription
  misc_feature: MA Experiment 20000173 PARAMETER Experiment Name: At_42deg_Heat_P Parameter: Age (day) Value: 14
  misc_feature: MA Experiment 20000173 PARAMETER Experiment Name: At_42deg_Heat_P Parameter: Organism Value: A. thaliana
  misc_feature: MA Experiment 20000173 PARAMETER Experiment Name: At_42deg_Heat_P Parameter: Plant Line Value: WS
  misc_feature: MA Experiment 20000173 PARAMETER Experiment Name: At_42deg_Heat_P Parameter: Temperature (deg C) Value: 42 vs. 22
  misc_feature: MA Experiment 20000173 PARAMETER Experiment Name: At_42deg_Heat_P Parameter: Timepoint (hr) Value: 6
  misc_feature: MA Experiment 20000173 PARAMETER Experiment Name: At_42deg_Heat_P Parameter: Tissue Value: Aerial
  misc_feature: MA Experiment ID: 20000184 Result: Down-regulated in Transcription
  misc_feature: MA Experiment 20000184 PARAMETER Experiment Name: At_Shoots__P Parameter: Age (day) Value: 7
  misc_feature: MA Experiment 20000184 PARAMETER Experiment Name: At_Shoots__P Parameter: Tissue Value: Shoots vs. Whole Plant
  misc_feature: MA Experiment ID: 20000227 Result: Down-regulated in Transcription
  misc_feature: MA Experiment 20000227 PARAMETER Experiment Name: At_Root-Tips-vs-Tops_P Parameter: Tissue Value: Root Tips vs. Root Tops
  misc_feature: MA Experiment ID: 20000234 Result: Down-regulated in Transcription
  misc_feature: MA Experiment 20000234 PARAMETER Experiment Name: At_Siliques_P Parameter: Age (day) Value: 21
  misc_feature: MA Experiment 20000234 PARAMETER Experiment Name: At_Siliques_P Parameter: Organism Value: A. thaliana
  misc_feature: MA Experiment 20000234 PARAMETER Experiment Name: At_Siliques_P Parameter: Plant Line Value: WS
  misc_feature: MA Experiment 20000234 PARAMETER Experiment Name: At_Siliques_P Parameter: Tissue Value: Less Than 5mm Siliques vs. Whole Plant
  misc_feature: MA Experiment ID: 20000264 Result: Down-regulated in Transcription
  misc_feature: MA Experiment 20000264 PARAMETER Experiment Name: At_Open_Flower_P Parameter: Age (day) Value: 21
  misc_feature: MA Experiment 20000264 PARAMETER Experiment Name: At_Open_Flower_P Parameter: Plant Line Value: WS
  misc_feature: MA Experiment 20000264 PARAMETER Experiment Name: At_Open_Flower_P Parameter: Tissue Value: Open Flower vs. Whole Plant
  misc_feature: MA Experiment ID: 20000265 Result: Down-regulated in Transcription
  misc_feature: MA Experiment 20000265 PARAMETER Experiment Name: At_Open_Flower_P Parameter: Age (day) Value: 21
  misc_feature: MA Experiment 20000265 PARAMETER Experiment Name: At_Open_Flower_P Parameter: Plant Line Value: WS
  misc_feature: MA Experiment 20000265 PARAMETER Experiment Name: At_Open_Flower_P Parameter: Tissue Value: Closed Flower vs. Whole Plant
  misc_feature: MA Experiment ID: 20000438 Result: Down-regulated in Transcription
  misc_feature: MA Experiment 20000438 PARAMETER Experiment Name: At_Shoots__P Parameter: Age (day) Value: 14
  misc_feature: MA Experiment 20000438 PARAMETER Experiment Name: At_Shoots__P Parameter: Tissue Value: Shoots vs. Whole Plant
  misc_feature: MA Experiment ID: 20000794 Result: Down-regulated in Transcription
  misc_feature: MA Experiment 20000794 PARAMETER Experiment Name: At_Petals_P Parameter: Age (day) Value: 23-25 days
  misc_feature: MA Experiment 20000794 PARAMETER Experiment Name: At_Petals_P Parameter: Plant Line Value: WS
  misc_feature: MA Experiment 20000794 PARAMETER Experiment Name: At_Petals_P Parameter: Tissue Value: Petals vs. Whole plant
  misc_feature: MA Experiment ID: 20001248 Result: Up-regulated in Transcription
  misc_feature: MA Experiment 20001248 PARAMETER Experiment Name: At_Far-red-induction_P Parameter: Age (day) Value: 7
  misc_feature: MA Experiment 20001248 PARAMETER Experiment Name: At_Far-red-induction_P Parameter: Light Value: Far-red vs. White
  misc_feature: MA Experiment 20001248 PARAMETER Experiment Name: At_Far-red-induction_P Parameter: Organism Value: A. thaliana
  misc_feature: MA Experiment 20001248 PARAMETER Experiment Name: At_Far-red-induction_P Parameter: Plant Line Value: Columbia
  misc_feature: MA Experiment 20001248 PARAMETER Experiment Name: At_Far-red-induction_P Parameter: Timepoint (hr) Value: 4
  misc_feature: MA Experiment 20001248 PARAMETER Experiment Name: At_Far-red-induction_P Parameter: Tissue Value: Whole Plant
  misc_feature: MA Experiment ID: 20001450 Result: Up-regulated in Transcription
  misc_feature: MA Experiment 20001450 PARAMETER Experiment Name: At_Far-red-induction_P Parameter: Age (day) Value: 7
  misc_feature: MA Experiment 20001450 PARAMETER Experiment Name: At_Far-red-induction_P Parameter: Light Value: Far-red vs. White
  misc_feature: MA Experiment 20001450 PARAMETER Experiment Name: At_Far-red-induction_P Parameter: Organism Value: A. thaliana
  misc_feature: MA Experiment 20001450 PARAMETER Experiment Name: At_Far-red-induction_P Parameter: Plant Line Value: Columbia
  misc_feature: MA Experiment 20001450 PARAMETER Experiment Name: At_Far-red-induction_P Parameter: Timepoint (hr) Value: 8
  misc_feature: MA Experiment 20001450 PARAMETER Experiment Name: At_Far-red-induction_P Parameter: Tissue Value: Whole Plant
  misc_feature: MA Experiment ID: 20001560 Result: Down-regulated in Transcription
  misc_feature: MA Experiment 20001560 PARAMETER Experiment Name: At_Drought_Soil_Dry_P Parameter: Age (day) Value: 28
  misc_feature: MA Experiment 20001560 PARAMETER Experiment Name: At_Drought_Soil_Dry_P Parameter: Organism Value: A. thaliana
  misc_feature: MA Experiment 20001560 PARAMETER Experiment Name: At_Drought_Soil_Dry_P Parameter: Plant Line Value: WS
  misc_feature: MA Experiment 20001560 PARAMETER Experiment Name: At_Drought_Soil_Dry_P Parameter: Post Timepoint (hr) Value: None
  misc_feature: MA Experiment 20001560 PARAMETER Experiment Name: At_Drought_Soil_Dry_P Parameter: Post-Treatment Value: None
  misc_feature: MA Experiment 20001560 PARAMETER Experiment Name: At_Drought_Soil_Dry_P Parameter: Timepoint (day) Value: 14
  misc_feature: MA Experiment 20001560 PARAMETER Experiment Name: At_Drought_Soil_Dry_P Parameter: Treatment Value: Drought vs. No Drought
  misc_feature: MA Experiment ID: 20001904 Result: Down-regulated in Transcription
  misc_feature: MA Experiment 20001904 PARAMETER Experiment Name: At_Drought_Reproduction_P Parameter: Age (day) Value: 37
  misc_feature: MA Experiment 20001904 PARAMETER Experiment Name: At_Drought_Reproduction_P Parameter: Organism Value: A. thaliana
  misc_feature: MA Experiment 20001904 PARAMETER Experiment Name: At_Drought_Reproduction_P Parameter: Plant Line Value: WS
  misc_feature: MA Experiment 20001904 PARAMETER Experiment Name: At_Drought_Reproduction_P Parameter: Timepoint (day) Value: 7
  misc_feature: MA Experiment 20001904 PARAMETER Experiment Name: At_Drought_Reproduction_P Parameter: Tissue Value: Rosettes
  misc_feature: MA Experiment 20001904 PARAMETER Experiment Name: At_Drought_Reproduction_P Parameter: Treatment Value: Drought vs. No Drought
  misc_feature: MA Experiment ID: 20001905 Result: Down-regulated in Transcription
  misc_feature: MA Experiment 20001905 PARAMETER Experiment Name: At_Drought_Reproduction_P Parameter: Age (day) Value: 40
  misc_feature: MA Experiment 20001905 PARAMETER Experiment Name: At_Drought_Reproduction_P Parameter: Organism Value: A. thaliana
  misc_feature: MA Experiment 20001905 PARAMETER Experiment Name: At_Drought_Reproduction_P Parameter: Plant Line Value: WS
  misc_feature: MA Experiment 20001905 PARAMETER Experiment Name: At_Drought_Reproduction_P Parameter: Timepoint (day) Value: 10
  misc_feature: MA Experiment 20001905 PARAMETER Experiment Name: At_Drought_Reproduction_P Parameter: Tissue Value: Rosettes
  misc_feature: MA Experiment 20001905 PARAMETER Experiment Name: At_Drought_Reproduction_P Parameter: Treatment Value: Drought vs. No Drought
  misc_feature: MA Experiment ID: 20001906 Result: Down-regulated in Transcription
  misc_feature: MA Experiment 20001906 PARAMETER Experiment Name: At_Drought_Reproduction_P Parameter: Age (day) Value: 35
  misc_feature: MA Experiment 20001906 PARAMETER Experiment Name: At_Drought_Reproduction_P Parameter: Organism Value: A. thaliana
  misc_feature: MA Experiment 20001906 PARAMETER Experiment Name: At_Drought_Reproduction_P Parameter: Plant Line Value: WS
  misc_feature: MA Experiment 20001906 PARAMETER Experiment Name: At_Drought_Reproduction_P Parameter: Timepoint (day) Value: 5
  misc_feature: MA Experiment 20001906 PARAMETER Experiment Name: At_Drought_Reproduction_P Parameter: Tissue Value: Siliques
  misc_feature: MA Experiment 20001906 PARAMETER Experiment Name: At_Drought_Reproduction_P Parameter: Treatment Value: Drought vs. No Drought
  misc_feature: MA Experiment ID: 20001908 Result: Down-regulated in Transcription
  misc_feature: MA Experiment 20001908 PARAMETER Experiment Name: At_Drought_Reproduction_P Parameter: Age (day) Value: 40
  misc_feature: MA Experiment 20001908 PARAMETER Experiment Name: At_Drought_Reproduction_P Parameter: Organism Value: A. thaliana
  misc_feature: MA Experiment 20001908 PARAMETER Experiment Name: At_Drought_Reproduction_P Parameter: Plant Line Value: WS
  misc_feature: MA Experiment 20001908 PARAMETER Experiment Name: At_Drought_Reproduction_P Parameter: Timepoint (day) Value: 10
  misc_feature: MA Experiment 20001908 PARAMETER Experiment Name: At_Drought_Reproduction_P Parameter: Tissue Value: Siliques
  misc_feature: MA Experiment 20001908 PARAMETER Experiment Name: At_Drought_Reproduction_P Parameter: Treatment Value: Drought vs. No Drought

SEQ ID NO: 49238 - protein, 330 aa, Arabidopsis thaliana; identical to SEQ ID NO: 47432
  peptide (1)..(330): Ceres Seq. ID no. 12601490
  misc_feature (29)..(248): Pfam Name: Thaumatin family Pfam Description: Thaumatin family
  misc_feature (29)..(248): Pfam Name: Thaumatin family Pfam Description: Thaumatin family
  misc_feature (5)..(258): Homolog of NCBI NO: 1235680 NR Description: receptor serine/threonine kinase PR5K
  misc_feature (1)..(262): Homolog of NCBI NO: 37531042 NR Description: putative thaumatin-like protein
  misc_feature (9)..(251): Homolog of NCBI NO: 15227907 NR Description: putative thaumatin-like pathogenesis-related
  misc_feature (11)..(255): Homolog of NCBI NO: 6273383 NR Description: SCUTL1 [Vitis vinifera]
  misc_feature (5)..(252): Homolog of NCBI NO: 4239765 NR Description: putative thaumatin-like protein precursor
  misc_feature (5)..(258): Homolog of NCBI NO: 1235680 NR Description: receptor serine/threonine kinase PR5K
  misc_feature (9)..(251): Homolog of NCBI NO: 15227907 NR Description: putative thaumatin-like pathogenesis-related
  misc_feature (5)..(252): Homolog of NCBI NO: 4239765 NR Description: putative thaumatin-like protein precursor
  misc_feature (1)..(330): Homolog of NCBI NO: 15222875 NR Description: thaumatin, putative
  misc_feature (1)..(252): Homolog of NCBI NO: 4105697 NR Description: thaumatin-like protein [Arabidopsis thaliana]
  misc_feature (9)..(330): Homolog of NCBI NO: 25296204 NR Description: hypothetical protein T20H2.19 [imported] -
  misc_feature (22)..(330): Homolog of NCBI NO: 30686652 NR Description: thaumatin family [Arabidopsis thaliana]
  misc_feature (8)..(288): Homolog of NCBI NO: 15233437 NR Description: thaumatin-like protein
  misc_feature (11)..(255): Homolog of NCBI NO: 6273383 NR Description: SCUTL1 [Vitis vinifera]
  misc_feature (1)..(262): Homolog of NCBI NO: 37531042 NR Description: putative thaumatin-like protein
  misc_feature (8)..(288): Homolog of NCBI NO: 15233437 NR Description: thaumatin-like protein
  misc_feature (22)..(330): Homolog of NCBI NO: 30686652 NR Description: thaumatin family [Arabidopsis thaliana]
  misc_feature (9)..(330): Homolog of NCBI NO: 25296204 NR Description: hypothetical protein T20H2.19 [imported] -
  misc_feature (1)..(252): Homolog of NCBI NO: 4105697 NR Description: thaumatin-like protein [Arabidopsis thaliana]
  misc_feature (1)..(330): Homolog of NCBI NO: 15222875 NR Description: thaumatin, putative

SEQ ID NO: 49239 - protein, 304 aa, Arabidopsis thaliana; identical to SEQ ID NO: 47433
  peptide (1)..(304): Ceres Seq. ID no. 12601491
  misc_feature (3)..(222): Pfam Name: Thaumatin family Pfam Description: Thaumatin family
  misc_feature (3)..(222): Pfam Name: Thaumatin family Pfam Description: Thaumatin family
  misc_feature (1)..(232): Homolog of NCBI NO: 1235680 NR Description: receptor serine/threonine kinase PR5K
  misc_feature (1)..(236): Homolog of NCBI NO: 37531042 NR Description: putative thaumatin-like protein
  misc_feature (1)..(225): Homolog of NCBI NO: 15227907 NR Description: putative thaumatin-like pathogenesis-related
  misc_feature (1)..(229): Homolog of NCBI NO: 6273383 NR Description: SCUTL1 [Vitis vinifera]
  misc_feature (1)..(226): Homolog of NCBI NO: 4239765 NR Description: putative thaumatin-like protein precursor
  misc_feature (1)..(232): Homolog of NCBI NO: 1235680 NR Description: receptor serine/threonine kinase PR5K
  misc_feature (1)..(225): Homolog of NCBI NO: 15227907 NR Description: putative thaumatin-like pathogenesis-related
  misc_feature (1)..(226): Homolog of NCBI NO: 4239765 NR Description: putative thaumatin-like protein precursor
  misc_feature (1)..(304): Homolog of NCBI NO: 15222875 NR Description: thaumatin, putative
  misc_feature (1)..(226): Homolog of NCBI NO: 4105697 NR Description: thaumatin-like protein [Arabidopsis thaliana]
  misc_feature (1)..(304): Homolog of NCBI NO: 25296204 NR Description: hypothetical protein T20H2.19 [imported] -
  misc_feature (1)..(304): Homolog of NCBI NO: 30686652 NR Description: thaumatin family [Arabidopsis thaliana]
  misc_feature (1)..(262): Homolog of NCBI NO: 15233437 NR Description: thaumatin-like protein
  misc_feature (1)..(229): Homolog of NCBI NO: 6273383 NR Description: SCUTL1 [Vitis vinifera]
  misc_feature (1)..(236): Homolog of NCBI NO: 37531042 NR Description: putative thaumatin-like protein
  misc_feature (1)..(262): Homolog of NCBI NO: 15233437 NR Description: thaumatin-like protein
  misc_feature (1)..(304): Homolog of NCBI NO: 30686652 NR Description: thaumatin family [Arabidopsis thaliana]
  misc_feature (1)..(304): Homolog of NCBI NO: 25296204 NR Description: hypothetical protein T20H2.19 [imported] -
  misc_feature (1)..(226): Homolog of NCBI NO: 4105697 NR Description: thaumatin-like protein [Arabidopsis thaliana]
  misc_feature (1)..(304): Homolog of NCBI NO: 15222875 NR Description: thaumatin, putative

SEQ ID NO: 49240 - protein, 193 aa, Arabidopsis thaliana; identical to SEQ ID NO: 47434
  peptide (1)..(193): Ceres Seq. ID no. 12601492
  misc_feature (1)..(111): Pfam Name: Thaumatin family Pfam Description: Thaumatin family
  misc_feature (1)..(111): Pfam Name: Thaumatin family Pfam Description: Thaumatin family
  misc_feature (1)..(121): Homolog of NCBI NO: 1235680 NR Description: receptor serine/threonine kinase PR5K
  misc_feature (1)..(125): Homolog of NCBI NO: 37531042 NR Description: putative thaumatin-like protein
  misc_feature (1)..(114): Homolog of NCBI NO: 15227907 NR Description: putative thaumatin-like pathogenesis-related
  misc_feature (1)..(118): Homolog of NCBI NO: 6273383 NR Description: SCUTL1 [Vitis vinifera]
  misc_feature (1)..(115): Homolog of NCBI NO: 4239765 NR Description: putative thaumatin-like protein precursor
  misc_feature (1)..(121): Homolog of NCBI NO: 1235680 NR Description: receptor serine/threonine kinase PR5K
  misc_feature (1)..(114): Homolog of NCBI NO: 15227907 NR Description: putative thaumatin-like pathogenesis-related
  misc_feature (1)..(115): Homolog of NCBI NO: 4239765 NR Description: putative thaumatin-like protein precursor
  misc_feature (1)..(193): Homolog of NCBI NO: 15222875 NR Description: thaumatin, putative
  misc_feature (1)..(115): Homolog of NCBI NO: 4105697 NR Description: thaumatin-like protein [Arabidopsis thaliana]
  misc_feature (1)..(193): Homolog of NCBI NO: 25296204 NR Description: hypothetical protein T20H2.19 [imported] -
  misc_feature (1)..(193): Homolog of NCBI NO: 30686652 NR Description: thaumatin family [Arabidopsis thaliana]
  misc_feature (1)..(151): Homolog of NCBI NO: 15233437 NR Description: thaumatin-like protein
  misc_feature (1)..(118): Homolog of NCBI NO: 6273383 NR Description: SCUTL1 [Vitis vinifera]
  misc_feature (1)..(125): Homolog of NCBI NO: 37531042 NR Description: putative thaumatin-like protein
  misc_feature (1)..(151): Homolog of NCBI NO: 15233437 NR Description: thaumatin-like protein
  misc_feature (1)..(193): Homolog of NCBI NO: 30686652 NR Description: thaumatin family [Arabidopsis thaliana]
  misc_feature (1)..(193): Homolog of NCBI NO: 25296204 NR Description: hypothetical protein T20H2.19 [imported] -
  misc_feature (1)..(115): Homolog of NCBI NO: 4105697 NR Description: thaumatin-like protein [Arabidopsis thaliana]
  misc_feature (1)..(193): Homolog of NCBI NO: 15222875 NR Description: thaumatin, putative

SEQ ID NO: 49241 - DNA, 1569 bp, Arabidopsis thaliana
  misc_feature (1)..(1569): Ceres Seq. ID no. 14303122
  misc_feature: MA Experiment ID: 20001911 Result: Down-regulated in Transcription
  misc_feature: MA Experiment 20001911 PARAMETER Experiment Name: At_Drought_Reproduction_P Parameter: Age (day) Value: 40
  misc_feature: MA Experiment 20001911 PARAMETER Experiment Name: At_Drought_Reproduction_P Parameter: Organism Value: A. thaliana
  misc_feature: MA Experiment 20001911 PARAMETER Experiment Name: At_Drought_Reproduction_P Parameter: Plant Line Value: WS
  misc_feature: MA Experiment 20001911 PARAMETER Experiment Name: At_Drought_Reproduction_P Parameter: Timepoint (day) Value: 10
  misc_feature: MA Experiment 20001911 PARAMETER Experiment Name: At_Drought_Reproduction_P Parameter: Tissue Value: Flowers
  misc_feature: MA Experiment 20001911 PARAMETER Experiment Name: At_Drought_Reproduction_P Parameter: Treatment Value: Drought vs. No Drought
gatgcgtactgtgaccattacatactacagttagctttcttctctagccgtcgaagtttcacgcgccgccgtgagaaaatgcagcacacaccggagcaaccgagagtcactctttacataatcctcaccaccgcgtttctctctctatgtttcctcctctctctctcttcctcttcccagtactcttcatcttcctacaccggacgacccgatgatctacgacccgacccgagactctttccttcttcctccaaaatcgccgccgatacagctcctccttcaatcgcttacctaatttccggatcttctggtgacacgcgacgaatccttcgacttctctacgctacttaccatcctcgaaatcgatatcttcttcatctcgatagcttagcgacacaatctgaacgagatcggctcgctgttgatgtacaagatgtaccgatttttagagctgcaaggaatgttgatgttattgggaagcctgatttcgcgtatcagagaggatcgtctccgatggcttcaacgcttcatggtgcttcgattcttcttagattgtcaggaacttgggattggtttgttagtattagtgttgatgattatcctctcgttactcaagatgagcttcttcatattatgtcacatttgcctaaggacttgaattttgtgaaccacactagctacattggttggaaagagtccaggaagttgaagccagttattgttgatccagggctctatcttgtggagaaaaccgatatgtttttcgcttcgcagaaacgagagttgcctaaggctttcaagttattctcaggtccatctttctccatcttaagccggaatttcatggagcactgtgtcttaggcactgacaacttccctcggactctactcatgtacttgtccaacacacctgattctctttccaactacttcccaactatcctctgcaacacggataccttcaaaaagaccatcatgaacaacaacttactctacctagcttctaacgacacttctaaagaaagataccatcagcttgatcacaaagagttcacagaaatggttgactccggagcagcttttgcaagaggattcaggtacgacgacactgtccttgatcgcatcgatcatgaacttctgggacgcaaacctggtgaagttgtgcctggtggttggtgtttaggagattctagtaaaaaccgtagctcgtgttccgtctggggtgactcgggtatccttcggcccggttctggttccgataggctcgagagacgaattgttgagttactatcaaacgattggttcagattgcaccaatgcgtacctgaatgatcggatgatcctcaccgcactttcaatagagtaaatagttgtccaagacacgaagaagataacggtactttatgcttctgtatctttagagagagttccacttctacattgtaacctgtgactttgagagtgtttgttccattgttgttgtagaaaaaccatctcaaagctgagaaatgaaacgactcggttcattggttgaagtttaaaccggtataaaatcccggtttttttttt

SEQ ID NO: 49242 - protein, 443 aa, Arabidopsis thaliana
  peptide (1)..(443): Ceres Seq. ID no. 14303123
  misc_feature (95)..(320): Pfam Name: Core-2/I-Branching enzyme Pfam Description: Core-2/I-Branching enzyme
  misc_feature (46)..(440): Homolog of NCBI NO: 34903664 NR Description: B1015E06.17 [Oryza sativa (japonica
  misc_feature (82)..(429): Homolog of NCBI NO: 32489778 NR Description: OSJNBb0018A10.9 [Oryza sativa (japonica
  misc_feature (78)..(440): Homolog of NCBI NO: 15236287 NR Description: N-acetylglucosaminyltransferase family
  misc_feature (31)..(441): Homolog of NCBI NO: 27497209 NR Description: Hypothetical protein [Oryza sativa (japonica
  misc_feature (41)..(430): Homolog of NCBI NO: 34895394 NR Description: P0445D12.4 [Oryza sativa (japonica
  misc_feature (15)..(440): Homolog of NCBI NO: 15218824 NR Description: N-acetylglucosaminyltransferase family
  misc_feature (38)..(440): Homolog of NCBI NO: 18409754 NR Description: N-acetylglucosaminyltransferase family
  misc_feature (27)..(440): Homolog of NCBI NO: 15242199 NR Description: N-acetylglucosaminyltransferase family
  misc_feature (85)..(440): Homolog of NCBI NO: 15242532 NR Description: N-acetylglucosaminyltransferase family
  misc_feature (27)..(443): Homolog of NCBI NO: 15229570 NR Description: expressed protein [Arabidopsis thaliana]
DAYCDHYILQLAFFSSRRSFTRRREKMQHTPEQPRVTLYIILTTAFLSLCFLLSLSSSSQYSSSSYTGRPDDLRPDPRLFPSSSKIAADTAPPSIAYLISGSSGDTRRILRLLYATYHPRNRYLLHLDSLATQSERDRLAVDVQDVPIFRAARNVDVIGKPDFAYQRGSSPMASTLHGASILLRLSGTWDWFVSISVDDYPLVTQDELLHIMSHLPKDLNFVNHTSYIGWKESRKLKPVIVDPGLYLVEKTDMFFASQKRELPKAFKLFSGPSFSILSRNFMEHCVLGTDNFPRTLLMYLSNTPDSLSNYFPTILCNTDTFKKTIMNNNLLYLASNDTSKERYHQLDHKEFTEMVDSGAAFARGFRYDDTVLDRIDHELLGRKPGEVVPGGWCLGDSSKNRSSCSVWGDSGILRPGSGSDRLERRIVELLSNDWFRLHQCVPE

SEQ ID NO: 49243 - protein, 417 aa, Arabidopsis thaliana
  peptide (1)..(417): Ceres Seq. ID no. 14303124
  misc_feature (69)..(294): Pfam Name: Core-2/I-Branching enzyme Pfam Description: Core-2/I-Branching enzyme
  misc_feature (20)..(414): Homolog of NCBI NO: 34903664 NR Description: B1015E06.17 [Oryza sativa (japonica
  misc_feature (56)..(403): Homolog of NCBI NO: 32489778 NR Description: OSJNBb0018A10.9 [Oryza sativa (japonica
  misc_feature (52)..(414): Homolog of NCBI NO: 15236287 NR Description: N-acetylglucosaminyltransferase family
  misc_feature (5)..(415): Homolog of NCBI NO: 27497209 NR Description: Hypothetical protein [Oryza sativa (japonica
  misc_feature (15)..(404): Homolog of NCBI NO: 34895394 NR Description: P0445D12.4 [Oryza sativa (japonica
  misc_feature (1)..(414): Homolog of NCBI NO: 15218824 NR Description: N-acetylglucosaminyltransferase family
  misc_feature (12)..(414): Homolog of NCBI NO: 18409754 NR Description: N-acetylglucosaminyltransferase family
  misc_feature (1)..(414): Homolog of NCBI NO: 15242199 NR Description: N-acetylglucosaminyltransferase family
  misc_feature (59)..(414): Homolog of NCBI NO: 15242532 NR Description: N-acetylglucosaminyltransferase family
  misc_feature (1)..(417): Homolog of NCBI NO: 15229570 NR Description: expressed protein [Arabidopsis thaliana]
MQHTPEQPRVTLYIILTTAFLSLCFLLSLSSSSQYSSSSYTGRPDDLRPDPRLFPSSSKIAADTAPPSIAYLISGSSGDTRRILRLLYATYHPRNRYLLHLDSLATQSERDRLAVDVQDVPIFRAARNVDVIGKPDFAYQRGSSPMASTLHGASILLRLSGTWDWFVSISVDDYPLVTQDELLHIMSHLPKDLNFVNHTSYIGWKESRKLKPVIVDPGLYLVEKTDMFFASQKRELPKAFKLFSGPSFSILSRNFMEHCVLGTDNFPRTLLMYLSNTPDSLSNYFPTILCNTDTFKKTIMNNNLLYLASNDTSKERYHQLDHKEFTEMVDSGAAFARGFRYDDTVLDRIDHELLGRKPGEVVPGGWCLGDSSKNRSSCSVWGDSGILRPGSGSDRLERRIVELLSNDWFRLHQCVPE

SEQ ID NO: 49244 - protein, 272 aa, Arabidopsis thaliana
  peptide (1)..(272): Ceres Seq. ID no. 14303125
  misc_feature (1)..(149): Pfam Name: Core-2/I-Branching enzyme Pfam Description: Core-2/I-Branching enzyme
  misc_feature (1)..(269): Homolog of NCBI NO: 34903664 NR Description: B1015E06.17 [Oryza sativa (japonica
  misc_feature (1)..(258): Homolog of NCBI NO: 32489778 NR Description: OSJNBb0018A10.9 [Oryza sativa (japonica
  misc_feature (1)..(269): Homolog of NCBI NO: 15236287 NR Description: N-acetylglucosaminyltransferase family
  misc_feature (1)..(270): Homolog of NCBI NO: 27497209 NR Description: Hypothetical protein [Oryza sativa (japonica
  misc_feature (1)..(259): Homolog of NCBI NO: 34895394 NR Description: P0445D12.4 [Oryza sativa (japonica
  misc_feature (1)..(269): Homolog of NCBI NO: 15218824 NR Description: N-acetylglucosaminyltransferase family
  misc_feature (1)..(269): Homolog of NCBI NO: 18409754 NR Description: N-acetylglucosaminyltransferase family
  misc_feature (1)..(269): Homolog of NCBI NO: 15242199 NR Description: N-acetylglucosaminyltransferase family
  misc_feature (1)..(269): Homolog of NCBI NO: 15242532 NR Description: N-acetylglucosaminyltransferase family
  misc_feature (1)..(272): Homolog of NCBI NO: 15229570 NR Description: expressed protein [Arabidopsis thaliana]
MASTLHGASILLRLSGTWDWFVSISVDDYPLVTQDELLHIMSHLPKDLNFVNHTSYIGWKESRKLKPVIVDPGLYLVEKTDMFFASQKRELPKAFKLFSGPSFSILSRNFMEHCVLGTDNFPRTLLMYLSNTPDSLSNYFPTILCNTDTFKKTIMNNNLLYLASNDTSKERYHQLDHKEFTEMVDSGAAFARGFRYDDTVLDRIDHELLGRKPGEVVPGGWCLGDSSKNRSSCSVWGDSGILRPGSGSDRLERRIVELLSNDWFRLHQCVPE

SEQ ID NO: 49245 - DNA, 1485 bp, Arabidopsis thaliana; identical to SEQ ID NO: 47351
  misc_feature (1)..(1485): Ceres Seq. ID no. 12604670
  misc_feature: MA Experiment ID: 20000495 Result: Down-regulated in Transcription
  misc_feature: MA Experiment 20000495 PARAMETER Experiment Name: At_Guard_Cells_P Parameter: Harvest Date Value: 8/2/2002
  misc_feature: MA Experiment 20000495 PARAMETER Experiment Name: At_Guard_Cells_P Parameter: Organism Value: A. thaliana
  misc_feature: MA Experiment 20000495 PARAMETER Experiment Name: At_Guard_Cells_P Parameter: Tissue Value: Guard Cells vs. Leaves

SEQ ID NO: 49246 - protein, 432 aa, Arabidopsis thaliana; identical to SEQ ID NO: 47352
  peptide (1)..(432): Ceres Seq. ID no. 12604671
  misc_feature (132)..(417): Pfam Name: Protein kinase domain Pfam Description: Protein kinase domain
  misc_feature (132)..(417): Pfam Name: Protein kinase domain Pfam Description: Protein kinase domain
  misc_feature (99)..(425): Homolog of NCBI NO: 20141531 NR Description: Casein kinase II, alpha' chain (CK II)
  misc_feature (100)..(428): Homolog of NCBI NO: 3821793 NR Description: casein kinase II alpha subunit [Zea mays]
  misc_feature (100)..(432): Homolog of NCBI NO: 23397331 NR Description: putative casein kinase II, alpha chain 2 CK II
  misc_feature (100)..(428): Homolog of NCBI NO: 125271 NR Description: Casein kinase II, alpha chain (CK II) (CK2-alpha)
  misc_feature (22)..(432): Homolog of NCBI NO: 30698301 NR Description: casein kinase II alpha chain 1 [Arabidopsis
  misc_feature (99)..(425): Homolog of NCBI NO: 20141531 NR Description: Casein kinase II, alpha' chain (CK II)
  misc_feature (100)..(432): Homolog of NCBI NO: 23397331 NR Description: putative casein kinase II, alpha chain 2 CK II
  misc_feature (22)..(432): Homolog of NCBI NO: 30698301 NR Description: casein kinase II alpha chain 1 [Arabidopsis
  misc_feature (1)..(432): Homolog of NCBI NO: 15227778 NR Description: putative casein kinase II catalytic (alpha)
  misc_feature (25)..(432): Homolog of NCBI NO: 17977868 NR Description: casein kinase II alpha subunit [Sinapis alba]
  misc_feature (100)..(432): Homolog of NCBI NO: 14317906 NR Description: casein kinase II alpha [Triticum aestivum]
  misc_feature (100)..(432): Homolog of NCBI NO: 34915304 NR Description: casein kinase II alpha subunit
  misc_feature (100)..(427): Homolog of NCBI NO: 12697577 NR Description: casein kinase II alpha subunit
  misc_feature (100)..(428): Homolog of NCBI NO: 125271 NR Description: Casein kinase II, alpha chain (CK II) (CK2-alpha)
  misc_feature (100)..(428): Homolog of NCBI NO: 3821793 NR Description: casein kinase II alpha subunit [Zea mays]
  misc_feature (100)..(427): Homolog of NCBI NO: 12697577 NR Description: casein kinase II alpha subunit
  misc_feature (100)..(432): Homolog of NCBI NO: 34915304 NR Description: casein kinase II alpha subunit
  misc_feature (100)..(432): Homolog of NCBI NO: 14317906 NR Description: casein kinase II alpha [Triticum aestivum]
  misc_feature (25)..(432): Homolog of NCBI NO: 17977868 NR Description: casein kinase II alpha subunit [Sinapis alba]
  misc_feature (1)..(432): Homolog of NCBI NO: 15227778 NR Description: putative casein kinase II catalytic (alpha)

SEQ ID NO: 49247 - DNA, 1998 bp, Arabidopsis thaliana
  misc_feature (1)..(1998): Ceres Seq. ID no. 13579794
  misc_feature: MA Experiment ID: 20000171 Result: Down-regulated in Transcription
  misc_feature: MA Experiment 20000171 PARAMETER Experiment Name: At_42deg_Heat_P Parameter: Age (day) Value: 14
  misc_feature: MA Experiment 20000171 PARAMETER Experiment Name: At_42deg_Heat_P Parameter: Organism Value: A. thaliana
  misc_feature: MA Experiment 20000171 PARAMETER Experiment Name: At_42deg_Heat_P Parameter: Plant Line Value: WS
  misc_feature: MA Experiment 20000171 PARAMETER Experiment Name: At_42deg_Heat_P Parameter: Temperature (deg C) Value: 42 vs. 22
  misc_feature: MA Experiment 20000171 PARAMETER Experiment Name: At_42deg_Heat_P Parameter: Timepoint (hr) Value: 1
  misc_feature: MA Experiment 20000171 PARAMETER Experiment Name: At_42deg_Heat_P Parameter: Tissue Value: Aerial
  misc_feature: MA Experiment ID: 20000173 Result: Down-regulated in Transcription
  misc_feature: MA Experiment 20000173 PARAMETER Experiment Name: At_42deg_Heat_P Parameter: Age (day) Value: 14
  misc_feature: MA Experiment 20000173 PARAMETER Experiment Name: At_42deg_Heat_P Parameter: Organism Value: A. thaliana
  misc_feature: MA Experiment 20000173 PARAMETER Experiment Name: At_42deg_Heat_P Parameter: Plant Line Value: WS
  misc_feature: MA Experiment 20000173 PARAMETER Experiment Name: At_42deg_Heat_P Parameter: Temperature (deg C) Value: 42 vs. 22
  misc_feature: MA Experiment 20000173 PARAMETER Experiment Name: At_42deg_Heat_P Parameter: Timepoint (hr) Value: 6
  misc_feature: MA Experiment 20000173 PARAMETER Experiment Name: At_42deg_Heat_P Parameter: Tissue Value: Aerial
atggcttgcatgaagctgggatccaaatctgatgctttccagagacaaggccaggcttggttttgcacaactggacttcctagtgatattgtcgttgaagttggggagatgtcttttcatctccacaagtttcccttgctctctagaagtggagtcatggaaagaaggattgcagaagcatcaaaagaaggcgatgataaatgtctcattgaaatctctgatcttcctggtggagacaaaacgtttgaactagtcgctaagttctgctatggtgtgaagcttgaactcactgcttctaacgttgtatatctcagatgcgctgctgagcatctcgaaatgactgaagaacatggggaaggaaatcttatttctcaaactgaaacatttttcaatcaagtagtcctcaaaagctggaaagattcaataaaagcgcttcatagctgcgatgaggtcctcgagtatgctgatgaattgaacattaccaagaaatgcattgagtcactagccatgagagcatcgacagacccaaacttgtttggatggccagttgtggagcatggtgggcccatgcagagtccaggtggcagtgttttatggaatgggataagcaccggggctagacctaaacatactagttcagactggtggtacgaggatgcatcgatgctaagttttcccctttttaagagacttatcacggtgatggagtcccgcggcattagagaagacatcatcgctggctccctaacctattacacacgaaaacacttgcctggcttaaaaagacgacgtggtggacctgaatctagtggtcgtttcagcacacctttgggctcagggaatgtactgtccgaggaagagcagaagaacttgcttgaagagatccaggagcttcttcgtatgcaaaaaggtttagttccaaccaagtttttcgttgacatgcttcgaatcgccaagattttaaaagcaagtccggattgcatagccaatttggagaagaggatagggatgcagcttgaccaggctgcgttggaagatcttgtaatgcctagcttttctcatactatggagaccctatacgatgttgactctgtgcaaaggatcttggaccattttcttgggacagatcagattatgcctggtggggttggctctccttgttcttcagtagatgacgggaatttaatcggatccccacagtcaataacaccaatgacagcggttgcaaagctgattgatgggtatcttgctgaagttgctcctgatgtcaatcttaagcttccaaagttccaagctttagctgcttctattcctgaatacgccagactcttagatgacggactctatcgtgcaatagacatttatctaaagcatcatccatggttggcggaaacagaaagagagaatctgtgccggttgttagattgtcagaaactctctttagaagcttgtacacatgcggcgcagaacgagagattaccgctaagaataatcgtccaagtgctcttctttgagcagctacagctcagaacctctgtagctggatgcttcctggtctcagacaacctcgatggcggatcaagacagttaagaagcggaggatatgtaggaggaccaaacgaaggaggcggaggaggaggaggatgggcaaccgcggtaagagagaatcaagtcctgaaagttggaatggacagtatgagaatgcgagtttgtgagttagagaaagaatgttccaacatgagacaagagattgagaaactcggtaagacgacaaaaggtggtggttctgcaagcaatggagtcggtagcaagacttgggaaaacgtttctaagaaactcgggttcggttttaagctgaagtcgcatcaaatgtgcagtgctcaggaaggttctgtgtctaagtctaacaacgagaatgtgaagatagagaagctaaaggatgttaaagagcgtcgtgggaagcataagaaagcttcgagcattagttctgagaggtga

SEQ ID NO: 49248 - protein, 665 aa, Arabidopsis thaliana
  peptide (1)..(665): Ceres Seq. ID no. 13579795
  misc_feature (213)..(484): Pfam Name: NPH3 family Pfam Description: NPH3 family
  misc_feature (21)..(372): Homolog of NCBI NO: 15230519 NR Description: phototropic response protein family [Arabidopsis
  misc_feature (10)..(81): Homolog of NCBI NO: 15240012 NR Description: phototropic response protein family [Arabidopsis
  misc_feature (54)..(632): Homolog of NCBI NO: 15240012 NR Description: phototropic response protein family [Arabidopsis
  misc_feature (10)..(81): Homolog of NCBI NO: 15146318 NR Description: AT5g66560/K1F13_23 [Arabidopsis thaliana]
  misc_feature (54)..(632): Homolog of NCBI NO: 15146318 NR Description: AT5g66560/K1F13_23 [Arabidopsis thaliana]
  misc_feature (491)..(605): Homolog of NCBI NO: 15240666 NR Description: photoreceptor-interacting protein-related
  misc_feature (1)..(521): Homolog of NCBI NO: 15240666 NR Description: photoreceptor-interacting protein-related
  misc_feature (558)..(629): Homolog of NCBI NO: 15242687 NR Description: phototropic response protein family [Arabidopsis
  misc_feature (1)..(534): Homolog of NCBI NO: 15242687 NR Description: phototropic response protein family [Arabidopsis
  misc_feature (1)..(596): Homolog of NCBI NO: 18481720 NR Description: hypothetical protein [Sorghum bicolor]
MACMKLGSKSDAFQRQGQAWFCTTGLPSDIVVEVGEMSFHLHKFPLLSRSGVMERRIAEASKEGDDKCLIEISDLPGGDKTFELVAKFCYGVKLELTASNVVYLRCAAEHLEMTEEHGEGNLISQTETFFNQVVLKSWKDSIKALHSCDEVLEYADELNITKKCIESLAMRASTDPNLFGWPVVEHGGPMQSPGGSVLWNGISTGARPKHTSSDWWYEDASMLSFPLFKRLITVMESRGIREDIIAGSLTYYTRKHLPGLKRRRGGPESSGRFSTPLGSGNVLSEEEQKNLLEEIQELLRMQKGLVPTKFFVDMLRIAKILKASPDCIANLEKRIGMQLDQAALEDLVMPSFSHTMETLYDVDSVQRILDHFLGTDQIMPGGVGSPCSSVDDGNLIGSPQSITPMTAVAKLIDGYLAEVAPDVNLKLPKFQALAASIPEYARLLDDGLYRAIDIYLKHHPWLAETERENLCRLLDCQKLSLEACTHAAQNERLPLRIIVQVLFFEQLQLRTSVAGCFLVSDNLDGGSRQLRSGGYVGGPNEGGGGGGGWATAVRENQVLKVGMDSMRMRVCELEKECSNMRQEIEKLGKTTKGGGSASNGVGSKTWENVSKKLGFGFKLKSHQMCSAQEGSVSKSNNENVKIEKLKDVKERRGKHKKASSISSER

SEQ ID NO: 49249 - protein, 662 aa, Arabidopsis thaliana
  peptide (1)..(662): Ceres Seq. ID no. 13579796
  misc_feature (210)..(481): Pfam Name: NPH3 family Pfam Description: NPH3 family
  misc_feature (18)..(369): Homolog of NCBI NO: 15230519 NR Description: phototropic response protein family [Arabidopsis
  misc_feature (7)..(78): Homolog of NCBI NO: 15240012 NR Description: phototropic response protein family [Arabidopsis
  misc_feature (51)..(629): Homolog of NCBI NO: 15240012 NR Description: phototropic response protein family [Arabidopsis
  misc_feature (7)..(78): Homolog of NCBI NO: 15146318 NR Description: AT5g66560/K1F13_23 [Arabidopsis thaliana]
  misc_feature (51)..(629): Homolog of NCBI NO: 15146318 NR Description: AT5g66560/K1F13_23 [Arabidopsis thaliana]
  misc_feature (488)..(602): Homolog of NCBI NO: 15240666 NR Description: photoreceptor-interacting protein-related
  misc_feature (1)..(518): Homolog of NCBI NO: 15240666 NR Description: photoreceptor-interacting protein-related
  misc_feature (555)..(626): Homolog of NCBI NO: 15242687 NR Description: phototropic response protein family [Arabidopsis
  misc_feature (1)..(531): Homolog of NCBI NO: 15242687 NR Description: phototropic response protein family [Arabidopsis
  misc_feature (1)..(593): Homolog of NCBI NO: 18481720 NR Description: hypothetical protein [Sorghum bicolor]
MKLGSKSDAFQRQGQAWFCTTGLPSDIVVEVGEMSFHLHKFPLLSRSGVMERRIAEASKEGDDKCLIEISDLPGGDKTFELVAKFCYGVKLELTASNVVYLRCAAEHLEMTEEHGEGNLISQTETFFNQVVLKSWKDSIKALHSCDEVLEYADELNITKKCIESLAMRASTDPNLFGWPVVEHGGPMQSPGGSVLWNGISTGARPKHTSSDWWYEDASMLSFPLFKRLITVMESRGIREDIIAGSLTYYTRKHLPGLKRRRGGPESSGRFSTPLGSGNVLSEEEQKNLLEEIQELLRMQKGLVPTKFFVDMLRIAKILKASPDCIANLEKRIGMQLDQAALEDLVMPSFSHTMETLYDVDSVQRILDHFLGTDQIMPGGVGSPCSSVDDGNLIGSPQSITPMTAVAKLIDGYLAEVAPDVNLKLPKFQALAASIPEYARLLDDGLYRAIDIYLKHHPWLAETERENLCRLLDCQKLSLEACTHAAQNERLPLRIIVQVLFFEQLQLRTSVAGCFLVSDNLDGGSRQLRSGGYVGGPNEGGGGGGGWATAVRENQVLKVGMDSMRMRVCELEKECSNMRQEIEKLGKTTKGGGSASNGVGSKTWENVSKKLGFGFKLKSHQMCSAQEGSVSKSNNENVKIEKLKDVKERRGKHKKASSISSER

SEQ ID NO: 49250 - protein, 629 aa, Arabidopsis thaliana
  peptide (1)..(629): Ceres Seq. ID no. 13579797
  misc_feature (177)..(448): Pfam Name: NPH3 family Pfam Description: NPH3 family
  misc_feature (1)..(336): Homolog of NCBI NO: 15230519 NR Description: phototropic response protein family [Arabidopsis
  misc_feature (1)..(45): Homolog of NCBI NO: 15240012 NR Description: phototropic response protein family [Arabidopsis
  misc_feature (18)..(596): Homolog of NCBI NO: 15240012 NR Description: phototropic response protein family [Arabidopsis
  misc_feature (1)..(45): Homolog of NCBI NO: 15146318 NR Description: AT5g66560/K1F13_23 [Arabidopsis thaliana]
  misc_feature (18)..(596): Homolog of NCBI NO: 15146318 NR Description: AT5g66560/K1F13_23 [Arabidopsis thaliana]
  misc_feature (455)..(569): Homolog of NCBI NO: 15240666 NR Description: photoreceptor-interacting protein-related
  misc_feature (1)..(485): Homolog of NCBI NO: 15240666 NR Description: photoreceptor-interacting protein-related
  misc_feature (522)..(593): Homolog of NCBI NO: 15242687 NR Description: phototropic response protein family [Arabidopsis
  misc_feature (1)..(498): Homolog of NCBI NO: 15242687 NR Description: phototropic response protein family [Arabidopsis
  misc_feature (1)..(560): Homolog of NCBI NO: 18481720 NR Description: hypothetical protein [Sorghum bicolor]
MSFHLHKFPLLSRSGVMERRIAEASKEGDDKCLIEISDLPGGDKTFELVAKFCYGVKLELTASNVVYLRCAAEHLEMTEEHGEGNLISQTETFFNQVVLKSWKDSIKALHSCDEVLEYADELNITKKCIESLAMRASTDPNLFGWPVVEHGGPMQSPGGSVLWNGISTGARPKHTSSDWWYEDASMLSFPLFKRLITVMESRGIREDIIAGSLTYYTRKHLPGLKRRRGGPESSGRFSTPLGSGNVLSEEEQKNLLEEIQELLRMQKGLVPTKFFVDMLRIAKILKASPDCIANLEKRIGMQLDQAALEDLVMPSFSHTMETLYDVDSVQRILDHFLGTDQIMPGGVGSPCSSVDDGNLIGSPQSITPMTAVAKLIDGYLAEVAPDVNLKLPKFQALAASIPEYARLLDDGLYRAIDIYLKHHPWLAETERENLCRLLDCQKLSLEACTHAAQNERLPLRIIVQVLFFEQLQLRTSVAGCFLVSDNLDGGSRQLRSGGYVGGPNEGGGGGGGWATAVRENQVLKVGMDSMRMRVCELEKECSNMRQEIEKLGKTTKGGGSASNGVGSKTWENVSKKLGFGFKLKSHQMCSAQEGSVSKSNNENVKIEKLKDVKERRGKHKKASSISSER

SEQ ID NO: 49251 - DNA, 1403 bp, Arabidopsis thaliana; identical to SEQ ID NO: 23886
  misc_feature (1)..(1403): Ceres Seq. ID no. 12601443
  misc_feature: MA Experiment ID: 20000496 Result: Up-regulated in Transcription
  misc_feature: MA Experiment 20000496 PARAMETER Experiment Name: At_Guard_Cells_P Parameter: Harvest Date Value: 7/19/2002
  misc_feature: MA Experiment 20000496 PARAMETER Experiment Name: At_Guard_Cells_P Parameter: Organism Value: Canola
  misc_feature: MA Experiment 20000496 PARAMETER Experiment Name: At_Guard_Cells_P Parameter: Tissue Value: Guard Cells vs. Leaves
  misc_feature: MA Experiment ID: 20000794 Result: Up-regulated in Transcription
  misc_feature: MA Experiment 20000794 PARAMETER Experiment Name: At_Petals_P Parameter: Age (day) Value: 23-25 days
  misc_feature: MA Experiment 20000794 PARAMETER Experiment Name: At_Petals_P Parameter: Plant Line Value: WS
  misc_feature: MA Experiment 20000794 PARAMETER Experiment Name: At_Petals_P Parameter: Tissue Value: Petals vs. Whole plant

SEQ ID NO: 49252 - protein, 321 aa, Arabidopsis thaliana; identical to SEQ ID NO: 23887
  peptide (1)..(321): Ceres Seq. ID no. 12601444
  misc_feature (47)..(311): Pfam Name: AUX/IAA family Pfam Description: AUX/IAA family
  misc_feature (47)..(311): Pfam Name: AUX/IAA family Pfam Description: AUX/IAA family
  misc_feature (19)..(316): Homolog of NCBI NO: 30698143 NR Description: auxin-responsive protein IAA9 (Indoleacetic
  misc_feature (19)..(316): Homolog of NCBI NO: 21592701 NR Description: auxin-induced protein IAA9 [Arabidopsis thaliana]
  misc_feature (19)..(316): Homolog of NCBI NO: 30698145 NR Description: auxin-responsive protein IAA9 (Indoleacetic
  misc_feature (19)..(137): Homolog of NCBI NO: 29465672 NR Description: Aux/IAA protein [Vitis vinifera]
  misc_feature (133)..(318): Homolog of NCBI NO: 29465672 NR Description: Aux/IAA protein [Vitis vinifera]
  misc_feature (19)..(316): Homolog of NCBI NO: 30698143 NR Description: auxin-responsive protein IAA9 (Indoleacetic
  misc_feature (19)..(316): Homolog of NCBI NO: 30698145 NR Description: auxin-responsive protein IAA9 (Indoleacetic
  misc_feature (133)..(318): Homolog of NCBI NO: 29465672 NR Description: Aux/IAA protein [Vitis vinifera]
  misc_feature (1)..(321): Homolog of NCBI NO: 15227275 NR Description: auxin-regulated protein (IAA8)
  misc_feature (1)..(321): Homolog of NCBI NO: 30681782 NR Description: auxin-responsive protein IAA8 (Indoleacetic
  misc_feature (19)..(318): Homolog of NCBI NO: 20257219 NR Description: auxin-regulated protein [Zinnia elegans]
  misc_feature (124)..(318): Homolog of NCBI NO: 20269051 NR Description: aux/IAA protein [Populus tremula x Populus
  misc_feature (19)..(137): Homolog of NCBI NO: 20269051 NR Description: aux/IAA protein [Populus tremula x Populus
  misc_feature (19)..(137): Homolog of NCBI NO: 29465672 NR Description: Aux/IAA protein [Vitis vinifera]
  misc_feature (19)..(316): Homolog of NCBI NO: 21592701 NR Description: auxin-induced protein IAA9 [Arabidopsis thaliana]
  misc_feature (19)..(137): Homolog of NCBI NO: 20269051 NR Description: aux/IAA protein [Populus tremula x Populus
  misc_feature (124)..(318): Homolog of NCBI NO: 20269051 NR Description: aux/IAA protein [Populus tremula x Populus
  misc_feature (19)..(318): Homolog of NCBI NO: 20257219 NR Description: auxin-regulated protein [Zinnia elegans]
  misc_feature (1)..(321): Homolog of NCBI NO: 30681782 NR Description: auxin-responsive protein IAA8 (Indoleacetic
  misc_feature (1)..(321): Homolog of NCBI NO: 15227275 NR Description: auxin-regulated protein (IAA8)

SEQ ID NO: 49253 - protein, 190 aa, Arabidopsis thaliana; identical to SEQ ID NO: 23888
  peptide (1)..(190): Ceres Seq. ID no. 12601445
  misc_feature (1)..(180): Pfam Name: AUX/IAA family Pfam Description: AUX/IAA family
  misc_feature (1)..(180): Pfam Name: AUX/IAA family Pfam Description: AUX/IAA family
  misc_feature (1)..(176): Homolog of NCBI NO: 10177324 NR Description: auxin-induced protein IAA9 [Arabidopsis thaliana]
  misc_feature (1)..(187): Homolog of NCBI NO: 25989504 NR Description: Aux/IAA protein [Solanum tuberosum]
  misc_feature (1)..(185): Homolog of NCBI NO: 30698143 NR Description: auxin-responsive protein IAA9 (Indoleacetic
  misc_feature (1)..(185): Homolog of NCBI NO: 21592701 NR Description: auxin-induced protein IAA9 [Arabidopsis thaliana]
  misc_feature (1)..(185): Homolog of NCBI NO: 30698145 NR Description: auxin-responsive protein IAA9 (Indoleacetic
  misc_feature (1)..(187): Homolog of NCBI NO: 20269051 NR Description: aux/IAA protein [Populus tremula x Populus
  misc_feature (1)..(190): Homolog of NCBI NO: 30681782 NR Description: auxin-responsive protein IAA8 (Indoleacetic
  misc_feature (2)..(187): Homolog of NCBI NO: 29465672 NR Description: Aux/IAA protein [Vitis vinifera]
  misc_feature (1)..(185): Homolog of NCBI NO: 30698145 NR Description: auxin-responsive protein IAA9 (Indoleacetic
  misc_feature (1)..(185): Homolog of NCBI NO: 21592701 NR Description: auxin-induced protein IAA9 [Arabidopsis thaliana]
  misc_feature (1)..(185): Homolog of NCBI NO: 30698143 NR Description: auxin-responsive protein IAA9 (Indoleacetic
  misc_feature (1)..(187): Homolog of NCBI NO: 25989504 NR Description: Aux/IAA protein [Solanum tuberosum]
  misc_feature (1)..(176): Homolog of NCBI NO: 10177324 NR Description: auxin-induced protein IAA9 [Arabidopsis thaliana]
  misc_feature (1)..(190): Homolog of NCBI NO: 15227275 NR Description: auxin-regulated protein (IAA8)
  misc_feature (1)..(187): Homolog of NCBI NO: 20257219 NR Description: auxin-regulated protein [Zinnia elegans]
  misc_feature (2)..(187): Homolog of NCBI NO: 29465672 NR Description: Aux/IAA protein [Vitis vinifera]
  misc_feature (1)..(187): Homolog of NCBI NO: 20269051 NR Description: aux/IAA protein [Populus tremula x Populus
  misc_feature (1)..(187): Homolog of NCBI NO: 20257219 NR Description: auxin-regulated protein [Zinnia elegans]
  misc_feature (1)..(190): Homolog of NCBI NO: 30681782 NR Description: auxin-responsive protein IAA8 (Indoleacetic
  misc_feature (1)..(190): Homolog of NCBI NO: 15227275 NR Description: auxin-regulated protein (IAA8)

SEQ ID NO: 49254 - protein, 189 aa, Arabidopsis thaliana; identical to SEQ ID NO: 23889
  peptide (1)..(189): Ceres Seq. ID no. 12601446
  misc_feature (1)..(179): Pfam Name: AUX/IAA family Pfam Description: AUX/IAA family
  misc_feature (1)..(179): Pfam Name: AUX/IAA family Pfam Description: AUX/IAA family
  misc_feature (1)..(175): Homolog of NCBI NO: 10177324 NR Description: auxin-induced protein IAA9 [Arabidopsis thaliana]
  misc_feature (1)..(186): Homolog of NCBI NO: 25989504 NR Description: Aux/IAA protein [Solanum tuberosum]
  misc_feature (1)..(184): Homolog of NCBI NO: 30698143 NR Description: auxin-responsive protein IAA9 (Indoleacetic
  misc_feature (1)..(184): Homolog of NCBI NO: 21592701 NR Description: auxin-induced protein IAA9 [Arabidopsis thaliana]
  misc_feature (1)..(184): Homolog of NCBI NO: 30698145 NR Description: auxin-responsive protein IAA9 (Indoleacetic
  misc_feature (1)..(175): Homolog of NCBI NO: 10177324 NR Description: auxin-induced protein IAA9 [Arabidopsis thaliana]
  misc_feature (1)..(184): Homolog of NCBI NO: 30698143 NR Description: auxin-responsive protein IAA9 (Indoleacetic
  misc_feature (1)..(184): Homolog of NCBI NO: 30698145 NR Description: auxin-responsive protein IAA9 (Indoleacetic
  misc_feature (1)..(189): Homolog of NCBI NO: 15227275 NR Description: auxin-regulated protein (IAA8)
  misc_feature (1)..(189): Homolog of NCBI NO: 30681782 NR Description: auxin-responsive protein IAA8 (Indoleacetic
  misc_feature (1)..(186): Homolog of NCBI NO: 20257219 NR Description: auxin-regulated protein [Zinnia elegans]
  misc_feature (1)..(186): Homolog of NCBI NO: 20269051 NR Description: aux/IAA protein [Populus tremula x Populus
  misc_feature (1)..(186): Homolog of NCBI NO: 29465672 NR Description: Aux/IAA protein [Vitis vinifera]
  misc_feature (1)..(184): Homolog of NCBI NO: 21592701 NR Description: auxin-induced protein IAA9 [Arabidopsis thaliana]
  misc_feature (1)..(186): Homolog of NCBI NO: 25989504 NR Description: Aux/IAA protein [Solanum tuberosum]
  misc_feature (1)..(186): Homolog of NCBI NO: 29465672 NR Description: Aux/IAA protein [Vitis vinifera]
  misc_feature (1)..(186): Homolog of NCBI NO: 20269051 NR Description: aux/IAA protein [Populus tremula x Populus
  misc_feature (1)..(186): Homolog of NCBI NO: 20257219 NR Description: auxin-regulated protein [Zinnia elegans]
  misc_feature (1)..(189): Homolog of NCBI NO: 30681782 NR Description: auxin-responsive protein IAA8 (Indoleacetic
  misc_feature (1)..(189): Homolog of NCBI NO: 15227275 NR Description: auxin-regulated protein (IAA8)

SEQ ID NO: 49255 - DNA, 1448 bp, Arabidopsis thaliana
  misc_feature (1)..(1448): Ceres Seq. ID no. 13647020
  misc_feature: MA Experiment ID: 20000169 Result: Up-regulated in Transcription
  misc_feature: MA Experiment 20000169 PARAMETER Experiment Name: At_100uM_ABA_P Parameter: Age (day) Value: 14
  misc_feature: MA Experiment 20000169 PARAMETER Experiment Name: At_100uM_ABA_P Parameter: Organism Value: A. thaliana
  misc_feature: MA Experiment 20000169 PARAMETER Experiment Name: At_100uM_ABA_P Parameter: Plant Line Value: WS
  misc_feature: MA Experiment 20000169 PARAMETER Experiment Name: At_100uM_ABA_P Parameter: Timepoint (hr) Value: 6
  misc_feature: MA Experiment 20000169 PARAMETER Experiment Name: At_100uM_ABA_P Parameter: Tissue Value: Aerial
  misc_feature: MA Experiment 20000169 PARAMETER Experiment Name: At_100uM_ABA_P Parameter: Treatment Value: 100uM ABA vs. No Treatment
  misc_feature: MA Experiment ID: 20000182 Result: Up-regulated in Transcription
  misc_feature: MA Experiment 20000182 PARAMETER Experiment Name: At_2mM_SA_P Parameter: Age (day) Value: 14
  misc_feature: MA Experiment 20000182 PARAMETER Experiment Name: At_2mM_SA_P Parameter: Organism Value: A. thaliana
  misc_feature: MA Experiment 20000182 PARAMETER Experiment Name: At_2mM_SA_P Parameter: Plant Line Value: WS
  misc_feature: MA Experiment 20000182 PARAMETER Experiment Name: At_2mM_SA_P Parameter: Timepoint (hr) Value: 6
  misc_feature: MA Experiment 20000182 PARAMETER Experiment Name: At_2mM_SA_P Parameter: Tissue Value: Aerial
  misc_feature: MA Experiment 20000182 PARAMETER Experiment Name: At_2mM_SA_P Parameter: Treatment Value: 2mM SA vs. No Treatment
  misc_feature: MA Experiment ID: 20000184 Result: Up-regulated in Transcription
  misc_feature: MA Experiment 20000184 PARAMETER Experiment Name: At_Shoots__P Parameter: Age (day) Value: 7
  misc_feature: MA Experiment 20000184 PARAMETER Experiment Name: At_Shoots__P Parameter: Tissue Value: Shoots vs. Whole Plant
  misc_feature: MA Experiment ID: 20000308 Result: Up-regulated in Transcription
  misc_feature: MA Experiment 20000308 PARAMETER Experiment Name: At_100mM_NaCl__P Parameter: Age (day) Value: 17
  misc_feature: MA Experiment 20000308 PARAMETER Experiment Name: At_100mM_NaCl__P Parameter: Organism Value: A. thaliana
  misc_feature: MA Experiment 20000308 PARAMETER Experiment Name: At_100mM_NaCl__P Parameter: Plant Line Value: WS
  misc_feature: MA Experiment 20000308 PARAMETER Experiment Name: At_100mM_NaCl__P Parameter: Timepoint (hr) Value: 72
  misc_feature: MA Experiment 20000308 PARAMETER Experiment Name: At_100mM_NaCl__P Parameter: Tissue Value: Whole Plant
  misc_feature: MA Experiment 20000308 PARAMETER Experiment Name: At_100mM_NaCl__P Parameter: Treatment Value: 100mM NaCl vs. No Treatment
  misc_feature: MA Experiment ID: 20000436 Result: Up-regulated in Transcription
  misc_feature: MA Experiment 20000436 PARAMETER Experiment Name: At_Drought_P Parameter: Age (day) Value: 7
  misc_feature: MA Experiment 20000436 PARAMETER Experiment Name: At_Drought_P Parameter: Organism Value: A. thaliana
  misc_feature: MA Experiment 20000436 PARAMETER Experiment Name: At_Drought_P Parameter: Plant Line Value: WS
  misc_feature: MA Experiment 20000436 PARAMETER Experiment Name: At_Drought_P Parameter: Timepoint (hr) Value: 12
  misc_feature: MA Experiment 20000436 PARAMETER Experiment Name: At_Drought_P Parameter: Tissue Value: Whole Plant
  misc_feature: MA Experiment 20000436 PARAMETER Experiment Name: At_Drought_P Parameter: Treatment Value: Drought vs. No Drought
  misc_feature: MA Experiment ID: 20000437 Result: Up-regulated in Transcription
  misc_feature: MA Experiment 20000437 PARAMETER Experiment Name: At_Drought_P Parameter: Age (day) Value: 8
  misc_feature: MA Experiment 20000437 PARAMETER Experiment Name: At_Drought_P Parameter: Organism Value: A. thaliana
  misc_feature: MA Experiment 20000437 PARAMETER Experiment Name: At_Drought_P Parameter: Plant Line Value: WS
  misc_feature: MA Experiment 20000437 PARAMETER Experiment Name: At_Drought_P Parameter: Timepoint (hr) Value: 24
  misc_feature: MA Experiment 20000437 PARAMETER Experiment Name: At_Drought_P Parameter: Tissue Value: Whole Plant
  misc_feature: MA Experiment 20000437 PARAMETER Experiment Name: At_Drought_P Parameter: Treatment Value: Drought vs. No Drought
  misc_feature: MA Experiment ID: 20000451 Result: Up-regulated in Transcription
  misc_feature: MA Experiment 20000451 PARAMETER Experiment Name: At_CS6879_Shoots-Roots_P Parameter: Age (day) Value: 14
  misc_feature: MA Experiment 20000451 PARAMETER Experiment Name: At_CS6879_Shoots-Roots_P Parameter: Organism Value: A. thaliana
  misc_feature: MA Experiment 20000451 PARAMETER Experiment Name: At_CS6879_Shoots-Roots_P Parameter: Plant Line Value: CS6879 vs. WS
  misc_feature: MA Experiment 20000451 PARAMETER Experiment Name: At_CS6879_Shoots-Roots_P Parameter: Tissue Value: Roots
  misc_feature: MA Experiment ID: 20000453 Result: Up-regulated in Transcription
  misc_feature: MA Experiment 20000453 PARAMETER Experiment Name: At_100uM_ABA_P Parameter: Age (day) Value: 15
  misc_feature: MA Experiment 20000453 PARAMETER Experiment Name: At_100uM_ABA_P Parameter: Organism Value: A. thaliana
  misc_feature: MA Experiment 20000453 PARAMETER Experiment Name: At_100uM_ABA_P Parameter: Plant Line Value: WS
  misc_feature: MA Experiment 20000453 PARAMETER Experiment Name: At_100uM_ABA_P Parameter: Timepoint (hr) Value: 24
  misc_feature: MA Experiment 20000453 PARAMETER Experiment Name: At_100uM_ABA_P Parameter: Tissue Value: Aerial
  misc_feature: MA Experiment 20000453 PARAMETER Experiment Name: At_100uM_ABA_P Parameter: Treatment Value: 100uM ABA vs. No Treatment
  misc_feature: MA Experiment ID: 20000506 Result: Up-regulated in Transcription
  misc_feature: MA Experiment 20000506 PARAMETER Experiment Name: At_Wounding_P Parameter: Organism Value: A. thaliana
  misc_feature: MA Experiment 20000506 PARAMETER Experiment Name: At_Wounding_P Parameter: Plant Line Value: WS
  misc_feature: MA Experiment 20000506 PARAMETER Experiment Name: At_Wounding_P Parameter: Timepoint (hr) Value: 6
  misc_feature: MA Experiment 20000506 PARAMETER Experiment Name: At_Wounding_P Parameter: Tissue Value: Aerial
  misc_feature: MA Experiment 20000506 PARAMETER Experiment Name: At_Wounding_P Parameter: Treatment Value: Wounding vs. No Wounding
  misc_feature: MA Experiment ID: 20000527 Result: Down-regulated in Transcription
  misc_feature: MA Experiment 20000527 PARAMETER Experiment Name: At_10percent_PEG_P Parameter: Age (day) Value: 20
  misc_feature: MA Experiment 20000527 PARAMETER Experiment Name: At_10percent_PEG_P Parameter: Organism Value: A. thaliana
  misc_feature: MA Experiment 20000527 PARAMETER Experiment Name: At_10percent_PEG_P Parameter: Plant Line Value: WS
  misc_feature: MA Experiment 20000527 PARAMETER Experiment Name: At_10percent_PEG_P Parameter: Timepoint (day) Value: 20
  misc_feature: MA Experiment 20000527 PARAMETER Experiment Name: At_10percent_PEG_P Parameter: Tissue Value: Whole Plant
  misc_feature: MA Experiment 20000527 PARAMETER Experiment Name: At_10percent_PEG_P Parameter: Treatment Value: 10percent PEG vs. No Treatment
  misc_feature: MA Experiment ID: 20000709 Result: Up-regulated in Transcription
  misc_feature: MA Experiment 20000709 PARAMETER Experiment Name: At_15mM_NH4NO3_L-to-H_P Parameter: Age (hr) Value: 14
  misc_feature: MA Experiment 20000709 PARAMETER Experiment Name: At_15mM_NH4NO3_L-to-H_P Parameter: Organism Value: A. thaliana
  misc_feature: MA Experiment 20000709 PARAMETER Experiment Name: At_15mM_NH4NO3_L-to-H_P Parameter: Plant Line Value: WS
  misc_feature: MA Experiment 20000709 PARAMETER Experiment Name: At_15mM_NH4NO3_L-to-H_P Parameter: Timepoint (hr) Value: 4
  misc_feature: MA Experiment 20000709 PARAMETER Experiment Name: At_15mM_NH4NO3_L-to-H_P Parameter: Tissue Value: Aerial
  misc_feature: MA Experiment 20000709 PARAMETER Experiment Name: At_15mM_NH4NO3_L-to-H_P Parameter: Treatment Value: 15mM NH4NO3 vs. 30mM Mannitol
  misc_feature: MA Experiment ID: 20000794 Result: Down-regulated in Transcription
  misc_feature: MA Experiment 20000794 PARAMETER Experiment Name: At_Petals_P Parameter: Age (day) Value: 23-25 days
  misc_feature: MA Experiment 20000794 PARAMETER Experiment Name: At_Petals_P Parameter: Plant Line Value: WS
  misc_feature: MA Experiment 20000794 PARAMETER Experiment Name: At_Petals_P Parameter: Tissue Value: Petals vs. Whole plant
  misc_feature: MA Experiment ID: 20001450 Result: Down-regulated in Transcription
  misc_feature: MA Experiment 20001450 PARAMETER Experiment Name: At_Far-red-induction_P Parameter: Age (day) Value: 7
  misc_feature: MA Experiment 20001450 PARAMETER Experiment Name: At_Far-red-induction_P Parameter: Light Value: Far-red vs. White
  misc_feature: MA Experiment 20001450 PARAMETER Experiment Name: At_Far-red-induction_P Parameter: Organism Value: A. thaliana
  misc_feature: MA Experiment 20001450 PARAMETER Experiment Name: At_Far-red-induction_P Parameter: Plant Line Value: Columbia
  misc_feature: MA Experiment 20001450 PARAMETER Experiment Name: At_Far-red-induction_P Parameter: Timepoint (hr) Value: 8
  misc_feature: MA Experiment 20001450 PARAMETER Experiment Name: At_Far-red-induction_P Parameter: Tissue Value: Whole Plant
  misc_feature: MA Experiment ID: 20001451 Result: Down-regulated in Transcription
  misc_feature: MA Experiment 20001451 PARAMETER Experiment Name: At_Far-red-induction_P Parameter: Age (day) Value: 7
  misc_feature: MA Experiment 20001451 PARAMETER Experiment Name: At_Far-red-induction_P Parameter: Light Value: Far-red vs. White
  misc_feature: MA Experiment 20001451 PARAMETER Experiment Name: At_Far-red-induction_P Parameter: Organism Value: A. thaliana
  misc_feature: MA Experiment 20001451 PARAMETER Experiment Name: At_Far-red-induction_P Parameter: Plant Line Value: Columbia
  misc_feature: MA Experiment 20001451 PARAMETER Experiment Name: At_Far-red-induction_P Parameter: Timepoint (hr) Value: 24
  misc_feature: MA Experiment 20001451 PARAMETER Experiment Name: At_Far-red-induction_P Parameter: Tissue Value: Whole Plant
  misc_feature: MA Experiment ID: 20001556 Result: Up-regulated in Transcription
  misc_feature: MA Experiment 20001556 PARAMETER Experiment Name: At_Drought_Soil_Dry_P Parameter: Age (day) Value: 26
  misc_feature: MA Experiment 20001556 PARAMETER Experiment Name: At_Drought_Soil_Dry_P Parameter: Organism Value: A. thaliana
  misc_feature: MA Experiment 20001556 PARAMETER Experiment Name: At_Drought_Soil_Dry_P Parameter: Plant Line Value: WS
  misc_feature: MA Experiment 20001556 PARAMETER Experiment Name: At_Drought_Soil_Dry_P Parameter: Post Timepoint (hr) Value: None
  misc_feature: MA Experiment 20001556 PARAMETER Experiment Name: At_Drought_Soil_Dry_P Parameter: Post-Treatment Value: None
  misc_feature: MA Experiment 20001556 PARAMETER Experiment Name: At_Drought_Soil_Dry_P Parameter: Timepoint (day) Value: 12
  misc_feature: MA Experiment 20001556 PARAMETER Experiment Name: At_Drought_Soil_Dry_P Parameter: Treatment Value: Drought vs. No Drought
  misc_feature: MA Experiment ID: 20001557 Result: Up-regulated in Transcription
  misc_feature: MA Experiment 20001557 PARAMETER Experiment Name: At_Drought_Soil_Dry_P Parameter: Age (day) Value: 27
  misc_feature: MA Experiment 20001557 PARAMETER Experiment Name: At_Drought_Soil_Dry_P Parameter: Organism Value: A. thaliana
  misc_feature: MA Experiment 20001557 PARAMETER Experiment Name: At_Drought_Soil_Dry_P Parameter: Plant Line Value: WS
  misc_feature: MA Experiment 20001557 PARAMETER Experiment Name: At_Drought_Soil_Dry_P Parameter: Post Timepoint (hr) Value: 3
  misc_feature: MA Experiment 20001557 PARAMETER Experiment Name: At_Drought_Soil_Dry_P Parameter: Post-Treatment Value: Re-Water vs. No Drought
  misc_feature: MA Experiment 20001557 PARAMETER Experiment Name: At_Drought_Soil_Dry_P Parameter: Timepoint (day) Value: 13
  misc_feature: MA Experiment 20001557 PARAMETER Experiment Name: At_Drought_Soil_Dry_P Parameter: Treatment Value: Drought vs. No Drought
  misc_feature: MA Experiment ID: 20001558 Result: Up-regulated in Transcription
  misc_feature: MA Experiment 20001558 PARAMETER Experiment Name: At_Drought_Soil_Dry_P Parameter: Age (day) Value: 27
  misc_feature: MA Experiment 20001558 PARAMETER Experiment Name: At_Drought_Soil_Dry_P Parameter: Organism Value: A. thaliana
  misc_feature: MA Experiment 20001558 PARAMETER Experiment Name: At_Drought_Soil_Dry_P Parameter: Plant Line Value: WS
  misc_feature: MA Experiment 20001558 PARAMETER Experiment Name: At_Drought_Soil_Dry_P Parameter: Post Timepoint (hr) Value: 6
  misc_feature: MA Experiment 20001558 PARAMETER Experiment Name: At_Drought_Soil_Dry_P Parameter: Post-Treatment Value: Re-Water vs. No Drought
  misc_feature: MA Experiment 20001558 PARAMETER Experiment Name: At_Drought_Soil_Dry_P Parameter: Timepoint (day) Value: 13
  misc_feature: MA Experiment 20001558 PARAMETER Experiment Name: At_Drought_Soil_Dry_P Parameter: Treatment Value: Drought vs. No Drought
  misc_feature: MA Experiment ID: 20001560 Result: Up-regulated in Transcription
  misc_feature: MA Experiment 20001560 PARAMETER Experiment Name: At_Drought_Soil_Dry_P Parameter: Age (day) Value: 28
  misc_feature: MA Experiment 20001560 PARAMETER Experiment Name: At_Drought_Soil_Dry_P Parameter: Organism Value: A. thaliana
  misc_feature: MA Experiment 20001560 PARAMETER Experiment Name: At_Drought_Soil_Dry_P Parameter: Plant Line Value: WS
  misc_feature: MA Experiment 20001560 PARAMETER Experiment Name: At_Drought_Soil_Dry_P Parameter: Post Timepoint (hr) Value: None
  misc_feature: MA Experiment 20001560 PARAMETER Experiment Name: At_Drought_Soil_Dry_P Parameter: Post-Treatment Value: None
  misc_feature: MA Experiment 20001560 PARAMETER Experiment Name: At_Drought_Soil_Dry_P Parameter: Timepoint (day) Value: 14
  misc_feature: MA Experiment 20001560 PARAMETER Experiment Name: At_Drought_Soil_Dry_P Parameter: Treatment Value: Drought vs. No Drought
  misc_feature: MA Experiment ID: 20001905 Result: Up-regulated in Transcription
  misc_feature: MA Experiment 20001905 PARAMETER Experiment Name: At_Drought_Reproduction_P Parameter: Age (day) Value: 40
  misc_feature: MA Experiment 20001905 PARAMETER Experiment Name: At_Drought_Reproduction_P Parameter: Organism Value: A. thaliana
  misc_feature: MA Experiment 20001905 PARAMETER Experiment Name: At_Drought_Reproduction_P Parameter: Plant Line Value: WS
  misc_feature: MA Experiment 20001905 PARAMETER Experiment Name: At_Drought_Reproduction_P Parameter: Timepoint (day) Value: 10
  misc_feature: MA Experiment 20001905 PARAMETER Experiment Name: At_Drought_Reproduction_P Parameter: Tissue Value: Rosettes
  misc_feature: MA Experiment 20001905 PARAMETER Experiment Name: At_Drought_Reproduction_P Parameter: Treatment Value: Drought vs. No Drought
  misc_feature: MA Experiment ID: 20001906 Result: Up-regulated in Transcription
  misc_feature: MA Experiment 20001906 PARAMETER Experiment Name: At_Drought_Reproduction_P Parameter: Age (day) Value: 35
  misc_feature: MA Experiment 20001906 PARAMETER Experiment Name: At_Drought_Reproduction_P Parameter: Organism Value: A. thaliana
  misc_feature: MA Experiment 20001906 PARAMETER Experiment Name: At_Drought_Reproduction_P Parameter: Plant Line Value: WS
  misc_feature: MA Experiment 20001906 PARAMETER Experiment Name: At_Drought_Reproduction_P Parameter: Timepoint (day) Value: 5
  misc_feature: MA Experiment 20001906 PARAMETER Experiment Name: At_Drought_Reproduction_P Parameter: Tissue Value: Siliques
  misc_feature: MA Experiment 20001906 PARAMETER Experiment Name: At_Drought_Reproduction_P Parameter: Treatment Value: Drought vs. No Drought
  misc_feature: MA Experiment ID: 20001910 Result: Up-regulated in Transcription
  misc_feature: MA Experiment 20001910 PARAMETER Experiment Name: At_Drought_Reproduction_P Parameter: Age (day) Value: 37
  misc_feature: MA Experiment 20001910 PARAMETER Experiment Name: At_Drought_Reproduction_P Parameter: Organism Value: A. thaliana
  misc_feature: MA Experiment 20001910 PARAMETER Experiment Name: At_Drought_Reproduction_P Parameter: Plant Line Value: WS
  misc_feature: MA Experiment 20001910 PARAMETER Experiment Name: At_Drought_Reproduction_P Parameter: Timepoint (day) Value: 7
  misc_feature: MA Experiment 20001910 PARAMETER Experiment Name: At_Drought_Reproduction_P Parameter: Tissue Value: Flowers
  misc_feature: MA Experiment 20001910 PARAMETER Experiment Name: At_Drought_Reproduction_P Parameter: Treatment Value: Drought vs. No Drought
  misc_feature: MA Experiment ID: 20001911 Result: Up-regulated in Transcription
  misc_feature: MA Experiment 20001911 PARAMETER Experiment Name: At_Drought_Reproduction_P Parameter: Age (day) Value: 40
  misc_feature: MA Experiment 20001911 PARAMETER Experiment Name: At_Drought_Reproduction_P Parameter: Organism Value: A. thaliana
  misc_feature: MA Experiment 20001911 PARAMETER Experiment Name: At_Drought_Reproduction_P Parameter: Plant Line Value: WS
  misc_feature: MA Experiment 20001911 PARAMETER Experiment Name: At_Drought_Reproduction_P Parameter: Timepoint (day) Value: 10
  misc_feature: MA Experiment 20001911 PARAMETER Experiment Name: At_Drought_Reproduction_P Parameter: Tissue Value: Flowers
  misc_feature: MA Experiment 20001911 PARAMETER Experiment Name: At_Drought_Reproduction_P Parameter: Treatment Value: Drought vs. No Drought
aaagagaattctctcatttcttcttcttcgctcagctccgacaacgaagggcgaagaatctcgctccctcaatttcgcattgccatcgattttcttagaggttaaaatggttgaacagactcagcaccccacgattcttcagaaggtttctggccaactcttgagctcgagtgtttctcaggacattcgtggttatgcttcggcttccaaaaggcctgctacataccagaaacatgcagcttacggaaactactccaatgctgcatttcaatatcctcttgtggctgcatctcagattgcaactactacttctcctgtgtttgtccaagctccaggagagaagggatttactaactttgctattgatttcatgatgggtggtgtttctgctgctgtgtcaaagactgctgctgctcccattgagcgtgtcaagcttttgattcaaaaccaggatgagatgcttaaggctggaaggcttactgagccatacaagggtattcgtgactgtttcggcaggacaattagggatgaaggtattggttcgttgtggagaggaaacaccgctaatgttatccgttacttccccactcaggccttgaactttgcattcaaagattacttcaagaggcttttcaacttcaagaaagacaaggatggctactggaagtggtttgctggtaacttggcatctggaggtgctgctggtgcctcttcccttctctttgtgtactctcttgactatgcacgtacccgtcttgccaatgactccaagtctgccaagaagggaggaggtgaaaggcagttcaatggtcttgttgatgtctacaagaagaccctcaagtcagatggtattgctggactttaccgtggtttcaacatctcgtgtgctggtatcattgtctaccgtggtctctactttggactgtacgactctgtgaagcctgtcctcctcactggagacctgcaggacagtttcttcgctagttttgctcttggatggctcatcaccaatggtgcgggtcttgcgtcgtacccgattgacacggttagaagaagaatgatgatgacatcaggtgaagcggtgaagtacaagagctcatttgatgcgttctcacagatcgtgaagaaggaaggagccaagtctctgttcaagggtgcgggtgccaacatcctgcgtgccgttgcaggtgctggtgtgcttgctggctacgacaagctgcagttaatcgtcttcggcaagaagtatggatctggaggtgcctaagtaccaccaaatcccgcagtcattaagcttcggcttttgtttttttctccattttttttgcagtttcagatttcttttataaaaaagatgttgatgaaatcatttccccataaaattagagaggagcaaggggaaatattatctgttcgacgataaggtttttgttatatggaataaattttgt

SEQ ID NO: 49256 - protein, 420 aa, Arabidopsis thaliana
  peptide (1)..(420): Ceres Seq. ID no. 13647021
  misc_feature (36)..(420): Homolog of NCBI NO: 100424 NR Description: ADP,ATP carrier protein precursor - potato
  misc_feature (36)..(420): Homolog of NCBI NO: 1890116 NR Description: ADP/ATP translocator [Lycopersicon esculentum]
  misc_feature (36)..(420): Homolog of NCBI NO: 113457 NR Description: ADP,ATP carrier protein, mitochondrial precursor
  misc_feature (36)..(420): Homolog of NCBI NO: 2780194 NR Description: adenine nucleotide translocator [Lupinus albus]
  misc_feature (37)..(420): Homolog of NCBI NO: 3334115 NR Description: ADP,ATP carrier protein 1, mitochondrial (ADP/ATP translocase 1) (Adenine nucleotide translocator 1) (ANT
  misc_feature (39)..(420): Homolog of NCBI NO: 99658 NR Description: ADP,ATP carrier protein - Arabidopsis thaliana
  misc_feature (36)..(420): Homolog of NCBI NO: 15231937 NR Description: mitochondrial ADP,ATP carrier protein 1
  misc_feature (36)..(420): Homolog of NCBI NO: 478810 NR Description: ADP,ATP carrier protein - Arabidopsis thaliana
  misc_feature (36)..(420): Homolog of NCBI NO: 15240640 NR Description: mitochondrial ADP,ATP carrier protein 2
  misc_feature (18)..(420): Homolog of NCBI NO: 444790 NR Description: nucleotide translocator
KRILSFLLLRSAPTTKGEESRSLNFALPSIFLEVKMVEQTQHPTILQKVSGQLLSSSVSQDIRGYASASKRPATYQKHAAYGNYSNAAFQYPLVAASQIATTTSPVFVQAPGEKGFTNFAIDFMMGGVSAAVSKTAAAPIERVKLLIQNQDEMLKAGRLTEPYKGIRDCFGRTIRDEGIGSLWRGNTANVIRYFPTQALNFAFKDYFKRLFNFKKDKDGYWKWFAGNLASGGAAGASSLLFVYSLDYARTRLANDSKSAKKGGGERQFNGLVDVYKKTLKSDGIAGLYRGFNISCAGIIVYRGLYFGLYDSVKPVLLTGDLQDSFFASFALGWLITNGAGLASYPIDTVRRRMMMTSGEAVKYKSSFDAFSQIVKKEGAKSLFKGAGANILRAVAGAGVLAGYDKLQLIVFGKKYGSGGA

SEQ ID NO: 49257 - protein, 385 aa, Arabidopsis thaliana
  peptide (1)..(385): Ceres Seq. ID no. 13647022
  misc_feature (1)..(385): Homolog of NCBI NO: 100424 NR Description: ADP,ATP carrier protein precursor - potato
  misc_feature (1)..(385): Homolog of NCBI NO: 1890116 NR Description: ADP/ATP translocator [Lycopersicon esculentum]
  misc_feature (1)..(385): Homolog of NCBI NO: 113457 NR Description: ADP,ATP carrier protein, mitochondrial precursor
  misc_feature (1)..(385): Homolog of NCBI NO: 2780194 NR Description: adenine nucleotide translocator [Lupinus albus]
  misc_feature (2)..(385): Homolog of NCBI NO: 3334115 NR Description: ADP,ATP carrier protein 1, mitochondrial (ADP/ATP translocase 1) (Adenine nucleotide translocator 1) (ANT
  misc_feature (4)..(385): Homolog of NCBI NO: 99658 NR Description: ADP,ATP carrier protein - Arabidopsis thaliana
  misc_feature (1)..(385): Homolog of NCBI NO: 15231937 NR Description: mitochondrial ADP,ATP carrier protein 1
  misc_feature (1)..(385): Homolog of NCBI NO: 478810 NR Description: ADP,ATP carrier protein - Arabidopsis thaliana
  misc_feature (1)..(385): Homolog of NCBI NO: 15240640 NR Description: mitochondrial ADP,ATP carrier protein 2
  misc_feature (1)..(385): Homolog of NCBI NO: 444790 NR Description: nucleotide translocator
MVEQTQHPTILQKVSGQLLSSSVSQDIRGYASASKRPATYQKHAAYGNYSNAAFQYPLVAASQIATTTSPVFVQAPGEKGFTNFAIDFMMGGVSAAVSKTAAAPIERVKLLIQNQDEMLKAGRLTEPYKGIRDCFGRTIRDEGIGSLWRGNTANVIRYFPTQALNFAFKDYFKRLFNFKKDKDGYWKWFAGNLASGGAAGASSLLFVYSLDYARTRLANDSKSAKKGGGERQFNGLVDVYKKTLKSDGIAGLYRGFNISCAGIIVYRGLYFGLYDSVKPVLLTGDLQDSFFASFALGWLITNGAGLASYPIDTVRRRMMMTSGEAVKYKSSFDAFSQIVKKEGAKSLFKGAGANILRAVAGAGVLAGYDKLQLIVFGKKYGSGGA

SEQ ID NO: 49258 - protein, 297 aa, Arabidopsis thaliana
  peptide (1)..(297): Ceres Seq. ID no. 13647023
  misc_feature (1)..(297): Homolog of NCBI NO: 100424 NR Description: ADP,ATP carrier protein precursor - potato
  misc_feature (1)..(297): Homolog of NCBI NO: 1890116 NR Description: ADP/ATP translocator [Lycopersicon esculentum]
  misc_feature (1)..(297): Homolog of NCBI NO: 113457 NR Description: ADP,ATP carrier protein, mitochondrial precursor
  misc_feature (1)..(297): Homolog of NCBI NO: 2780194 NR Description: adenine nucleotide translocator [Lupinus albus]
  misc_feature (1)..(297): Homolog of NCBI NO: 3334115 NR Description: ADP,ATP carrier protein 1, mitochondrial (ADP/ATP translocase 1) (Adenine nucleotide translocator 1) (ANT
  misc_feature (1)..(297): Homolog of NCBI NO: 99658 NR Description: ADP,ATP carrier protein - Arabidopsis thaliana
  misc_feature (1)..(297): Homolog of NCBI NO: 15231937 NR Description: mitochondrial ADP,ATP carrier protein 1
  misc_feature (1)..(297): Homolog of NCBI NO: 478810 NR Description: ADP,ATP carrier protein - Arabidopsis thaliana
  misc_feature (1)..(297): Homolog of NCBI NO: 15240640 NR Description: mitochondrial ADP,ATP carrier protein 2
  misc_feature (1)..(297): Homolog of NCBI NO: 444790 NR Description: nucleotide translocator
MMGGVSAAVSKTAAAPIERVKLLIQNQDEMLKAGRLTEPYKGIRDCFGRTIRDEGIGSLWRGNTANVIRYFPTQALNFAFKDYFKRLFNFKKDKDGYWKWFAGNLASGGAAGASSLLFVYSLDYARTRLANDSKSAKKGGGERQFNGLVDVYKKTLKSDGIAGLYRGFNISCAGIIVYRGLYFGLYDSVKPVLLTGDLQDSFFASFALGWLITNGAGLASYPIDTVRRRMMMTSGEAVKYKSSFDAFSQIVKKEGAKSLFKGAGANILRAVAGAGVLAGYDKLQLIVFGKKYGSGGA

SEQ ID NO: 49259 - DNA, 2298 bp, Arabidopsis thaliana
  misc_feature (1)..(2298): Ceres Seq. ID no. 13588537
  misc_feature: MA Experiment ID: 20000286 Result: Up-regulated in Transcription
  misc_feature: MA Experiment 20000286 PARAMETER Experiment Name: At_Open_Flower_P Parameter: Age (day) Value: 21
  misc_feature: MA Experiment 20000286 PARAMETER Experiment Name: At_Open_Flower_P Parameter: Plant Line Value: WS
  misc_feature: MA Experiment 20000286 PARAMETER Experiment Name: At_Open_Flower_P Parameter: Tissue Value: Half Open vs. Whole Plant
  misc_feature: MA Experiment ID: 20001755 Result: Up-regulated in Transcription
  misc_feature: MA Experiment 20001755 PARAMETER Experiment Name: At_50mM_NH4NO3_L-to-H_P Parameter: Timepoint (hr) Value: 2
  misc_feature: MA Experiment 20001755 PARAMETER Experiment Name: At_50mM_NH4NO3_L-to-H_P Parameter: Tissue Value: Leaf
  misc_feature: MA Experiment 20001755 PARAMETER Experiment Name: At_50mM_NH4NO3_L-to-H_P Parameter: Treatment Value: 50mM NH4NO3 vs 100mM Mannitol
  misc_feature: MA Experiment ID: 20001757 Result: Up-regulated in Transcription
  misc_feature: MA Experiment 20001757 PARAMETER Experiment Name: At_50mM_NH4NO3_L-to-H_P Parameter: Timepoint (hr) Value: 6
  misc_feature: MA Experiment 20001757 PARAMETER Experiment Name: At_50mM_NH4NO3_L-to-H_P Parameter: Tissue Value: Leaf
  misc_feature: MA Experiment 20001757 PARAMETER Experiment Name: At_50mM_NH4NO3_L-to-H_P Parameter: Treatment Value: 50mM NH4NO3 vs 100mM Mannitol
gttctctacaacgaactttaaagtaacaaagtacacagaaaggtttttacttcttccttgcttgttgtgtgtattctcattcacatacaattgtttttttgtaactatggagaatactataacgagctctacctcctcaccgaagggccggggagtaaatttctcgaccccgagaggctttggttcaaaatttaagtcaaaatgtaaagaaaccttctttcccgatgatccattcaaaccgatatcgcaagagccaaaccgtttgctaaaaacaaagaagttattggagtattttgtgccaatctttgagtggctcccaaagtatgatatgcaaaaactaaagtatgatgtgctcgccggaatcaccatcaccagtcttgctgttcctcagggcatcagctatgctaagctcgccagtatccctcccatcataggcctatattcaagttttgtgccgccttttgtgtatgccgtgttcggaagttcgaacaatctggcagtgggaacagtcgcagcatgctctttgctgatcgctgagacattcggtgaggagatgataaaaaatgagcctgaactctaccttcatttgatcttcaccgccactctcatcaccggtctattccaatttgctatgggattcttgaggttggggatattggtggatttcttgtcacactcgaccataacgggcttcatgggcggtaccgcaatcatcattctcctacaacagcttaagggcatctttggactagtccattttacgcacaaaaccgatgtcgtatcagttctccactcaatcttagacaaccgggctgagtggaagtggcaaagtaccttggctggtgtctgctttcttgtatttctacaatccactcgatacataaagcaaagatacccaaagctattttgggtatcagcaatgggtccaatggtggtggtcgttgtgggttgcgttgttgcttatttggtgaaaggaacagcacacggcattgctactgttgggcctttaaagaaaggactaaatcctccttctattcaacttttgaactttgactccaagtatctagggatggtgtttaaggccggaatcgtcacaggactcatcgctttggccgaagggatagcaattggaagaagctttgctgtaatgaagaacgaacaaacggacgggaacaaagagatgatagcatttggtcttatgaacgtaattggctccttcacttcttgctatttgacaacggggccattttcaaagacagcagtgaactacaacgcggggacaaagacaccgatgtcgaatgtagtaatgggcgtttgcatgatgcttgtgcttctcttcctagcgcctctattcagctacacaccattagttggtctctcagccatcattatgtcagccatgttgggtctcatcaactacgaggagatgtaccatctcttcaaggttgacaagtttgatttcctcgtctgcatgtccgcctttttcggtgtttcattccttagcatggactacggtctcatcatctccgttggattttctatcgtaagagctttgttgtacgttgcaaggccctccacttgtaaattgggaaggataccaaactcggttatgtttagagacatagaacagtaccctgcctccgaggagatgcttggttatatcattcttcaattaggctctccagtcttttttgccaatagcacttacgtccgtgaacggatcttgaggtggattcgtgatgaacctgaagccatcgagtttcttctccttgatctctctggagtttcaaccattgacatgaccgggatggaaacactactcgaaattcagagaatccttggatcaaaaaacatcaagatggtgataataaatccaagatttgaagtcttggaaaagatgatgttgtcccatttcgtggagaagataggaaaagagtatatgttcttatcgattgacgatgcagttcaagcatgccgatttaatcttaccaccaccaagccggaagtgtgaccttcttcttagttattagtgggaaggttctaataaaatgcgtaatcttttcttttttgtcaatggaagttaaactgcttaacagtggaaccaaaatatagattaagaaagaaaaaaaaaacagaagttaaactgcttatctttgaattatgggaattaaatgtagtggacccaaaatcatgaaatggttttaattagaccactatgattgcttcgtggctatgaaagagttgtaaccgagaaagaaaagcaagaagcgataaatgaaaatttcagtattattgact

SEQ ID NO: 49260 - protein, 669 aa, Arabidopsis thaliana
  peptide (1)..(669): Ceres Seq. ID no. 15220887
  misc_feature (211)..(521): Pfam Name: Sulfate transporter family Pfam Description: Sulfate transporter family
  misc_feature (100)..(655): Homolog of NCBI NO: 2967454 NR Description: sulfate transporter [Arabidopsis thaliana]
  misc_feature (100)..(655): Homolog of NCBI NO: 18411773 NR Description: sulfate transporter -related [Arabidopsis
  misc_feature (63)..(662): Homolog of NCBI NO: 15238085 NR Description: sulfate transporter [Arabidopsis thaliana]
  misc_feature (69)..(667): Homolog of NCBI NO: 34902632 NR Description: Putative sulfate transporter ATST1
  misc_feature (57)..(669): Homolog of NCBI NO: 11279066 NR Description: sulfate transporter AST12 [imported] -
  misc_feature (42)..(668): Homolog of NCBI NO: 15235467 NR Description: sulfate transporter protein [Arabidopsis
  misc_feature (57)..(669): Homolog of NCBI NO: 15231069 NR Description: sulfate transporter ATST1 [Arabidopsis thaliana]
  misc_feature (57)..(669): Homolog of NCBI NO: 11279064 NR Description: hypothetical protein [imported] - Arabidopsis
  misc_feature (57)..(669): Homolog of NCBI NO: 11279065 NR Description: sulfate transporter ATST1 [imported] -
  misc_feature (52)..(666): Homolog of NCBI NO: 34910666 NR Description: sulfate transporter-like protein
FSTTNFKVTKYTERFLLLPCLLCVFSFTYNCFFVTMENTITSSTSSPKGRGVNFSTPRGFGSKFKSKCKETFFPDDPFKPISQEPNRLLKTKKLLEYFVPIFEWLPKYDMQKLKYDVLAGITITSLAVPQGISYAKLASIPPIIGLYSSFVPPFVYAVFGSSNNLAVGTVAACSLLIAETFGEEMIKNEPELYLHLIFTATLITGLFQFAMGFLRLGILVDFLSHSTITGFMGGTAIIILLQQLKGIFGLVHFTHKTDVVSVLHSILDNRAEWKWQSTLAGVCFLVFLQSTRYIKQRYPKLFWVSAMGPMVVVVVGCVVAYLVKGTAHGIATVGPLKKGLNPPSIQLLNFDSKYLGMVFKAGIVTGLIALAEGIAIGRSFAVMKNEQTDGNKEMIAFGLMNVIGSFTSCYLTTGPFSKTAVNYNAGTKTPMSNVVMGVCMMLVLLFLAPLFSYTPLVGLSAIIMSAMLGLINYEEMYHLFKVDKFDFLVCMSAFFGVSFLSMDYGLIISVGFSIVRALLYVARPSTCKLGRIPNSVMFRDIEQYPASEEMLGYIILQLGSPVFFANSTYVRERILRWIRDEPEAIEFLLLDLSGVSTIDMTGMETLLEIQRILGSKNIKMVIINPRFEVLEKMMLSHFVEKIGKEYMFLSIDDAVQACRFNLTTTKPEV

SEQ ID NO: 49261 - protein, 634 aa, Arabidopsis thaliana
  peptide (1)..(634): Ceres Seq. ID no. 15220888
  misc_feature (176)..(486): Pfam Name: Sulfate transporter family Pfam Description: Sulfate transporter family
  misc_feature (65)..(620): Homolog of NCBI NO: 2967454 NR Description: sulfate transporter [Arabidopsis thaliana]
  misc_feature (65)..(620): Homolog of NCBI NO: 18411773 NR Description: sulfate transporter -related [Arabidopsis
  misc_feature (28)..(627): Homolog of NCBI NO: 15238085 NR Description: sulfate transporter [Arabidopsis thaliana]
  misc_feature (34)..(632): Homolog of NCBI NO: 34902632 NR Description: Putative sulfate transporter ATST1
  misc_feature (22)..(634): Homolog of NCBI NO: 11279066 NR Description: sulfate transporter AST12 [imported] -
  misc_feature (7)..(633): Homolog of NCBI NO: 15235467 NR Description: sulfate transporter protein [Arabidopsis
  misc_feature (22)..(634): Homolog of NCBI NO: 15231069 NR Description: sulfate transporter ATST1 [Arabidopsis thaliana]
  misc_feature (22)..(634): Homolog of NCBI NO: 11279064 NR Description: hypothetical protein [imported] - Arabidopsis
  misc_feature (22)..(634): Homolog of NCBI NO: 11279065 NR Description: sulfate transporter ATST1 [imported] -
  misc_feature (17)..(631): Homolog of NCBI NO: 34910666 NR Description: sulfate transporter-like protein
MENTITSSTSSPKGRGVNFSTPRGFGSKFKSKCKETFFPDDPFKPISQEPNRLLKTKKLLEYFVPIFEWLPKYDMQKLKYDVLAGITITSLAVPQGISYAKLASIPPIIGLYSSFVPPFVYAVFGSSNNLAVGTVAACSLLIAETFGEEMIKNEPELYLHLIFTATLITGLFQFAMGFLRLGILVDFLSHSTITGFMGGTAIIILLQQLKGIFGLVHFTHKTDVVSVLHSILDNRAEWKWQSTLAGVCFLVFLQSTRYIKQRYPKLFWVSAMGPMVVVVVGCVVAYLVKGTAHGIATVGPLKKGLNPPSIQLLNFDSKYLGMVFKAGIVTGLIALAEGIAIGRSFAVMKNEQTDGNKEMIAFGLMNVIGSFTSCYLTTGPFSKTAVNYNAGTKTPMSNVVMGVCMMLVLLFLAPLFSYTPLVGLSAIIMSAMLGLINYEEMYHLFKVDKFDFLVCMSAFFGVSFLSMDYGLIISVGFSIVRALLYVARPSTCKLGRIPNSVMFRDIEQYPASEEMLGYIILQLGSPVFFANSTYVRERILRWIRDEPEAIEFLLLDLSGVSTIDMTGMETLLEIQRILGSKNIKMVIINPRFEVLEKMMLSHFVEKIGKEYMFLSIDDAVQACRFNLTTTKPEV

SEQ ID NO: 49262 - protein, 560 aa, Arabidopsis thaliana
  peptide (1)..(560): Ceres Seq. ID no. 15220889
  misc_feature (102)..(412): Pfam Name: Sulfate transporter family Pfam Description: Sulfate transporter family
  misc_feature (1)..(546): Homolog of NCBI NO: 2967454 NR Description: sulfate transporter [Arabidopsis thaliana]
  misc_feature (1)..(546): Homolog of NCBI NO: 18411773 NR Description: sulfate transporter -related [Arabidopsis
  misc_feature (1)..(553): Homolog of NCBI NO: 15238085 NR Description: sulfate transporter [Arabidopsis thaliana]
  misc_feature (1)..(558): Homolog of NCBI NO: 34902632 NR Description: Putative sulfate transporter ATST1
  misc_feature (1)..(560): Homolog of NCBI NO: 11279066 NR Description: sulfate transporter AST12 [imported] -
  misc_feature (1)..(559): Homolog of NCBI NO: 15235467 NR Description: sulfate transporter protein [Arabidopsis
  misc_feature (1)..(560): Homolog of NCBI NO: 15231069 NR Description: sulfate transporter ATST1 [Arabidopsis thaliana]
  misc_feature (1)..(560): Homolog of NCBI NO: 11279064 NR Description: hypothetical protein [imported] - Arabidopsis
  misc_feature (1)..(560): Homolog of NCBI NO: 11279065 NR Description: sulfate transporter ATST1 [imported] -
  misc_feature (1)..(557): Homolog of NCBI NO: 34910666 NR Description: sulfate transporter-like protein
MQKLKYDVLAGITITSLAVPQGISYAKLASIPPIIGLYSSFVPPFVYAVFGSSNNLAVGTVAACSLLIAETFGEEMIKNEPELYLHLIFTATLITGLFQFAMGFLRLGILVDFLSHSTITGFMGGTAIIILLQQLKGIFGLVHFTHKTDVVSVLHSILDNRAEWKWQSTLAGVCFLVFLQSTRYIKQRYPKLFWVSAMGPMVVVVVGCVVAYLVKGTAHGIATVGPLKKGLNPPSIQLLNFDSKYLGMVFKAGIVTGLIALAEGIAIGRSFAVMKNEQTDGNKEMIAFGLMNVIGSFTSCYLTTGPFSKTAVNYNAGTKTPMSNVVMGVCMMLVLLFLAPLFSYTPLVGLSAIIMSAMLGLINYEEMYHLFKVDKFDFLVCMSAFFGVSFLSMDYGLIISVGFSIVRALLYVARPSTCKLGRIPNSVMFRDIEQYPASEEMLGYIILQLGSPVFFANSTYVRERILRWIRDEPEAIEFLLLDLSGVSTIDMTGMETLLEIQRILGSKNIKMVIINPRFEVLEKMMLSHFVEKIGKEYMFLSIDDAVQACRFNLTTTKPEV

SEQ ID NO: 49263 - DNA, 1790 bp, Arabidopsis thaliana
  misc_feature (1)..(1790): Ceres Seq. ID no. 13592250
  misc_feature: MA Experiment ID: 20000179 Result: Up-regulated in Transcription
  misc_feature: MA Experiment 20000179 PARAMETER Experiment Name: At_Germinating_Seeds_P Parameter: Age (hr) Value: 6 vs. 0
  misc_feature: MA Experiment 20000179 PARAMETER Experiment Name: At_Germinating_Seeds_P Parameter: Tissue Value: Germinating Seeds
  misc_feature: MA Experiment ID: 20000180 Result: Up-regulated in Transcription
  misc_feature: MA Experiment 20000180 PARAMETER Experiment Name: At_Germinating_Seeds_P Parameter: Age (hr) Value: 24 vs. 0
  misc_feature: MA Experiment 20000180 PARAMETER Experiment Name: At_Germinating_Seeds_P Parameter: Tissue Value: Germinating Seeds
  misc_feature: MA Experiment ID: 20000286 Result: Up-regulated in Transcription
  misc_feature: MA Experiment 20000286 PARAMETER Experiment Name: At_Open_Flower_P Parameter: Age (day) Value: 21
  misc_feature: MA Experiment 20000286 PARAMETER Experiment Name: At_Open_Flower_P Parameter: Plant Line Value: WS
  misc_feature: MA Experiment 20000286 PARAMETER Experiment Name: At_Open_Flower_P Parameter: Tissue Value: Half Open vs. Whole Plant
  misc_feature: MA Experiment ID: 20000437 Result: Down-regulated in Transcription
  misc_feature: MA Experiment 20000437 PARAMETER Experiment Name: At_Drought_P Parameter: Age (day) Value: 8
  misc_feature: MA Experiment 20000437 PARAMETER Experiment Name: At_Drought_P Parameter: Organism Value: A. thaliana
  misc_feature: MA Experiment 20000437 PARAMETER Experiment Name: At_Drought_P Parameter: Plant Line Value: WS
  misc_feature: MA Experiment 20000437 PARAMETER Experiment Name: At_Drought_P Parameter: Timepoint (hr) Value: 24
  misc_feature: MA Experiment 20000437 PARAMETER Experiment Name: At_Drought_P Parameter: Tissue Value: Whole Plant
  misc_feature: MA Experiment 20000437 PARAMETER Experiment Name: At_Drought_P Parameter: Treatment Value: Drought vs. No Drought
  misc_feature: MA Experiment ID: 20001451 Result: Down-regulated in Transcription
  misc_feature: MA Experiment 20001451 PARAMETER Experiment Name: At_Far-red-induction_P Parameter: Age (day) Value: 7
  misc_feature: MA Experiment 20001451 PARAMETER Experiment Name: At_Far-red-induction_P Parameter: Light Value: Far-red vs. White
  misc_feature: MA Experiment 20001451 PARAMETER Experiment Name: At_Far-red-induction_P Parameter: Organism Value: A. thaliana
  misc_feature: MA Experiment 20001451 PARAMETER Experiment Name: At_Far-red-induction_P Parameter: Plant Line Value: Columbia
  misc_feature: MA Experiment 20001451 PARAMETER Experiment Name: At_Far-red-induction_P Parameter: Timepoint (hr) Value: 24
  misc_feature: MA Experiment 20001451 PARAMETER Experiment Name: At_Far-red-induction_P Parameter: Tissue Value: Whole Plant
  misc_feature: MA Experiment ID: 20001905 Result: Down-regulated in Transcription
  misc_feature: MA Experiment 20001905 PARAMETER Experiment Name: At_Drought_Reproduction_P Parameter: Age (day) Value: 40
  misc_feature: MA Experiment 20001905 PARAMETER Experiment Name: At_Drought_Reproduction_P Parameter: Organism Value: A. thaliana
  misc_feature: MA Experiment 20001905 PARAMETER Experiment Name: At_Drought_Reproduction_P Parameter: Plant Line Value: WS
  misc_feature: MA Experiment 20001905 PARAMETER Experiment Name: At_Drought_Reproduction_P Parameter: Timepoint (day) Value: 10
  misc_feature: MA Experiment 20001905 PARAMETER Experiment Name: At_Drought_Reproduction_P Parameter: Tissue Value: Rosettes
  misc_feature: MA Experiment 20001905 PARAMETER Experiment Name: At_Drought_Reproduction_P Parameter: Treatment Value: Drought vs. No Drought
  misc_feature: MA Experiment ID: 20001911 Result: Down-regulated in Transcription
  misc_feature: MA Experiment 20001911 PARAMETER Experiment Name: At_Drought_Reproduction_P Parameter: Age (day) Value: 40
  misc_feature: MA Experiment 20001911 PARAMETER Experiment Name: At_Drought_Reproduction_P Parameter: Organism Value: A. thaliana
  misc_feature: MA Experiment 20001911 PARAMETER Experiment Name: At_Drought_Reproduction_P Parameter: Plant Line Value: WS
  misc_feature: MA Experiment 20001911 PARAMETER Experiment Name: At_Drought_Reproduction_P Parameter: Timepoint (day) Value: 10
  misc_feature: MA Experiment 20001911 PARAMETER Experiment Name: At_Drought_Reproduction_P Parameter: Tissue Value: Flowers
  misc_feature: MA Experiment 20001911 PARAMETER Experiment Name: At_Drought_Reproduction_P Parameter: Treatment Value: Drought vs. No Drought
aagaagaagaaatagaaaagttcggattttgatctgtgtggttggattgttgcaagaactaaaccagacccacctttcaaaactttgtccctaacgaacaacattaatcattcattctcctgtgtgagctcttcctcttcttctgtttaaggttctttctccttcttcttttgagggggtttaaagcttcagtggacgaaaagagtttgttttttgggtgacaatgggaggagtggtgcatcttagcacggcgaagttagctagaggtttcttagtgtgtttatgtctttggggttttttctcgctatcatacgccgcaaggtccggcgtatcaaagcagaagtttgaagtgaagaaacatttgaacaggctgaacaaacctgctgtcaaaagcattcagagttcagatggtgatgtgattgactgtgttccaatctcaaagcaaccagcttttgatcatccgttcctcaaagatcacaagattcagatgaagcctaattaccaccctgaaggactctttgatgacaacaaagtgtctgctcctaaatcaaatgagaaagaagggcatattcctcagttgtggcatcgatatggtaaatgttctgaaggaactattcccatgaggaggacaaaggaagatgatgttttgagagcaagttcagttaaaagatatggcaagaagaagcgtagaagtgtccctttacctaaatctgcagaacctgaccttattaaccaaagtggtcaccagcatgccatagcttatgtagaaggagataagtactatggagctaaggctactataaatgtgtgggagccaaagatacagcagcagaatgagttcagcttgtcacagatatggcttcttggtggctcattcggacaagatcttaatagcatcgaagctggttggcaggtgagcccggatctgtatggtgacaataacacgagactcttcacttactggactagtgatgcatatcaagctaccggttgctacaatcttctttgctccggttttattcaaatcaacagtgacatagcaatgggagcaagcatttccccggtctctggatatcgtaactcgcagtacgatatcagtattctgatctggaaggatcctaaagagggacactggtggatgcaatttgggaacggctatgttttaggctattggccatcttttctcttctcctacttgacagaaagtgcatcgatgattgaatggggaggagaagtcgtgaactcacaatcagatggccagcacacttcaacacaaatgggcagtggtaaatttccagaagaaggctttagcaaagcaagttacttcaggaacattcaggtggttgatgggtcaaacaacctcaaggcacctaaaggacttggaacattcactgaacagtctaactgttatgatgttcaaaccggaagcaatgatgattggggtcattacttttactatggaggccctggtaaaaaccagaagtgtccataagctaggctccaagtagtagtggctcgtctctcgagttatcttgtcttgtgaattcaccttgtttctttctacacacactcactcaaatccgccttcttgggtagtttttagggatggttaaagttatgtaatggtaaaagtttggtgtctttttctccatgtaagtaggtggggaagaagtggaaaggtgtggcttaagtttctttgaaaactcagaaactttggcccttagtgtaattttactttgtctcctttgtattgtgatttgtttaaacaagtgaatgaatctctctttctc

SEQ ID NO: 49264 - protein, 422 aa, Arabidopsis thaliana
  peptide (1)..(422): Ceres Seq. ID no. 13592251
  misc_feature (186)..(380): Pfam Name: Arabidopsis proteins of unknown function Pfam Description: Arabidopsis proteins of unknown function
  misc_feature (186)..(380): Pfam Name: Arabidopsis proteins of unknown function Pfam Description: Arabidopsis proteins of unknown function
  misc_feature (43)..(421): Homolog of NCBI NO: 15238835 NR Description: expressed protein [Arabidopsis thaliana]
  misc_feature (31)..(422): Homolog of NCBI NO: 18406483 NR Description: expressed protein [Arabidopsis thaliana]
  misc_feature (31)..(422): Homolog of NCBI NO: 30103019 NR Description: unknown protein [Oryza sativa (japonica
  misc_feature (31)..(422): Homolog of NCBI NO: 34393299 NR Description: putative DD1A protein [Oryza sativa (japonica
  misc_feature (10)..(422): Homolog of NCBI NO: 34393554 NR Description: putative carboxyl-terminal proteinase
  misc_feature (43)..(421): Homolog of NCBI NO: 15238835 NR Description: expressed protein [Arabidopsis thaliana]
  misc_feature (31)..(422): Homolog of NCBI NO: 30103019 NR Description: unknown protein [Oryza sativa (japonica
  misc_feature (10)..(422): Homolog of NCBI NO: 34393554 NR Description: putative carboxyl-terminal proteinase
  misc_feature (1)..(422): Homolog of NCBI NO: 15222707 NR Description: expressed protein [Arabidopsis thaliana]
  misc_feature (1)..(422): Homolog of NCBI NO: 27311623 NR Description: unknown protein [Arabidopsis thaliana]
  misc_feature (3)..(422): Homolog of NCBI NO: 21593294 NR Description: putative carboxyl-terminal peptidase [Arabidopsis
  misc_feature (3)..(422): Homolog of NCBI NO: 18400044 NR Description: expressed protein [Arabidopsis thaliana]
  misc_feature (6)..(421): Homolog of NCBI NO: 15241244 NR Description: expressed protein [Arabidopsis thaliana]
  misc_feature (31)..(422): Homolog of NCBI NO: 34393299 NR Description: putative DD1A protein [Oryza sativa (japonica
  misc_feature (31)..(422): Homolog of NCBI NO: 18406483 NR Description: expressed protein [Arabidopsis thaliana]
  misc_feature (6)..(421): Homolog of NCBI NO: 15241244 NR Description: expressed protein [Arabidopsis thaliana]
  misc_feature (3)..(422): Homolog of NCBI NO: 18400044 NR Description: expressed protein [Arabidopsis thaliana]
  misc_feature (3)..(422): Homolog of NCBI NO: 21593294 NR Description: putative carboxyl-terminal peptidase [Arabidopsis
  misc_feature (1)..(422): Homolog of NCBI NO: 27311623 NR Description: unknown protein [Arabidopsis thaliana]
  misc_feature (1)..(422): Homolog of NCBI NO: 15222707 NR Description: expressed protein [Arabidopsis thaliana]
MGGVVHLSTAKLARGFLVCLCLWGFFSLSYAARSGVSKQKFEVKKHLNRLNKPAVKSIQSSDGDVIDCVPISKQPAFDHPFLKDHKIQMKPNYHPEGLFDDNKVSAPKSNEKEGHIPQLWHRYGKCSEGTIPMRRTKEDDVLRASSVKRYGKKKRRSVPLPKSAEPDLINQSGHQHAIAYVEGDKYYGAKATINVWEPKIQQQNEFSLSQIWLLGGSFGQDLNSIEAGWQVSPDLYGDNNTRLFTYWTSDAYQATGCYNLLCSGFIQINSDIAMGASISPVSGYRNSQYDISILIWKDPKEGHWWMQFGNGYVLGYWPSFLFSYLTESASMIEWGGEVVNSQSDGQHTSTQMGSGKFPEEGFSKASYFRNIQVVDGSNNLKAPKGLGTFTEQSNCYDVQTGSNDDWGHYFYYGGPGKNQKCP

SEQ ID NO: 49265 - protein, 334 aa, Arabidopsis thaliana
  peptide (1)..(334): Ceres Seq. ID no. 13592252
  misc_feature (98)..(292): Pfam Name: Arabidopsis proteins of unknown function Pfam Description: Arabidopsis proteins of unknown function
  misc_feature (98)..(292): Pfam Name: Arabidopsis proteins of unknown function Pfam Description: Arabidopsis proteins of unknown function
  misc_feature (1)..(333): Homolog of NCBI NO: 15238835 NR Description: expressed protein [Arabidopsis thaliana]
  misc_feature (1)..(334): Homolog of NCBI NO: 18406483 NR Description: expressed protein [Arabidopsis thaliana]
  misc_feature (1)..(334): Homolog of NCBI NO: 30103019 NR Description: unknown protein [Oryza sativa (japonica
  misc_feature (1)..(334): Homolog of NCBI NO: 34393299 NR Description: putative DD1A protein [Oryza sativa (japonica
  misc_feature (1)..(334): Homolog of NCBI NO: 34393554 NR Description: putative carboxyl-terminal proteinase
  misc_feature (1)..(333): Homolog of NCBI NO: 15238835 NR Description: expressed protein [Arabidopsis thaliana]
  misc_feature (1)..(334): Homolog of NCBI NO: 30103019 NR Description: unknown protein [Oryza sativa (japonica
  misc_feature (1)..(334): Homolog of NCBI NO: 34393554 NR Description: putative carboxyl-terminal proteinase
  misc_feature (1)..(334): Homolog of NCBI NO: 15222707 NR Description: expressed protein [Arabidopsis thaliana]
  misc_feature (1)..(334): Homolog of NCBI NO: 27311623 NR Description: unknown protein [Arabidopsis thaliana]
  misc_feature (1)..(334): Homolog of NCBI NO: 21593294 NR Description: putative carboxyl-terminal peptidase [Arabidopsis
  misc_feature (1)..(334): Homolog of NCBI NO: 18400044 NR Description: expressed protein [Arabidopsis thaliana]
  misc_feature (1)..(333): Homolog of NCBI NO: 15241244 NR Description: expressed protein [Arabidopsis thaliana]
  misc_feature (1)..(334): Homolog of NCBI NO: 34393299 NR Description: putative DD1A protein [Oryza sativa (japonica
  misc_feature (1)..(334): Homolog of NCBI NO: 18406483 NR Description: expressed protein [Arabidopsis thaliana]
  misc_feature (1)..(333): Homolog of NCBI NO: 15241244 NR Description: expressed protein [Arabidopsis thaliana]
  misc_feature (1)..(334): Homolog of NCBI NO: 18400044 NR Description: expressed protein [Arabidopsis thaliana]
  misc_feature (1)..(334): Homolog of NCBI NO: 21593294 NR Description: putative carboxyl-terminal peptidase [Arabidopsis
  misc_feature (1)..(334): Homolog of NCBI NO: 27311623 NR Description: unknown protein [Arabidopsis thaliana]
  misc_feature (1)..(334): Homolog of NCBI NO: 15222707 NR Description: expressed protein [Arabidopsis thaliana]
MKPNYHPEGLFDDNKVSAPKSNEKEGHIPQLWHRYGKCSEGTIPMRRTKEDDVLRASSVKRYGKKKRRSVPLPKSAEPDLINQSGHQHAIAYVEGDKYYGAKATINVWEPKIQQQNEFSLSQIWLLGGSFGQDLNSIEAGWQVSPDLYGDNNTRLFTYWTSDAYQATGCYNLLCSGFIQINSDIAMGASISPVSGYRNSQYDISILIWKDPKEGHWWMQFGNGYVLGYWPSFLFSYLTESASMIEWGGEVVNSQSDGQHTSTQMGSGKFPEEGFSKASYFRNIQVVDGSNNLKAPKGLGTFTEQSNCYDVQTGSNDDWGHYFYYGGPGKNQKCP

SEQ ID NO: 49266 - protein, 290 aa, Arabidopsis thaliana
  peptide (1)..(290): Ceres Seq. ID no. 13592253
  misc_feature (54)..(248): Pfam Name: Arabidopsis proteins of unknown function Pfam Description: Arabidopsis proteins of unknown function
  misc_feature (54)..(248): Pfam Name: Arabidopsis proteins of unknown function Pfam Description: Arabidopsis proteins of unknown function
  misc_feature (1)..(289): Homolog of NCBI NO: 15238835 NR Description: expressed protein [Arabidopsis thaliana]
  misc_feature (1)..(290): Homolog of NCBI NO: 18406483 NR Description: expressed protein [Arabidopsis thaliana]
  misc_feature (1)..(290): Homolog of NCBI NO: 30103019 NR Description: unknown protein [Oryza sativa (japonica
  misc_feature (1)..(290): Homolog of NCBI NO: 34393299 NR Description: putative DD1A protein [Oryza sativa (japonica
  misc_feature (1)..(290): Homolog of NCBI NO: 34393554 NR Description: putative carboxyl-terminal proteinase
  misc_feature (1)..(289): Homolog of NCBI NO: 15238835 NR Description: expressed protein [Arabidopsis thaliana]
  misc_feature (1)..(290): Homolog of NCBI NO: 30103019 NR Description: unknown protein [Oryza sativa (japonica
  misc_feature (1)..(290): Homolog of NCBI NO: 34393554 NR Description: putative carboxyl-terminal proteinase
  misc_feature (1)..(290): Homolog of NCBI NO: 15222707 NR Description: expressed protein [Arabidopsis thaliana]
  misc_feature (1)..(290): Homolog of NCBI NO: 27311623 NR Description: unknown protein [Arabidopsis thaliana]
  misc_feature (1)..(290): Homolog of NCBI NO: 21593294 NR Description: putative carboxyl-terminal peptidase [Arabidopsis
  misc_feature (1)..(290): Homolog of NCBI NO: 18400044 NR Description: expressed protein [Arabidopsis thaliana]
  misc_feature (1)..(289): Homolog of NCBI NO: 15241244 NR Description: expressed protein [Arabidopsis thaliana]
  misc_feature (1)..(290): Homolog of NCBI NO: 34393299 NR Description: putative DD1A protein [Oryza sativa (japonica
  misc_feature (1)..(290): Homolog of NCBI NO: 18406483 NR Description: expressed protein [Arabidopsis thaliana]
  misc_feature (1)..(289): Homolog of NCBI NO: 15241244 NR Description: expressed protein [Arabidopsis thaliana]
  misc_feature (1)..(290): Homolog of NCBI NO: 18400044 NR Description: expressed protein [Arabidopsis thaliana]
  misc_feature (1)..(290): Homolog of NCBI NO: 21593294 NR Description: putative carboxyl-terminal peptidase [Arabidopsis
  misc_feature (1)..(290): Homolog of NCBI NO: 27311623 NR Description: unknown protein [Arabidopsis thaliana]
  misc_feature (1)..(290): Homolog of NCBI NO: 15222707 NR Description: expressed protein [Arabidopsis thaliana]
MRRTKEDDVLRASSVKRYGKKKRRSVPLPKSAEPDLINQSGHQHAIAYVEGDKYYGAKATINVWEPKIQQQNEFSLSQIWLLGGSFGQDLNSIEAGWQVSPDLYGDNNTRLFTYWTSDAYQATGCYNLLCSGFIQINSDIAMGASISPVSGYRNSQYDISILIWKDPKEGHWWMQFGNGYVLGYWPSFLFSYLTESASMIEWGGEVVNSQSDGQHTSTQMGSGKFPEEGFSKASYFRNIQVVDGSNNLKAPKGLGTFTEQSNCYDVQTGSNDDWGHYFYYGGPGKNQKCP

SEQ ID NO: 49267 - DNA, 1382 bp, Arabidopsis thaliana; identical to SEQ ID NO: 22475
  misc_feature (1)..(1382): Ceres Seq. ID no. 13592682
  misc_feature: MA Experiment ID: 108461 Result: Up-regulated in Transcription
  misc_feature: MA Experiment 108461 PARAMETER Experiment Name: At_Germinating_Seeds_cDNA_P Parameter: Age (day) Value: 1 vs. 0
  misc_feature: MA Experiment 108461 PARAMETER Experiment Name: At_Germinating_Seeds_cDNA_P Parameter: Tissue Value: Germinating Seeds
  misc_feature: MA Experiment ID: 108569 Result: Up-regulated in Transcription
  misc_feature: MA Experiment 108569 PARAMETER Experiment Name: At_0.001%_MeJA__cDNA_P Parameter: Timepoint (hr) Value: 6
  misc_feature: MA Experiment 108569 PARAMETER Experiment Name: At_0.001%_MeJA__cDNA_P Parameter: Tissue Value: Aerial
  misc_feature: MA Experiment 108569 PARAMETER Experiment Name: At_0.001%_MeJA__cDNA_P Parameter: Treatment Value: 0.001% MeJA vs. No Treatment
  misc_feature: MA Experiment ID: 108585 Result: Up-regulated in Transcription
  misc_feature: MA Experiment 108585 PARAMETER Experiment Name: At_5mM_NaNP_cDNA_P Parameter: Timepoint (hr) Value: 6
  misc_feature: MA Experiment 108585 PARAMETER Experiment Name: At_5mM_NaNP_cDNA_P Parameter: Tissue Value: Aerial
  misc_feature: MA Experiment 108585 PARAMETER Experiment Name: At_5mM_NaNP_cDNA_P Parameter: Treatment Value: null
  misc_feature: MA Experiment ID: 20000180 Result: Up-regulated in Transcription
  misc_feature: MA Experiment 20000180 PARAMETER Experiment Name: At_Germinating_Seeds_P Parameter: Age (hr) Value: 24 vs. 0
  misc_feature: MA Experiment 20000180 PARAMETER Experiment Name: At_Germinating_Seeds_P Parameter: Tissue Value: Germinating Seeds
  misc_feature: MA Experiment ID: 20000184 Result: Up-regulated in Transcription
  misc_feature: MA Experiment 20000184 PARAMETER Experiment Name: At_Shoots__P Parameter: Age (day) Value: 7
  misc_feature: MA Experiment 20000184 PARAMETER Experiment Name: At_Shoots__P Parameter: Tissue Value: Shoots vs. Whole Plant
  misc_feature: MA Experiment ID: 20000185 Result: Up-regulated in Transcription
  misc_feature: MA Experiment 20000185 PARAMETER Experiment Name: At_Roots__P Parameter: Age (day) Value: 7 vs. 21
  misc_feature: MA Experiment 20000185 PARAMETER Experiment Name: At_Roots__P Parameter: Organism Value: A. thaliana
  misc_feature: MA Experiment 20000185 PARAMETER Experiment Name: At_Roots__P Parameter: Tissue Value: Roots vs. Whole Plant
  misc_feature: MA Experiment ID: 20000234 Result: Up-regulated in Transcription
  misc_feature: MA Experiment 20000234 PARAMETER Experiment Name: At_Siliques_P Parameter: Age (day) Value: 21
  misc_feature: MA Experiment 20000234 PARAMETER Experiment Name: At_Siliques_P Parameter: Organism Value: A. thaliana
  misc_feature: MA Experiment 20000234 PARAMETER Experiment Name: At_Siliques_P Parameter: Plant Line Value: WS
  misc_feature: MA Experiment 20000234 PARAMETER Experiment Name: At_Siliques_P Parameter: Tissue Value: Less Than 5mm Siliques vs. Whole Plant
  misc_feature: MA Experiment ID: 20000235 Result: Up-regulated in Transcription
  misc_feature: MA Experiment 20000235 PARAMETER Experiment Name: At_Siliques_P Parameter: Age (day) Value: 21
  misc_feature: MA Experiment 20000235 PARAMETER Experiment Name: At_Siliques_P Parameter: Organism Value: A. thaliana
  misc_feature: MA Experiment 20000235 PARAMETER Experiment Name: At_Siliques_P Parameter: Plant Line Value: WS
  misc_feature: MA Experiment 20000235 PARAMETER Experiment Name: At_Siliques_P Parameter: Tissue Value: 5-10mm Siliques vs. Whole Plant
  misc_feature: MA Experiment ID: 20000264 Result: Up-regulated in Transcription
  misc_feature: MA Experiment 20000264 PARAMETER Experiment Name: At_Open_Flower_P Parameter: Age (day) Value: 21
  misc_feature: MA Experiment 20000264 PARAMETER Experiment Name: At_Open_Flower_P Parameter: Plant Line Value: WS
  misc_feature: MA Experiment 20000264 PARAMETER Experiment Name: At_Open_Flower_P Parameter: Tissue Value: Open Flower vs. Whole Plant
  misc_feature: MA Experiment ID: 20000265 Result: Up-regulated in Transcription
  misc_feature: MA Experiment 20000265 PARAMETER Experiment Name: At_Open_Flower_P Parameter: Age (day) Value: 21
  misc_feature: MA Experiment 20000265 PARAMETER Experiment Name: At_Open_Flower_P Parameter: Plant Line Value: WS
  misc_feature: MA Experiment 20000265 PARAMETER Experiment Name: At_Open_Flower_P Parameter: Tissue Value: Closed Flower vs. Whole Plant
  misc_feature: MA Experiment ID: 20000286 Result: Up-regulated in Transcription
  misc_feature: MA Experiment 20000286 PARAMETER Experiment Name: At_Open_Flower_P Parameter: Age (day) Value: 21
  misc_feature: MA Experiment 20000286 PARAMETER Experiment Name: At_Open_Flower_P Parameter: Plant Line Value: WS
  misc_feature: MA Experiment 20000286 PARAMETER Experiment Name: At_Open_Flower_P Parameter: Tissue Value: Half Open vs. Whole Plant
  misc_feature: MA Experiment ID: 20000439 Result: Up-regulated in Transcription
  misc_feature: MA Experiment 20000439 PARAMETER Experiment Name: At_Roots__P Parameter: Age (day) Value: 14 vs. 21
  misc_feature: MA Experiment 20000439 PARAMETER Experiment Name: At_Roots__P Parameter: Organism Value: A. thaliana
  misc_feature: MA Experiment 20000439 PARAMETER Experiment Name: At_Roots__P Parameter: Tissue Value: Roots vs. Whole Plant
  misc_feature: MA Experiment ID: 20001451 Result: Down-regulated in Transcription
  misc_feature: MA Experiment 20001451 PARAMETER Experiment Name: At_Far-red-induction_P Parameter: Age (day) Value: 7
  misc_feature: MA Experiment 20001451 PARAMETER Experiment Name: At_Far-red-induction_P Parameter: Light Value: Far-red vs. White
  misc_feature: MA Experiment 20001451 PARAMETER Experiment Name: At_Far-red-induction_P Parameter: Organism Value: A. thaliana
  misc_feature: MA Experiment 20001451 PARAMETER Experiment Name: At_Far-red-induction_P Parameter: Plant Line Value: Columbia
  misc_feature: MA Experiment 20001451 PARAMETER Experiment Name: At_Far-red-induction_P Parameter: Timepoint (hr) Value: 24
  misc_feature: MA Experiment 20001451 PARAMETER Experiment Name: At_Far-red-induction_P Parameter: Tissue Value: Whole Plant
  misc_feature: MA Experiment ID: 20001557 Result: Up-regulated in Transcription
  misc_feature: MA Experiment 20001557 PARAMETER Experiment Name: At_Drought_Soil_Dry_P Parameter: Age (day) Value: 27
  misc_feature: MA Experiment 20001557 PARAMETER Experiment Name: At_Drought_Soil_Dry_P Parameter: Organism Value: A. thaliana
  misc_feature: MA Experiment 20001557 PARAMETER Experiment Name: At_Drought_Soil_Dry_P Parameter: Plant Line Value: WS
  misc_feature: MA Experiment 20001557 PARAMETER Experiment Name: At_Drought_Soil_Dry_P Parameter: Post Timepoint (hr) Value: 3
  misc_feature: MA Experiment 20001557 PARAMETER Experiment Name: At_Drought_Soil_Dry_P Parameter: Post-Treatment Value: Re-Water vs. No Drought
  misc_feature: MA Experiment 20001557 PARAMETER Experiment Name: At_Drought_Soil_Dry_P Parameter: Timepoint (day) Value: 13
  misc_feature: MA Experiment 20001557 PARAMETER Experiment Name: At_Drought_Soil_Dry_P Parameter: Treatment Value: Drought vs. No Drought
  misc_feature: MA Experiment ID: 20001558 Result: Up-regulated in Transcription
  misc_feature: MA Experiment 20001558 PARAMETER Experiment Name: At_Drought_Soil_Dry_P Parameter: Age (day) Value: 27
  misc_feature: MA Experiment 20001558 PARAMETER Experiment Name: At_Drought_Soil_Dry_P Parameter: Organism Value: A. thaliana
  misc_feature: MA Experiment 20001558 PARAMETER Experiment Name: At_Drought_Soil_Dry_P Parameter: Plant Line Value: WS
  misc_feature: MA Experiment 20001558 PARAMETER Experiment Name: At_Drought_Soil_Dry_P Parameter: Post Timepoint (hr) Value: 6
  misc_feature: MA Experiment 20001558 PARAMETER Experiment Name: At_Drought_Soil_Dry_P Parameter: Post-Treatment Value: Re-Water vs. No Drought
  misc_feature: MA Experiment 20001558 PARAMETER Experiment Name: At_Drought_Soil_Dry_P Parameter: Timepoint (day) Value: 13
  misc_feature: MA Experiment 20001558 PARAMETER Experiment Name: At_Drought_Soil_Dry_P Parameter: Treatment Value: Drought vs. No Drought
  misc_feature: MA Experiment ID: 20001560 Result: Up-regulated in Transcription
  misc_feature: MA Experiment 20001560 PARAMETER Experiment Name: At_Drought_Soil_Dry_P Parameter: Age (day) Value: 28
  misc_feature: MA Experiment 20001560 PARAMETER Experiment Name: At_Drought_Soil_Dry_P Parameter: Organism Value: A. thaliana
  misc_feature: MA Experiment 20001560 PARAMETER Experiment Name: At_Drought_Soil_Dry_P Parameter: Plant Line Value: WS
  misc_feature: MA Experiment 20001560 PARAMETER Experiment Name: At_Drought_Soil_Dry_P Parameter: Post Timepoint (hr) Value: None
  misc_feature: MA Experiment 20001560 PARAMETER Experiment Name: At_Drought_Soil_Dry_P Parameter: Post-Treatment Value: None
  misc_feature: MA Experiment 20001560 PARAMETER Experiment Name: At_Drought_Soil_Dry_P Parameter: Timepoint (day) Value: 14
  misc_feature: MA Experiment 20001560 PARAMETER Experiment Name: At_Drought_Soil_Dry_P Parameter: Treatment Value: Drought vs. No Drought
  misc_feature: MA Experiment ID: 20001905 Result: Up-regulated in Transcription
  misc_feature: MA Experiment 20001905 PARAMETER Experiment Name: At_Drought_Reproduction_P Parameter: Age (day) Value: 40
  misc_feature: MA Experiment 20001905 PARAMETER Experiment Name: At_Drought_Reproduction_P Parameter: Organism Value: A. thaliana
  misc_feature: MA Experiment 20001905 PARAMETER Experiment Name: At_Drought_Reproduction_P Parameter: Plant Line Value: WS
  misc_feature: MA Experiment 20001905 PARAMETER Experiment Name: At_Drought_Reproduction_P Parameter: Timepoint (day) Value: 10
  misc_feature: MA Experiment 20001905 PARAMETER Experiment Name: At_Drought_Reproduction_P Parameter: Tissue Value: Rosettes
  misc_feature: MA Experiment 20001905 PARAMETER Experiment Name: At_Drought_Reproduction_P Parameter: Treatment Value: Drought vs. No Drought

SEQ ID NO: 49268 - protein, 357 aa, Arabidopsis thaliana; identical to SEQ ID NO: 22476
  peptide (1)..(357): Ceres Seq. ID no. 13592683
  misc_feature (13)..(356): Pfam Name: Reversibly glycosylated polypeptide Pfam Description: Reversibly glycosylated polypeptide
  misc_feature (13)..(356): Pfam Name: Reversibly glycosylated polypeptide Pfam Description: Reversibly glycosylated polypeptide
  misc_feature (5)..(357): Homolog of NCBI NO: 34588146 NR Description: Alpha-1,4-glucan-protein synthase
  misc_feature (5)..(357): Homolog of NCBI NO: 4158232 NR Description: reversibly glycosylated polypeptide [Triticum
  misc_feature (5)..(357): Homolog of NCBI NO: 34915190 NR Description: reversibly glycosylated polypeptide
  misc_feature (5)..(357): Homolog of NCBI NO: 4158221 NR Description: reversibly glycosylated polypeptide
  misc_feature (9)..(357): Homolog of NCBI NO: 34582499 NR Description: Alpha-1,4-glucan-protein synthase
  misc_feature (5)..(357): Homolog of NCBI NO: 34588146 NR Description: Alpha-1,4-glucan-protein synthase
  misc_feature (5)..(357): Homolog of NCBI NO: 34915190 NR Description: reversibly glycosylated polypeptide
  misc_feature (1)..(357): Homolog of NCBI NO: 2317729 NR Description: reversibly glycosylated polypeptide-1
  misc_feature (1)..(354): Homolog of NCBI NO: 15242351 NR Description: reversibly glycosylated polypeptide-3
  misc_feature (1)..(354): Homolog of NCBI NO: 2317731 NR Description: reversibly glycosylated polypeptide-2
  misc_feature (1)..(354): Homolog of NCBI NO: 21593071 NR Description: reversibly glycosylated polypeptide-3
  misc_feature (9)..(357): Homolog of NCBI NO: 34582499 NR Description: Alpha-1,4-glucan-protein synthase
  misc_feature (5)..(357): Homolog of NCBI NO: 4158221 NR Description: reversibly glycosylated polypeptide
  misc_feature (5)..(357): Homolog of NCBI NO: 4158232 NR Description: reversibly glycosylated polypeptide [Triticum
  misc_feature (1)..(357): Homolog of NCBI NO: 15232865 NR Description: reversibly glycosylated polypeptide-1
  misc_feature (1)..(354): Homolog of NCBI NO: 21593071 NR Description: reversibly glycosylated polypeptide-3
  misc_feature (1)..(354): Homolog of NCBI NO: 2317731 NR Description: reversibly glycosylated polypeptide-2
  misc_feature (1)..(354): Homolog of NCBI NO: 15242351 NR Description: reversibly glycosylated polypeptide-3
  misc_feature (1)..(357): Homolog of NCBI NO: 2317729 NR Description: reversibly glycosylated polypeptide-1
  misc_feature (1)..(357): Homolog of NCBI NO: 15232865 NR Description: reversibly glycosylated polypeptide-1

SEQ ID NO: 49269 - protein, 321 aa, Arabidopsis thaliana; identical to SEQ ID NO: 22477
  peptide (1)..(321): Ceres Seq. ID no. 13592684
  misc_feature (1)..(320): Pfam Name: Reversibly glycosylated polypeptide Pfam Description: Reversibly glycosylated polypeptide
  misc_feature (1)..(320): Pfam Name: Reversibly glycosylated polypeptide Pfam Description: Reversibly glycosylated polypeptide
  misc_feature (1)..(321): Homolog of NCBI NO: 34588146 NR Description: Alpha-1,4-glucan-protein synthase
  misc_feature (1)..(321): Homolog of NCBI NO: 4158232 NR Description: reversibly glycosylated polypeptide [Triticum
  misc_feature (1)..(321): Homolog of NCBI NO: 34915190 NR Description: reversibly glycosylated polypeptide
  misc_feature (1)..(321): Homolog of NCBI NO: 4158221 NR Description: reversibly glycosylated polypeptide
  misc_feature (1)..(321): Homolog of NCBI NO: 34582499 NR Description: Alpha-1,4-glucan-protein synthase
  misc_feature (1)..(321): Homolog of NCBI NO: 34588146 NR Description: Alpha-1,4-glucan-protein synthase
  misc_feature (1)..(321): Homolog of NCBI NO: 34915190 NR Description: reversibly glycosylated polypeptide
  misc_feature (1)..(321): Homolog of NCBI NO: 34582499 NR Description: Alpha-1,4-glucan-protein synthase
  misc_feature (1)..(321): Homolog of NCBI NO: 15232865 NR Description: reversibly glycosylated polypeptide-1
  misc_feature (1)..(321): Homolog of NCBI NO: 2317729 NR Description: reversibly glycosylated polypeptide-1
  misc_feature (1)..(318): Homolog of NCBI NO: 15242351 NR Description: reversibly glycosylated polypeptide-3
  misc_feature (1)..(318): Homolog of NCBI NO: 2317731 NR Description: reversibly glycosylated polypeptide-2
  misc_feature (1)..(318): Homolog of NCBI NO: 21593071 NR Description: reversibly glycosylated polypeptide-3
  misc_feature (1)..(321): Homolog of NCBI NO: 4158221 NR Description: reversibly glycosylated polypeptide
  misc_feature (1)..(321): Homolog of NCBI NO: 4158232 NR Description: reversibly glycosylated polypeptide [Triticum
  misc_feature (1)..(318): Homolog of NCBI NO: 21593071 NR Description: reversibly glycosylated polypeptide-3
  misc_feature (1)..(318): Homolog of NCBI NO: 2317731 NR Description: reversibly glycosylated polypeptide-2
  misc_feature (1)..(318): Homolog of NCBI NO: 15242351 NR Description: reversibly glycosylated polypeptide-3
  misc_feature (1)..(321): Homolog of NCBI NO: 2317729 NR Description: reversibly glycosylated polypeptide-1
  misc_feature (1)..(321): Homolog of NCBI NO: 15232865 NR Description: reversibly glycosylated polypeptide-1

SEQ ID NO: 49270 - protein, 259 aa, Arabidopsis thaliana; identical to SEQ ID NO: 22478
  peptide (1)..(259): Ceres Seq. ID no. 13592685
  misc_feature (1)..(258): Pfam Name: Reversibly glycosylated polypeptide Pfam Description: Reversibly glycosylated polypeptide
  misc_feature (1)..(258): Pfam Name: Reversibly glycosylated polypeptide Pfam Description: Reversibly glycosylated polypeptide
  misc_feature (1)..(259): Homolog of NCBI NO: 34588146 NR Description: Alpha-1,4-glucan-protein synthase
  misc_feature (1)..(259): Homolog of NCBI NO: 4158232 NR Description: reversibly glycosylated polypeptide [Triticum
  misc_feature (1)..(259): Homolog of NCBI NO: 34915190 NR Description: reversibly glycosylated polypeptide
  misc_feature (1)..(259): Homolog of NCBI NO: 4158221 NR Description: reversibly glycosylated polypeptide
  misc_feature (1)..(259): Homolog of NCBI NO: 34582499 NR Description: Alpha-1,4-glucan-protein synthase
  misc_feature (1)..(259): Homolog of NCBI NO: 34588146 NR Description: Alpha-1,4-glucan-protein synthase
  misc_feature (1)..(259): Homolog of NCBI NO: 34915190 NR Description: reversibly glycosylated polypeptide
  misc_feature (1)..(259): Homolog of NCBI NO: 34582499 NR Description: Alpha-1,4-glucan-protein synthase
  misc_feature (1)..(259): Homolog of NCBI NO: 15232865 NR Description: reversibly glycosylated polypeptide-1
  misc_feature (1)..(259): Homolog of NCBI NO: 2317729 NR Description: reversibly glycosylated polypeptide-1
  misc_feature (1)..(256): Homolog of NCBI NO: 15242351 NR Description: reversibly glycosylated polypeptide-3
  misc_feature (1)..(256): Homolog of NCBI NO: 2317731 NR Description: reversibly glycosylated polypeptide-2
  misc_feature (1)..(256): Homolog of NCBI NO: 21593071 NR Description: reversibly glycosylated polypeptide-3
  misc_feature (1)..(259): Homolog of NCBI NO: 4158221 NR Description: reversibly glycosylated polypeptide
  misc_feature (1)..(259): Homolog of NCBI NO: 4158232 NR Description: reversibly glycosylated polypeptide [Triticum
  misc_feature (1)..(256): Homolog of NCBI NO: 21593071 NR Description: reversibly glycosylated polypeptide-3
  misc_feature (1)..(256): Homolog of NCBI NO: 2317731 NR Description: reversibly glycosylated polypeptide-2
  misc_feature (1)..(256): Homolog of NCBI NO: 15242351 NR Description: reversibly glycosylated polypeptide-3
  misc_feature (1)..(259): Homolog of NCBI NO: 2317729 NR Description: reversibly glycosylated polypeptide-1
  misc_feature (1)..(259): Homolog of NCBI NO: 15232865 NR Description: reversibly glycosylated polypeptide-1

SEQ ID NO: 49271 - DNA, 1268 bp, Arabidopsis thaliana
  misc_feature (1)..(1268): Ceres Seq. ID no. 13588538
  misc_feature: MA Experiment ID: 20000440 Result: Up-regulated in Transcription
  misc_feature: MA Experiment 20000440 PARAMETER Experiment Name: At_Closed-Flower__Sub_P Parameter: Tissue Value: Closed Flower vs. Whole Plant
gtcagaaaaccaaaaaataaataaataaaaaaatagaataataaaaataaaaataataataaatgggttcatatttaggaatttctgcagttcttttcgtaatatctttgctgggattttcagccaatgctgaggtgttcaacgttggtggttctccaggttctgatattactcaggcacttctgaaagcattcacatcagcatgccaagctccgacagcgagcaaggtggtgatcacaaagggtgagttcaagcttggtgagatcgagatgacgggcccatgcaaagctccagtcgagatcaacctccaaggtactctcaaagctgatggaaaagctatccaggggaaggaaagatgggtcgtcttcctaagaattaatggctttaagttaaacggaggtggaatcttcgacggtgaaggcaatgcagcttggagagtcaataactgtcacaagactttcgagtgcaagaaacttcccatcagtataaggtttgatttcgtggagaatgctgagattagagacatatcctcgatagatgctaagaacttccacataaacgttctcggcgccaagaacatgacctttgataacgtcaaggtcatcgctccggcagagagccccaacactgacggtatccatttgggaagaagtgaaggagtcaagatcctcaactctaagatagccaccggagatgactgcatctctgttggggatgggatgaagaacctccacgtcgagaacgttatgtgcggtcctggacacggaatcagtgtcgggagtcttggaaggtacgtgcatgagcaagatgtcacaggcattactgtcgtgaactgcacccttcagggaactgacaatgggctaaggatcaagacatggccatctgcggcttgcgccaccaccgcctctggtattcattttgagaacatcatccttaacaacgttagcaacccaatcctcattgaccaggagtactgcccttggaaccagtgcaacaagcagaaaccatcgacgattaagctggtggacataagcttcaagaatattagaggaacatcagggaacaaggacgcagtgaagctattgtgcagcaaggcgcatccatgtgcgaatgttgagattggaaacattaaccttgagtacaagggagccgatggtccaccgactttcatgtgctcaaacgtttcccctaagcttgtgggaactcagaacccgaaggcttgtagcgccggacccactcccaagacagctgctaagggagacttgtag

SEQ ID NO: 49272 - protein, 401 aa, Arabidopsis thaliana
  peptide (1)..(401): Ceres Seq. ID no. 13588539
  misc_feature (48)..(387): Pfam Name: Glycosyl hydrolases family 28 Pfam Description: Glycosyl hydrolases family 28
  misc_feature (1)..(395): Homolog of NCBI NO: 3024385 NR Description: POLYGALACTURONASE PRECURSOR (PG) (PECTINASE)
  misc_feature (1)..(387): Homolog of NCBI NO: 6714526 NR Description: polygalacturonase [Salix gilgiana]
  misc_feature (1)..(394): Homolog of NCBI NO: 15238902 NR Description: polygalacturonase, putative [Arabidopsis
  misc_feature (1)..(391): Homolog of NCBI NO: 15231876 NR Description: polygalacturonase, putative [Arabidopsis
  misc_feature (1)..(398): Homolog of NCBI NO: 548490 NR Description: Polygalacturonase precursor (PG) (Pectinase)
  misc_feature (1)..(389): Homolog of NCBI NO: 11263969 NR Description: polygalacturonase (EC 3.2.1.15) [imported] -
  misc_feature (1)..(389): Homolog of NCBI NO: 15231874 NR Description: polygalacturonase, putative [Arabidopsis
  misc_feature (1)..(394): Homolog of NCBI NO: 30984029 NR Description: polygalacturonase [Brassica napus]
  misc_feature (1)..(394): Homolog of NCBI NO: 21668071 NR Description: putative pollen polygalacturonase [Brassica
  misc_feature (1)..(401): Homolog of NCBI NO: 15231878 NR Description: exopolygalacturonase [Arabidopsis thaliana]
MGSYLGISAVLFVISLLGFSANAEVFNVGGSPGSDITQALLKAFTSACQAPTASKVVITKGEFKLGEIEMTGPCKAPVEINLQGTLKADGKAIQGKERWVVFLRINGFKLNGGGIFDGEGNAAWRVNNCHKTFECKKLPISIRFDFVENAEIRDISSIDAKNFHINVLGAKNMTFDNVKVIAPAESPNTDGIHLGRSEGVKILNSKIATGDDCISVGDGMKNLHVENVMCGPGHGISVGSLGRYVHEQDVTGITVVNCTLQGTDNGLRIKTWPSAACATTASGIHFENIILNNVSNPILIDQEYCPWNQCNKQKPSTIKLVDISFKNIRGTSGNKDAVKLLCSKAHPCANVEIGNINLEYKGADGPPTFMCSNVSPKLVGTQNPKACSAGPTPKTAAKGDL

SEQ ID NO: 49273 - protein, 332 aa, Arabidopsis thaliana
  peptide (1)..(332): Ceres Seq. ID no. 13588540
  misc_feature (1)..(318): Pfam Name: Glycosyl hydrolases family 28 Pfam Description: Glycosyl hydrolases family 28
  misc_feature (1)..(326): Homolog of NCBI NO: 3024385 NR Description: POLYGALACTURONASE PRECURSOR (PG) (PECTINASE)
  misc_feature (1)..(318): Homolog of NCBI NO: 6714526 NR Description: polygalacturonase [Salix gilgiana]
  misc_feature (1)..(325): Homolog of NCBI NO: 15238902 NR Description: polygalacturonase, putative [Arabidopsis
  misc_feature (1)..(322): Homolog of NCBI NO: 15231876 NR Description: polygalacturonase, putative [Arabidopsis
  misc_feature (1)..(329): Homolog of NCBI NO: 548490 NR Description: Polygalacturonase precursor (PG) (Pectinase)
  misc_feature (1)..(320): Homolog of NCBI NO: 11263969 NR Description: polygalacturonase (EC 3.2.1.15) [imported] -
  misc_feature (1)..(320): Homolog of NCBI NO: 15231874 NR Description: polygalacturonase, putative [Arabidopsis
  misc_feature (1)..(325): Homolog of NCBI NO: 30984029 NR Description: polygalacturonase [Brassica napus]
  misc_feature (1)..(325): Homolog of NCBI NO: 21668071 NR Description: putative pollen polygalacturonase [Brassica
  misc_feature (1)..(332): Homolog of NCBI NO: 15231878 NR Description: exopolygalacturonase [Arabidopsis thaliana]
MTGPCKAPVEINLQGTLKADGKAIQGKERWVVFLRINGFKLNGGGIFDGEGNAAWRVNNCHKTFECKKLPISIRFDFVENAEIRDISSIDAKNFHINVLGAKNMTFDNVKVIAPAESPNTDGIHLGRSEGVKILNSKIATGDDCISVGDGMKNLHVENVMCGPGHGISVGSLGRYVHEQDVTGITVVNCTLQGTDNGLRIKTWPSAACATTASGIHFENIILNNVSNPILIDQEYCPWNQCNKQKPSTIKLVDISFKNIRGTSGNKDAVKLLCSKAHPCANVEIGNINLEYKGADGPPTFMCSNVSPKLVGTQNPKACSAGPTPKTAAKGDL

SEQ ID NO: 49274 - protein, 229 aa, Arabidopsis thaliana
  peptide (1)..(229): Ceres Seq. ID no. 13588541
  misc_feature (1)..(215): Pfam Name: Glycosyl hydrolases family 28 Pfam Description: Glycosyl hydrolases family 28
  misc_feature (1)..(223): Homolog of NCBI NO: 3024385 NR Description: POLYGALACTURONASE PRECURSOR (PG) (PECTINASE)
  misc_feature (1)..(215): Homolog of NCBI NO: 6714526 NR Description: polygalacturonase [Salix gilgiana]
  misc_feature (1)..(222): Homolog of NCBI NO: 15238902 NR Description: polygalacturonase, putative [Arabidopsis
  misc_feature (1)..(219): Homolog of NCBI NO: 15231876 NR Description: polygalacturonase, putative [Arabidopsis
  misc_feature (1)..(226): Homolog of NCBI NO: 548490 NR Description: Polygalacturonase precursor (PG) (Pectinase)
  misc_feature (1)..(217): Homolog of NCBI NO: 11263969 NR Description: polygalacturonase (EC 3.2.1.15) [imported] -
  misc_feature (1)..(217): Homolog of NCBI NO: 15231874 NR Description: polygalacturonase, putative [Arabidopsis
  misc_feature (1)..(222): Homolog of NCBI NO: 30984029 NR Description: polygalacturonase [Brassica napus]
  misc_feature (1)..(222): Homolog of NCBI NO: 21668071 NR Description: putative pollen polygalacturonase [Brassica
  misc_feature (1)..(229): Homolog of NCBI NO: 15231878 NR Description: exopolygalacturonase [Arabidopsis thaliana]
MTFDNVKVIAPAESPNTDGIHLGRSEGVKILNSKIATGDDCISVGDGMKNLHVENVMCGPGHGISVGSLGRYVHEQDVTGITVVNCTLQGTDNGLRIKTWPSAACATTASGIHFENIILNNVSNPILIDQEYCPWNQCNKQKPSTIKLVDISFKNIRGTSGNKDAVKLLCSKAHPCANVEIGNINLEYKGADGPPTFMCSNVSPKLVGTQNPKACSAGPTPKTAAKGDL

SEQ ID NO: 49275 - DNA, 1966 bp, Arabidopsis thaliana; identical to SEQ ID NO: 45864
  misc_feature (1)..(1966): Ceres Seq. ID no. 13591692
  misc_feature: MA Experiment ID: 20000179 Result: Up-regulated in Transcription
  misc_feature: MA Experiment 20000179 PARAMETER Experiment Name: At_Germinating_Seeds_P Parameter: Age (hr) Value: 6 vs. 0
  misc_feature: MA Experiment 20000179 PARAMETER Experiment Name: At_Germinating_Seeds_P Parameter: Tissue Value: Germinating Seeds
  misc_feature: MA Experiment ID: 20000180 Result: Up-regulated in Transcription
  misc_feature: MA Experiment 20000180 PARAMETER Experiment Name: At_Germinating_Seeds_P Parameter: Age (hr) Value: 24 vs. 0
  misc_feature: MA Experiment 20000180 PARAMETER Experiment Name: At_Germinating_Seeds_P Parameter: Tissue Value: Germinating Seeds
  misc_feature: MA Experiment ID: 20000214 Result: Up-regulated in Transcription
  misc_feature: MA Experiment 20000214 PARAMETER Experiment Name: At_4deg_Cold_P Parameter: Timepoint (hr) Value: 6
  misc_feature: MA Experiment ID: 20000794 Result: Up-regulated in Transcription
  misc_feature: MA Experiment 20000794 PARAMETER Experiment Name: At_Petals_P Parameter: Age (day) Value: 23-25 days
  misc_feature: MA Experiment 20000794 PARAMETER Experiment Name: At_Petals_P Parameter: Plant Line Value: WS
  misc_feature: MA Experiment 20000794 PARAMETER Experiment Name: At_Petals_P Parameter: Tissue Value: Petals vs. Whole plant
  misc_feature: MA Experiment ID: 20001248 Result: Down-regulated in Transcription
  misc_feature: MA Experiment 20001248 PARAMETER Experiment Name: At_Far-red-induction_P Parameter: Age (day) Value: 7
  misc_feature: MA Experiment 20001248 PARAMETER Experiment Name: At_Far-red-induction_P Parameter: Light Value: Far-red vs. White
  misc_feature: MA Experiment 20001248 PARAMETER Experiment Name: At_Far-red-induction_P Parameter: Organism Value: A. thaliana
  misc_feature: MA Experiment 20001248 PARAMETER Experiment Name: At_Far-red-induction_P Parameter: Plant Line Value: Columbia
  misc_feature: MA Experiment 20001248 PARAMETER Experiment Name: At_Far-red-induction_P Parameter: Timepoint (hr) Value: 4
  misc_feature: MA Experiment 20001248 PARAMETER Experiment Name: At_Far-red-induction_P Parameter: Tissue Value: Whole Plant
  misc_feature: MA Experiment ID: 20001557 Result: Up-regulated in Transcription
  misc_feature: MA Experiment 20001557 PARAMETER Experiment Name: At_Drought_Soil_Dry_P Parameter: Age (day) Value: 27
  misc_feature: MA Experiment 20001557 PARAMETER Experiment Name: At_Drought_Soil_Dry_P Parameter: Organism Value: A. thaliana
  misc_feature: MA Experiment 20001557 PARAMETER Experiment Name: At_Drought_Soil_Dry_P Parameter: Plant Line Value: WS
  misc_feature: MA Experiment 20001557 PARAMETER Experiment Name: At_Drought_Soil_Dry_P Parameter: Post Timepoint (hr) Value: 3
  misc_feature: MA Experiment 20001557 PARAMETER Experiment Name: At_Drought_Soil_Dry_P Parameter: Post-Treatment Value: Re-Water vs. No Drought
  misc_feature: MA Experiment 20001557 PARAMETER Experiment Name: At_Drought_Soil_Dry_P Parameter: Timepoint (day) Value: 13
  misc_feature: MA Experiment 20001557 PARAMETER Experiment Name: At_Drought_Soil_Dry_P Parameter: Treatment Value: Drought vs. No Drought
  misc_feature: MA Experiment ID: 20001559 Result: Down-regulated in Transcription
  misc_feature: MA Experiment 20001559 PARAMETER Experiment Name: At_Drought_Soil_Dry_P Parameter: Age (day) Value: 28
  misc_feature: MA Experiment 20001559 PARAMETER Experiment Name: At_Drought_Soil_Dry_P Parameter: Organism Value: A. thaliana
  misc_feature: MA Experiment 20001559 PARAMETER Experiment Name: At_Drought_Soil_Dry_P Parameter: Plant Line Value: WS
  misc_feature: MA Experiment 20001559 PARAMETER Experiment Name: At_Drought_Soil_Dry_P Parameter: Post Timepoint (hr) Value: 29
  misc_feature: MA Experiment 20001559 PARAMETER Experiment Name: At_Drought_Soil_Dry_P Parameter: Post-Treatment Value: Re-Water vs. No Drought
  misc_feature: MA Experiment 20001559 PARAMETER Experiment Name: At_Drought_Soil_Dry_P Parameter: Timepoint (day) Value: 14
  misc_feature: MA Experiment 20001559 PARAMETER Experiment Name: At_Drought_Soil_Dry_P Parameter: Treatment Value: Drought vs. No Drought

SEQ ID NO: 49276 - protein, 460 aa, Arabidopsis thaliana; identical to SEQ ID NO: 45865
  peptide (1)..(460): Ceres Seq. ID no. 13591693
  misc_feature (114)..(443): Pfam Name: NAD dependent epimerase/dehydratase family Pfam Description: NAD dependent epimerase/dehydratase family
  misc_feature (114)..(443): Pfam Name: NAD dependent epimerase/dehydratase family Pfam Description: NAD dependent epimerase/dehydratase family
  misc_feature (114)..(443): Pfam Name: NAD dependent epimerase/dehydratase family Pfam Description: NAD dependent epimerase/dehydratase family
  misc_feature (114)..(443): Pfam Name: NAD dependent epimerase/dehydratase family Pfam Description: NAD dependent epimerase/dehydratase family
  misc_feature (65)..(450): Homolog of NCBI NO: 15234745 NR Description: nucleotide sugar epimerase family [Arabidopsis
  misc_feature (25)..(443): Homolog of NCBI NO: 15293119 NR Description: putative nucleotide sugar epimerase [Arabidopsis
  misc_feature (25)..(443): Homolog of NCBI NO: 15234486 NR Description: nucleotide sugar epimerase family [Arabidopsis
  misc_feature (14)..(443): Homolog of NCBI NO: 15225451 NR Description: nucleotide sugar epimerase family [Arabidopsis
  misc_feature (1)..(443): Homolog of NCBI NO: 29647497 NR Description: OJ1191_A10.21 [Oryza sativa (japonica
  misc_feature (65)..(450): Homolog of NCBI NO: 15234745 NR Description: nucleotide sugar epimerase family [Arabidopsis
  misc_feature (25)..(443): Homolog of NCBI NO: 15234486 NR Description: nucleotide sugar epimerase family [Arabidopsis
  misc_feature (1)..(443): Homolog of NCBI NO: 29647497 NR Description: OJ1191_A10.21 [Oryza sativa (japonica
  misc_feature (14)..(443): Homolog of NCBI NO: 15225451 NR Description: nucleotide sugar epimerase family [Arabidopsis
  misc_feature (25)..(443): Homolog of NCBI NO: 15234486 NR Description: nucleotide sugar epimerase family [Arabidopsis
  misc_feature (25)..(443): Homolog of NCBI NO: 15293119 NR Description: putative nucleotide sugar epimerase [Arabidopsis
  misc_feature (65)..(450): Homolog of NCBI NO: 15234745 NR Description: nucleotide sugar epimerase family [Arabidopsis
  misc_feature (1)..(460): Homolog of NCBI NO: 15229524 NR Description: NAD-dependent epimerase/dehydratase family
  misc_feature (1)..(460): Homolog of NCBI NO: 24417280 NR Description: unknown [Arabidopsis thaliana]
  misc_feature (90)..(443): Homolog of NCBI NO: 15217591 NR Description: nucleotide sugar epimerase family [Arabidopsis
  misc_feature (90)..(443): Homolog of NCBI NO: 21536982 NR Description: nucleotide sugar epimerase, putative [Arabidopsis
  misc_feature (90)..(443): Homolog of NCBI NO: 15236712 NR Description: nucleotide sugar epimerase family [Arabidopsis
  misc_feature (1)..(460): Homolog of NCBI NO: 15229524 NR Description: NAD-dependent epimerase/dehydratase family
  misc_feature (1)..(460): Homolog of NCBI NO: 24417280 NR Description: unknown [Arabidopsis thaliana]
  misc_feature (90)..(443): Homolog of NCBI NO: 15217591 NR Description: nucleotide sugar epimerase family [Arabidopsis
  misc_feature (90)..(443): Homolog of NCBI NO: 21536982 NR Description: nucleotide sugar epimerase, putative [Arabidopsis
  misc_feature (90)..(443): Homolog of NCBI NO: 15236712 NR Description: nucleotide sugar epimerase family [Arabidopsis
  misc_feature (1)..(443): Homolog of NCBI NO: 29647497 NR Description: OJ1191_A10.21 [Oryza sativa (japonica
  misc_feature (14)..(443): Homolog of NCBI NO: 15225451 NR Description: nucleotide sugar epimerase family [Arabidopsis
  misc_feature (25)..(443): Homolog of NCBI NO: 15234486 NR Description: nucleotide sugar epimerase family [Arabidopsis
  misc_feature (25)..(443): Homolog of NCBI NO: 15293119 NR Description: putative nucleotide sugar epimerase [Arabidopsis
  misc_feature (65)..(450): Homolog of NCBI NO: 15234745 NR Description: nucleotide sugar epimerase family [Arabidopsis
  misc_feature (1)..(460): Homolog of NCBI NO: 15229524 NR Description: NAD-dependent epimerase/dehydratase family
  misc_feature (1)..(460): Homolog of NCBI NO: 24417280 NR Description: unknown [Arabidopsis thaliana]
  misc_feature (90)..(443): Homolog of NCBI NO: 15217591 NR Description: nucleotide sugar epimerase family [Arabidopsis
  misc_feature (90)..(443): Homolog of NCBI NO: 21536982 NR Description: nucleotide sugar epimerase, putative [Arabidopsis
  misc_feature (90)..(443): Homolog of NCBI NO: 15236712 NR Description: nucleotide sugar epimerase family [Arabidopsis
  misc_feature (1)..(443): Homolog of NCBI NO: 29647497 NR Description: OJ1191_A10.21 [Oryza sativa (japonica
  misc_feature (14)..(443): Homolog of NCBI NO: 15225451 NR Description: nucleotide sugar epimerase family [Arabidopsis
  misc_feature (25)..(443): Homolog of NCBI NO: 15293119 NR Description: putative nucleotide sugar epimerase [Arabidopsis
  misc_feature (90)..(443): Homolog of NCBI NO: 15236712 NR Description: nucleotide sugar epimerase family [Arabidopsis
  misc_feature (90)..(443): Homolog of NCBI NO: 21536982 NR Description: nucleotide sugar epimerase, putative [Arabidopsis
  misc_feature (90)..(443): Homolog of NCBI NO: 15217591 NR Description: nucleotide sugar epimerase family [Arabidopsis
  misc_feature (1)..(460): Homolog of NCBI NO: 24417280 NR Description: unknown [Arabidopsis thaliana]
  misc_feature (1)..(460): Homolog of NCBI NO: 15229524 NR Description: NAD-dependent epimerase/dehydratase family

SEQ ID NO: 49277 - protein, 258 aa, Arabidopsis thaliana; identical to SEQ ID NO: 45866
  peptide (1)..(258): Ceres Seq. ID no. 13591694
  misc_feature (1)..(241): Pfam Name: NAD dependent epimerase/dehydratase family Pfam Description: NAD dependent epimerase/dehydratase family
  misc_feature (1)..(241): Pfam Name: NAD dependent epimerase/dehydratase family Pfam Description: NAD dependent epimerase/dehydratase family
  misc_feature (1)..(241): Pfam Name: NAD dependent epimerase/dehydratase family Pfam Description: NAD dependent epimerase/dehydratase family
  misc_feature (1)..(241): Pfam Name: NAD dependent epimerase/dehydratase family Pfam Description: NAD dependent epimerase/dehydratase family
  misc_feature (1)..(248): Homolog of NCBI NO: 15234745 NR Description: nucleotide sugar epimerase family [Arabidopsis
  misc_feature (1)..(241): Homolog of NCBI NO: 15293119 NR Description: putative nucleotide sugar epimerase [Arabidopsis
  misc_feature (1)..(241): Homolog of NCBI NO: 15234486 NR Description: nucleotide sugar epimerase family [Arabidopsis
  misc_feature (1)..(241): Homolog of NCBI NO: 15225451 NR Description: nucleotide sugar epimerase family [Arabidopsis
  misc_feature (1)..(241): Homolog of NCBI NO: 29647497 NR Description: OJ1191_A10.21 [Oryza sativa (japonica
  misc_feature (1)..(248): Homolog of NCBI NO: 15234745 NR Description: nucleotide sugar epimerase family [Arabidopsis
  misc_feature (1)..(241): Homolog of NCBI NO: 15234486 NR Description: nucleotide sugar epimerase family [Arabidopsis
  misc_feature (1)..(241): Homolog of NCBI NO: 29647497 NR Description: OJ1191_A10.21 [Oryza sativa (japonica
  misc_feature (1)..(241): Homolog of NCBI NO: 15225451 NR Description: nucleotide sugar epimerase family [Arabidopsis
  misc_feature (1)..(241): Homolog of NCBI NO: 15234486 NR Description: nucleotide sugar epimerase family [Arabidopsis
  misc_feature (1)..(241): Homolog of NCBI NO: 15293119 NR Description: putative nucleotide sugar epimerase [Arabidopsis
  misc_feature (1)..(248): Homolog of NCBI NO: 15234745 NR Description: nucleotide sugar epimerase family [Arabidopsis
  misc_feature (1)..(258): Homolog of NCBI NO: 15229524 NR Description: NAD-dependent epimerase/dehydratase family
  misc_feature (1)..(258): Homolog of NCBI NO: 24417280 NR Description: unknown [Arabidopsis thaliana]
  misc_feature (1)..(241): Homolog of NCBI NO: 15217591 NR Description: nucleotide sugar epimerase family [Arabidopsis
  misc_feature (1)..(241): Homolog of NCBI NO: 21536982 NR Description: nucleotide sugar epimerase, putative [Arabidopsis
  misc_feature (1)..(241): Homolog of NCBI NO: 15236712 NR Description: nucleotide sugar epimerase family [Arabidopsis
  misc_feature (1)..(258): Homolog of NCBI NO: 15229524 NR Description: NAD-dependent epimerase/dehydratase family
  misc_feature (1)..(258): Homolog of NCBI NO: 24417280 NR Description: unknown [Arabidopsis thaliana]
  misc_feature (1)..(241): Homolog of NCBI NO: 15217591 NR Description: nucleotide sugar epimerase family [Arabidopsis
  misc_feature (1)..(241): Homolog of NCBI NO: 21536982 NR Description: nucleotide sugar epimerase, putative [Arabidopsis
  misc_feature (1)..(241): Homolog of NCBI NO: 15236712 NR Description: nucleotide sugar epimerase family [Arabidopsis
  misc_feature (1)..(241): Homolog of NCBI NO: 29647497 NR Description: OJ1191_A10.21 [Oryza sativa (japonica
  misc_feature (1)..(241): Homolog of NCBI NO: 15225451 NR Description: nucleotide sugar epimerase family [Arabidopsis
  misc_feature (1)..(241): Homolog of NCBI NO: 15234486 NR Description: nucleotide sugar epimerase family [Arabidopsis
  misc_feature (1)..(241): Homolog of NCBI NO: 15293119 NR Description: putative nucleotide sugar epimerase [Arabidopsis
  misc_feature (1)..(248): Homolog of NCBI NO: 15234745 NR Description: nucleotide sugar epimerase family [Arabidopsis
  misc_feature (1)..(258): Homolog of NCBI NO: 15229524 NR Description: NAD-dependent epimerase/dehydratase family
  misc_feature (1)..(258): Homolog of NCBI NO: 24417280 NR Description: unknown [Arabidopsis thaliana]
  misc_feature (1)..(241): Homolog of NCBI NO: 15217591 NR Description: nucleotide sugar epimerase family [Arabidopsis
  misc_feature (1)..(241): Homolog of NCBI NO: 21536982 NR Description: nucleotide sugar epimerase, putative [Arabidopsis
  misc_feature (1)..(241): Homolog of NCBI NO: 15236712 NR Description: nucleotide sugar epimerase family [Arabidopsis
  misc_feature (1)..(241): Homolog of NCBI NO: 29647497 NR Description: OJ1191_A10.21 [Oryza sativa (japonica
  misc_feature (1)..(241): Homolog of NCBI NO: 15225451 NR Description: nucleotide sugar epimerase family [Arabidopsis
  misc_feature (1)..(241): Homolog of NCBI NO: 15293119 NR Description: putative nucleotide sugar epimerase [Arabidopsis
  misc_feature (1)..(241): Homolog of NCBI NO: 15236712 NR Description: nucleotide sugar epimerase family [Arabidopsis
  misc_feature (1)..(241): Homolog of NCBI NO: 21536982 NR Description: nucleotide sugar epimerase, putative [Arabidopsis
  misc_feature (1)..(241): Homolog of NCBI NO: 15217591 NR Description: nucleotide sugar epimerase family [Arabidopsis
  misc_feature (1)..(258): Homolog of NCBI NO: 24417280 NR Description: unknown [Arabidopsis thaliana]
  misc_feature (1)..(258): Homolog of NCBI NO: 15229524 NR Description: NAD-dependent epimerase/dehydratase family

SEQ ID NO: 49278 - DNA, 1962 bp, Arabidopsis thaliana
  misc_feature (1)..(1962): Ceres Seq. ID no. 13648455
  misc_feature: MA Experiment ID: 20000166 Result: Up-regulated in Transcription
  misc_feature: MA Experiment 20000166 PARAMETER Experiment Name: At_100uM_ABA_P Parameter: Age (day) Value: 14
  misc_feature: MA Experiment 20000166 PARAMETER Experiment Name: At_100uM_ABA_P Parameter: Organism Value: A. thaliana
  misc_feature: MA Experiment 20000166 PARAMETER Experiment Name: At_100uM_ABA_P Parameter: Plant Line Value: WS
  misc_feature: MA Experiment 20000166 PARAMETER Experiment Name: At_100uM_ABA_P Parameter: Timepoint (hr) Value: 1
  misc_feature: MA Experiment 20000166 PARAMETER Experiment Name: At_100uM_ABA_P Parameter: Tissue Value: Aerial
  misc_feature: MA Experiment 20000166 PARAMETER Experiment Name: At_100uM_ABA_P Parameter: Treatment Value: 100uM ABA vs. No Treatment
  misc_feature: MA Experiment ID: 20000441 Result: Up-regulated in Transcription
  misc_feature: MA Experiment 20000441 PARAMETER Experiment Name: At_1uM_BR-BRZ__P Parameter: Tissue Value: Shoot Apices
  misc_feature: MA Experiment 20000441 PARAMETER Experiment Name: At_1uM_BR-BRZ__P Parameter: Treatment Value: 1uM BR vs. No Treatment
  misc_feature: MA Experiment ID: 20001247 Result: Up-regulated in Transcription
  misc_feature: MA Experiment 20001247 PARAMETER Experiment Name: At_Far-red-induction_P Parameter: Age (day) Value: 7
  misc_feature: MA Experiment 20001247 PARAMETER Experiment Name: At_Far-red-induction_P Parameter: Light Value: Far-red vs. White
  misc_feature: MA Experiment 20001247 PARAMETER Experiment Name: At_Far-red-induction_P Parameter: Organism Value: A. thaliana
  misc_feature: MA Experiment 20001247 PARAMETER Experiment Name: At_Far-red-induction_P Parameter: Plant Line Value: Columbia
  misc_feature: MA Experiment 20001247 PARAMETER Experiment Name: At_Far-red-induction_P Parameter: Timepoint (hr) Value: 1
  misc_feature: MA Experiment 20001247 PARAMETER Experiment Name: At_Far-red-induction_P Parameter: Tissue Value: Whole Plant
  misc_feature: MA Experiment ID: 20001450 Result: Up-regulated in Transcription
  misc_feature: MA Experiment 20001450 PARAMETER Experiment Name: At_Far-red-induction_P Parameter: Age (day) Value: 7
  misc_feature: MA Experiment 20001450 PARAMETER Experiment Name: At_Far-red-induction_P Parameter: Light Value: Far-red vs. White
  misc_feature: MA Experiment 20001450 PARAMETER Experiment Name: At_Far-red-induction_P Parameter: Organism Value: A. thaliana
  misc_feature: MA Experiment 20001450 PARAMETER Experiment Name: At_Far-red-induction_P Parameter: Plant Line Value: Columbia
  misc_feature: MA Experiment 20001450 PARAMETER Experiment Name: At_Far-red-induction_P Parameter: Timepoint (hr) Value: 8
  misc_feature: MA Experiment 20001450 PARAMETER Experiment Name: At_Far-red-induction_P Parameter: Tissue Value: Whole Plant
  misc_feature: MA Experiment ID: 20001557 Result: Down-regulated in Transcription
  misc_feature: MA Experiment 20001557 PARAMETER Experiment Name: At_Drought_Soil_Dry_P Parameter: Age (day) Value: 27
  misc_feature: MA Experiment 20001557 PARAMETER Experiment Name: At_Drought_Soil_Dry_P Parameter: Organism Value: A. thaliana
  misc_feature: MA Experiment 20001557 PARAMETER Experiment Name: At_Drought_Soil_Dry_P Parameter: Plant Line Value: WS
  misc_feature: MA Experiment 20001557 PARAMETER Experiment Name: At_Drought_Soil_Dry_P Parameter: Post Timepoint (hr) Value: 3
  misc_feature: MA Experiment 20001557 PARAMETER Experiment Name: At_Drought_Soil_Dry_P Parameter: Post-Treatment Value: Re-Water vs. No Drought
  misc_feature: MA Experiment 20001557 PARAMETER Experiment Name: At_Drought_Soil_Dry_P Parameter: Timepoint (day) Value: 13
  misc_feature: MA Experiment 20001557 PARAMETER Experiment Name: At_Drought_Soil_Dry_P Parameter: Treatment Value: Drought vs. No Drought
gtcgtctttttaaaaacgttttactttccacggcgaattttggtctgaatccaaattcttccctagtttgaaaaatcttctgtattctgaaaagagattttatgcgtatcgctgaaataggaagaaaacagattcctttccatttcccaaattttgtcattgagtcttggcatttcaaccaatcgcaatttattgaaattccggcgagtcattagatttttttggattccgtttcaaggtacggtgctttttcgcagattgagaagagcttaataagaaagatgacattgacgatcccaaacgcacctgggagctccgggtacttggatatgttcccagagagaaggatgtcgtattttgggaattcttacattctgggtttgactgtcactgccggaatcggtggccttctgttcggttatgatacaggtgtaatttccggtgcccttttgtacattaaggatgatttcgaagttgttaagcagagcagtttcttacaggaaactattgtaagtatggctttagttggtgccatgattggtgctgcagctggaggttggatcaatgactactacggtcgtaaaaaggcgactctttttgcagatgttgtctttgcagctggagctatcgttatggctgctgctcctgatccgtatgttttgatatcgggtcgtctcttggtcggtttaggagttggtgttgcttctgtgactgctccggtttatatagcggaagcatctccatcggaagttagaggtggacttgtgagcaccaacgtattgatgatcactggtggacagtttctttcatatctcgttaattctgctttcacacaggttccaggaacatggagatggatgcttggtgtttcaggcgttcccgctgtgattcagttcatcctcatgcttttcatgccagaatcccctcgatggcttttcatgaaaaatcgtaaagcggaagccatccaagtgctcgccagaacctatgacatctcgcggttagaagacgagattgatcatctttcagcggctgaagaggaagaaaaacaaaggaagcgcactgttggctacttggatgttttcagatccaaagaattgagacttgcatttcttgccggagcaggacttcaggcgtttcagcagttcactggtatcaatacagttatgtactacagccctacgatagtccaaatggctggatttcactcaaaccagctcgctttgttcctgtctctcattgttgctgccatgaatgctgctggaacagtcgtggggatttacttcatcgatcattgtggaaggaaaaagctagctctctcaagtttatttggcgtcattatatcactcttaatcctctcagtctcgtttttcaaacaatctgagacatcatctgatggagggctctatggttggctcgctgtgcttggcttagctctatacattgttttctttgcaccgggaatgggaccagtcccatggacggtgaactcagagatataccctcaacaataccgaggcatatgcggaggcatgtcagctacagttaactggatcagcaatttgattgtggcacaaacattcttgacaatcgcggaagctgctggaacaggaatgactttcttgattttggcgggaattgcggttcttgctgtaatctttgtgattgtgtttgtccctgagactcaagggctaacgttttcggaagttgaacagatttggaaagaaagagcttatggaaatatcagtggctggggcagtagcagtgatagcaacaacatggaagggttactcgagcagggatctcaatcttaaagatcttggatggctcatgagtcatgcatgacttacacattgtgaaatcacatagtagtaaaccgggattggttccggtttagcaatgtgagatgtatgtgatgttggaattgtaatgttcttaggaactgtgattgtaaataaatacatt

SEQ ID NO: 49279 - protein, 509 aa, Arabidopsis thaliana
  peptide (1)..(509): Ceres Seq. ID no. 13648456
  misc_feature (34)..(479): Pfam Name: Sugar (and other) transporter Pfam Description: Sugar (and other) transporter
  misc_feature (375)..(484): Homolog of NCBI NO: 32488451 NR Description: OSJNBa0004N05.8 [Oryza sativa (japonica
  misc_feature (30)..(362): Homolog of NCBI NO: 32488451 NR Description: OSJNBa0004N05.8 [Oryza sativa (japonica
  misc_feature (375)..(482): Homolog of NCBI NO: 33146705 NR Description: putative proton myo-inositol transporter
  misc_feature (28)..(373): Homolog of NCBI NO: 33146705 NR Description: putative proton myo-inositol transporter
  misc_feature (375)..(483): Homolog of NCBI NO: 15220697 NR Description: sugar transporter family [Arabidopsis thaliana]
  misc_feature (28)..(364): Homolog of NCBI NO: 15220697 NR Description: sugar transporter family [Arabidopsis thaliana]
  misc_feature (1)..(486): Homolog of NCBI NO: 38347452 NR Description: OSJNBa0076N16.21 [Oryza sativa (japonica
  misc_feature (3)..(501): Homolog of NCBI NO: 29501739 NR Description: putative Na+/myo-inositol symporter
  misc_feature (1)..(509): Homolog of NCBI NO: 25308955 NR Description: probable membrane transporter [imported] -
  misc_feature (1)..(509): Homolog of NCBI NO: 30689342 NR Description: sugar transporter family [Arabidopsis thaliana]
MTLTIPNAPGSSGYLDMFPERRMSYFGNSYILGLTVTAGIGGLLFGYDTGVISGALLYIKDDFEVVKQSSFLQETIVSMALVGAMIGAAAGGWINDYYGRKKATLFADVVFAAGAIVMAAAPDPYVLISGRLLVGLGVGVASVTAPVYIAEASPSEVRGGLVSTNVLMITGGQFLSYLVNSAFTQVPGTWRWMLGVSGVPAVIQFILMLFMPESPRWLFMKNRKAEAIQVLARTYDISRLEDEIDHLSAAEEEEKQRKRTVGYLDVFRSKELRLAFLAGAGLQAFQQFTGINTVMYYSPTIVQMAGFHSNQLALFLSLIVAAMNAAGTVVGIYFIDHCGRKKLALSSLFGVIISLLILSVSFFKQSETSSDGGLYGWLAVLGLALYIVFFAPGMGPVPWTVNSEIYPQQYRGICGGMSATVNWISNLIVAQTFLTIAEAAGTGMTFLILAGIAVLAVIFVIVFVPETQGLTFSEVEQIWKERAYGNISGWGSSSDSNNMEGLLEQGSQS

SEQ ID NO: 49280 - protein, 493 aa, Arabidopsis thaliana
  peptide (1)..(493): Ceres Seq. ID no. 13648457
  misc_feature (18)..(463): Pfam Name: Sugar (and other) transporter Pfam Description: Sugar (and other) transporter
  misc_feature (359)..(468): Homolog of NCBI NO: 32488451 NR Description: OSJNBa0004N05.8 [Oryza sativa (japonica
  misc_feature (14)..(346): Homolog of NCBI NO: 32488451 NR Description: OSJNBa0004N05.8 [Oryza sativa (japonica
  misc_feature (359)..(466): Homolog of NCBI NO: 33146705 NR Description: putative proton myo-inositol transporter
  misc_feature (12)..(357): Homolog of NCBI NO: 33146705 NR Description: putative proton myo-inositol transporter
  misc_feature (359)..(467): Homolog of NCBI NO: 15220697 NR Description: sugar transporter family [Arabidopsis thaliana]
  misc_feature (12)..(348): Homolog of NCBI NO: 15220697 NR Description: sugar transporter family [Arabidopsis thaliana]
  misc_feature (1)..(470): Homolog of NCBI NO: 38347452 NR Description: OSJNBa0076N16.21 [Oryza sativa (japonica
  misc_feature (1)..(485): Homolog of NCBI NO: 29501739 NR Description: putative Na+/myo-inositol symporter
  misc_feature (1)..(493): Homolog of NCBI NO: 25308955 NR Description: probable membrane transporter [imported] -
  misc_feature (1)..(493): Homolog of NCBI NO: 30689342 NR Description: sugar transporter family [Arabidopsis thaliana]
MFPERRMSYFGNSYILGLTVTAGIGGLLFGYDTGVISGALLYIKDDFEVVKQSSFLQETIVSMALVGAMIGAAAGGWINDYYGRKKATLFADVVFAAGAIVMAAAPDPYVLISGRLLVGLGVGVASVTAPVYIAEASPSEVRGGLVSTNVLMITGGQFLSYLVNSAFTQVPGTWRWMLGVSGVPAVIQFILMLFMPESPRWLFMKNRKAEAIQVLARTYDISRLEDEIDHLSAAEEEEKQRKRTVGYLDVFRSKELRLAFLAGAGLQAFQQFTGINTVMYYSPTIVQMAGFHSNQLALFLSLIVAAMNAAGTVVGIYFIDHCGRKKLALSSLFGVIISLLILSVSFFKQSETSSDGGLYGWLAVLGLALYIVFFAPGMGPVPWTVNSEIYPQQYRGICGGMSATVNWISNLIVAQTFLTIAEAAGTGMTFLILAGIAVLAVIFVIVFVPETQGLTFSEVEQIWKERAYGNISGWGSSSDSNNMEGLLEQGSQS

SEQ ID NO: 49281 - protein, 487 aa, Arabidopsis thaliana
  peptide (1)..(487): Ceres Seq. ID no. 13648458
  misc_feature (12)..(457): Pfam Name: Sugar (and other) transporter Pfam Description: Sugar (and other) transporter
  misc_feature (353)..(462): Homolog of NCBI NO: 32488451 NR Description: OSJNBa0004N05.8 [Oryza sativa (japonica
  misc_feature (8)..(340): Homolog of NCBI NO: 32488451 NR Description: OSJNBa0004N05.8 [Oryza sativa (japonica
  misc_feature (353)..(460): Homolog of NCBI NO: 33146705 NR Description: putative proton myo-inositol transporter
  misc_feature (6)..(351): Homolog of NCBI NO: 33146705 NR Description: putative proton myo-inositol transporter
  misc_feature (353)..(461): Homolog of NCBI NO: 15220697 NR Description: sugar transporter family [Arabidopsis thaliana]
  misc_feature (6)..(342): Homolog of NCBI NO: 15220697 NR Description: sugar transporter family [Arabidopsis thaliana]
  misc_feature (1)..(464): Homolog of NCBI NO: 38347452 NR Description: OSJNBa0076N16.21 [Oryza sativa (japonica
  misc_feature (1)..(479): Homolog of NCBI NO: 29501739 NR Description: putative Na+/myo-inositol symporter
  misc_feature (1)..(487): Homolog of NCBI NO: 25308955 NR Description: probable membrane transporter [imported] -
  misc_feature (1)..(487): Homolog of NCBI NO: 30689342 NR Description: sugar transporter family [Arabidopsis thaliana]
MSYFGNSYILGLTVTAGIGGLLFGYDTGVISGALLYIKDDFEVVKQSSFLQETIVSMALVGAMIGAAAGGWINDYYGRKKATLFADVVFAAGAIVMAAAPDPYVLISGRLLVGLGVGVASVTAPVYIAEASPSEVRGGLVSTNVLMITGGQFLSYLVNSAFTQVPGTWRWMLGVSGVPAVIQFILMLFMPESPRWLFMKNRKAEAIQVLARTYDISRLEDEIDHLSAAEEEEKQRKRTVGYLDVFRSKELRLAFLAGAGLQAFQQFTGINTVMYYSPTIVQMAGFHSNQLALFLSLIVAAMNAAGTVVGIYFIDHCGRKKLALSSLFGVIISLLILSVSFFKQSETSSDGGLYGWLAVLGLALYIVFFAPGMGPVPWTVNSEIYPQQYRGICGGMSATVNWISNLIVAQTFLTIAEAAGTGMTFLILAGIAVLAVIFVIVFVPETQGLTFSEVEQIWKERAYGNISGWGSSSDSNNMEGLLEQGSQS

SEQ ID NO: 49282 - DNA, 2056 bp, Arabidopsis thaliana
  misc_feature (1)..(2056): Ceres Seq. ID no. 14304349
  misc_feature: MA Experiment ID: 20000329 Result: Down-regulated in Transcription
  misc_feature: MA Experiment 20000329 PARAMETER Experiment Name: At_4deg_Cold_Sub_P Parameter: Age (day) Value: 14
  misc_feature: MA Experiment 20000329 PARAMETER Experiment Name: At_4deg_Cold_Sub_P Parameter: Organism Value: A. thaliana
  misc_feature: MA Experiment 20000329 PARAMETER Experiment Name: At_4deg_Cold_Sub_P Parameter: Plant Line Value: WS
  misc_feature: MA Experiment 20000329 PARAMETER Experiment Name: At_4deg_Cold_Sub_P Parameter: Temperature (deg C) Value: 4 vs. 22
  misc_feature: MA Experiment 20000329 PARAMETER Experiment Name: At_4deg_Cold_Sub_P Parameter: Timepoint (hr) Value: 6
  misc_feature: MA Experiment 20000329 PARAMETER Experiment Name: At_4deg_Cold_Sub_P Parameter: Tissue Value: Aerial
  misc_feature: MA Experiment ID: 20000440 Result: Down-regulated in Transcription
  misc_feature: MA Experiment 20000440 PARAMETER Experiment Name: At_Closed-Flower__Sub_P Parameter: Tissue Value: Closed Flower vs. Whole Plant
actttttcgtctagatacattcttcgtgaagaaatccaagtgcacacattcattagtgttggacggacccattttattttggatttttttgtataattctttggggtttttttgttaataattcacttctgtctataatatgattatgattgttcatcatattttagctgtaatttcctctcttgaacaaaattattattttcgtgatgtttttaagtacgtgacgaaagatcatttggtgatctcactgacatgatttgcccagcctgtcaggtttacctatggtcaaatatcattttctcgattttgccccaaacggtcaaggcatatatccccaatcttcaaagggtatttatgtacttttcgctattaaccgtgtggctatatgaagccgattcctcataacaactacaaaaaaggaaagcttcttccctccggcaaattcttacgtttctccggcggttagaaaaatgacaccacagatcaaaactcatctcttgccgaagcaagaaccttcttcgtctgagaaccatggatcatcaacctccggcatcgttttcaacgtgtcaacgagtataatcggagccggaataatgtcgatgccggcggcgtttaaagttcttggaatagttccagcgtttttgattatcacgatcatagcttggctttccacaatttccgttggatttctgatgaaatcaactctcgccggagaatcaactacttacgccggagttatgaaagagtcgtttggtaaaacaggatccatcgctgtacagattgctacgatggttgctacttttggttgtatgattatattttcgattattataggagatgtgctttctggtaatgaaaatggtggtcctgaacatattggagttttgcaagaatggtttggttcttactggtggaacacgagaatcttcgctttgttatttgtctacggctttgtcttgcttccattggtcctgcgtagacgagtcgaaagactggcaattagttccgctgtatcgtttcttcttgcggttctatttgttgtcataagctcggtgctggcgatttccgcgctggtgaatggacaaacgaagaatccaagactgtttccggagttgagcaatggaggatcgttctggcaactcttcacagcttcccctgttatagttacagccttcacgtttcacttcaatgttcatccaattggattcgagctcaaagatccattacaagtgatcccagcaactaagatctctgtcatcttgtgtgctgctatctacttcgcaactggactctttggttaccttctctttggagatgcaactatgtcggatattctagtgaactttgaccagagctctggttcttccattggttctcttctcaacgacattgtcagactcagctacgtgcttcacctcatgctggtctttcctctcctgaacttctcattgagagcaaatctcgacgaactcttgtaccccaagaagccgtccttggaaaaagacacaaaaagattcatcggactcactctggctctactgatttgctgtttcttgtctgcaatcgctgtaccagacatttggtacttctttcagttcatgggatcaaccatcacagtctccatagcattcatatttccagccgccattgttctaaggaatatccatggtgtatcaacctcaagagagaagatcgtagctgcaataatgcttgttcttgctgttgccactagcattattgctatctcgacaaatttatacagcctcgcagcaaactagtcgttgaaaaaagttttgcaaacagtcccttccatgatcacttcaaagaaatctgtaaaattattagcttgccgtagcattcatatttatatctttgtgaaataggtttgtcagaaaatgcaatgtaatagctatacaaagtgcaatttttgttgctgcttgaaacagagaaagaggaaatgaacaactcttcaaaacttgtattctttaaattactttttgtagaccattatttgaatgaacaaagtacatctgtatcagactattcctttctttgg

SEQ ID NO: 49283 - protein, 435 aa, Arabidopsis thaliana; identical to SEQ ID NO: 48079
  peptide (1)..(435): Ceres Seq. ID no. 14304350
  misc_feature (16)..(309): Homolog of NCBI NO: 24461850 NR Description: CTV.3 [Poncirus trifoliata]
  misc_feature (18)..(432): Homolog of NCBI NO: 18412864 NR Description: amino acid transporter family [Arabidopsis
  misc_feature (6)..(396): Homolog of NCBI NO: 34907894 NR Description: P0439E11.11 [Oryza sativa (japonica
  misc_feature (13)..(432): Homolog of NCBI NO: 15241555 NR Description: amino acid transporter family [Arabidopsis
  misc_feature (13)..(432): Homolog of NCBI NO: 9758059 NR Description: amino acid transporter-like protein [Arabidopsis
  misc_feature (5)..(432): Homolog of NCBI NO: 18406463 NR Description: amino acid transporter family [Arabidopsis
  misc_feature (9)..(432): Homolog of NCBI NO: 34898706 NR Description: hypothetical protein [Oryza sativa (japonica
  misc_feature (46)..(434): Homolog of NCBI NO: 25408697 NR Description: hypothetical protein At2g40420 [imported] -
  misc_feature (1)..(434): Homolog of NCBI NO: 30688270 NR Description: amino acid transporter family [Arabidopsis
  misc_feature (1)..(435): Homolog of NCBI NO: 15228851 NR Description: amino acid transporter family [Arabidopsis

SEQ ID NO: 49284 - protein, 394 aa, Arabidopsis thaliana; identical to SEQ ID NO: 48080
  peptide (1)..(394): Ceres Seq. ID no. 14304351
  misc_feature (1)..(268): Homolog of NCBI NO: 24461850 NR Description: CTV.3 [Poncirus trifoliata]
  misc_feature (1)..(391): Homolog of NCBI NO: 18412864 NR Description: amino acid transporter family [Arabidopsis
  misc_feature (1)..(355): Homolog of NCBI NO: 34907894 NR Description: P0439E11.11 [Oryza sativa (japonica
  misc_feature (1)..(391): Homolog of NCBI NO: 15241555 NR Description: amino acid transporter family [Arabidopsis
  misc_feature (1)..(391): Homolog of NCBI NO: 9758059 NR Description: amino acid transporter-like protein [Arabidopsis
  misc_feature (1)..(391): Homolog of NCBI NO: 18406463 NR Description: amino acid transporter family [Arabidopsis
  misc_feature (1)..(391): Homolog of NCBI NO: 34898706 NR Description: hypothetical protein [Oryza sativa (japonica
  misc_feature (5)..(393): Homolog of NCBI NO: 25408697 NR Description: hypothetical protein At2g40420 [imported] -
  misc_feature (1)..(393): Homolog of NCBI NO: 30688270 NR Description: amino acid transporter family [Arabidopsis
  misc_feature (1)..(394): Homolog of NCBI NO: 15228851 NR Description: amino acid transporter family [Arabidopsis

SEQ ID NO: 49285 - protein, 392 aa, Arabidopsis thaliana; identical to SEQ ID NO: 48081
  peptide (1)..(392): Ceres Seq. ID no. 14304352
  misc_feature (1)..(266): Homolog of NCBI NO: 24461850 NR Description: CTV.3 [Poncirus trifoliata]
  misc_feature (1)..(389): Homolog of NCBI NO: 18412864 NR Description: amino acid transporter family [Arabidopsis
  misc_feature (1)..(353): Homolog of NCBI NO: 34907894 NR Description: P0439E11.11 [Oryza sativa (japonica
  misc_feature (1)..(389): Homolog of NCBI NO: 15241555 NR Description: amino acid transporter family [Arabidopsis
  misc_feature (1)..(389): Homolog of NCBI NO: 9758059 NR Description: amino acid transporter-like protein [Arabidopsis
  misc_feature (1)..(389): Homolog of NCBI NO: 18406463 NR Description: amino acid transporter family [Arabidopsis
  misc_feature (1)..(389): Homolog of NCBI NO: 34898706 NR Description: hypothetical protein [Oryza sativa (japonica
  misc_feature (3)..(391): Homolog of NCBI NO: 25408697 NR Description: hypothetical protein At2g40420 [imported] -
  misc_feature (1)..(391): Homolog of NCBI NO: 30688270 NR Description: amino acid transporter family [Arabidopsis
  misc_feature (1)..(392): Homolog of NCBI NO: 15228851 NR Description: amino acid transporter family [Arabidopsis

SEQ ID NO: 49286 - DNA, 1429 bp, Arabidopsis thaliana; identical to SEQ ID NO: 39266
  misc_feature (1)..(1429): Ceres Seq. ID no. 13575008
  misc_feature: MA Experiment ID: 20000227 Result: Up-regulated in Transcription
  misc_feature: MA Experiment 20000227 PARAMETER Experiment Name: At_Root-Tips-vs-Tops_P Parameter: Tissue Value: Root Tips vs. Root Tops
  misc_feature: MA Experiment ID: 20000234 Result: Down-regulated in Transcription
  misc_feature: MA Experiment 20000234 PARAMETER Experiment Name: At_Siliques_P Parameter: Age (day) Value: 21
  misc_feature: MA Experiment 20000234 PARAMETER Experiment Name: At_Siliques_P Parameter: Organism Value: A. thaliana
  misc_feature: MA Experiment 20000234 PARAMETER Experiment Name: At_Siliques_P Parameter: Plant Line Value: WS
  misc_feature: MA Experiment 20000234 PARAMETER Experiment Name: At_Siliques_P Parameter: Tissue Value: Less Than 5mm Siliques vs. Whole Plant
  misc_feature: MA Experiment ID: 20000267 Result: Up-regulated in Transcription
  misc_feature: MA Experiment 20000267 PARAMETER Experiment Name: At_Drought_P Parameter: Age (day) Value: 7
  misc_feature: MA Experiment 20000267 PARAMETER Experiment Name: At_Drought_P Parameter: Organism Value: A. thaliana
  misc_feature: MA Experiment 20000267 PARAMETER Experiment Name: At_Drought_P Parameter: Plant Line Value: WS
  misc_feature: MA Experiment 20000267 PARAMETER Experiment Name: At_Drought_P Parameter: Timepoint (hr) Value: 6
  misc_feature: MA Experiment 20000267 PARAMETER Experiment Name: At_Drought_P Parameter: Tissue Value: Whole Plant
  misc_feature: MA Experiment 20000267 PARAMETER Experiment Name: At_Drought_P Parameter: Treatment Value: Drought vs. No Drought
  misc_feature: MA Experiment ID: 20000436 Result: Up-regulated in Transcription
  misc_feature: MA Experiment 20000436 PARAMETER Experiment Name: At_Drought_P Parameter: Age (day) Value: 7
  misc_feature: MA Experiment 20000436 PARAMETER Experiment Name: At_Drought_P Parameter: Organism Value: A. thaliana
  misc_feature: MA Experiment 20000436 PARAMETER Experiment Name: At_Drought_P Parameter: Plant Line Value: WS
  misc_feature: MA Experiment 20000436 PARAMETER Experiment Name: At_Drought_P Parameter: Timepoint (hr) Value: 12
  misc_feature: MA Experiment 20000436 PARAMETER Experiment Name: At_Drought_P Parameter: Tissue Value: Whole Plant
  misc_feature: MA Experiment 20000436 PARAMETER Experiment Name: At_Drought_P Parameter: Treatment Value: Drought vs. No Drought
  misc_feature: MA Experiment ID: 20000437 Result: Up-regulated in Transcription
  misc_feature: MA Experiment 20000437 PARAMETER Experiment Name: At_Drought_P Parameter: Age (day) Value: 8
  misc_feature: MA Experiment 20000437 PARAMETER Experiment Name: At_Drought_P Parameter: Organism Value: A. thaliana
  misc_feature: MA Experiment 20000437 PARAMETER Experiment Name: At_Drought_P Parameter: Plant Line Value: WS
  misc_feature: MA Experiment 20000437 PARAMETER Experiment Name: At_Drought_P Parameter: Timepoint (hr) Value: 24
  misc_feature: MA Experiment 20000437 PARAMETER Experiment Name: At_Drought_P Parameter: Tissue Value: Whole Plant
  misc_feature: MA Experiment 20000437 PARAMETER Experiment Name: At_Drought_P Parameter: Treatment Value: Drought vs. No Drought
  misc_feature: MA Experiment ID: 20001556 Result: Up-regulated in Transcription
  misc_feature: MA Experiment 20001556 PARAMETER Experiment Name: At_Drought_Soil_Dry_P Parameter: Age (day) Value: 26
  misc_feature: MA Experiment 20001556 PARAMETER Experiment Name: At_Drought_Soil_Dry_P Parameter: Organism Value: A. thaliana
  misc_feature: MA Experiment 20001556 PARAMETER Experiment Name: At_Drought_Soil_Dry_P Parameter: Plant Line Value: WS
  misc_feature: MA Experiment 20001556 PARAMETER Experiment Name: At_Drought_Soil_Dry_P Parameter: Post Timepoint (hr) Value: None
  misc_feature: MA Experiment 20001556 PARAMETER Experiment Name: At_Drought_Soil_Dry_P Parameter: Post-Treatment Value: None
  misc_feature: MA Experiment 20001556 PARAMETER Experiment Name: At_Drought_Soil_Dry_P Parameter: Timepoint (day) Value: 12
  misc_feature: MA Experiment 20001556 PARAMETER Experiment Name: At_Drought_Soil_Dry_P Parameter: Treatment Value: Drought vs. No Drought
  misc_feature: MA Experiment ID: 20001557 Result: Up-regulated in Transcription
  misc_feature: MA Experiment 20001557 PARAMETER Experiment Name: At_Drought_Soil_Dry_P Parameter: Age (day) Value: 27
  misc_feature: MA Experiment 20001557 PARAMETER Experiment Name: At_Drought_Soil_Dry_P Parameter: Organism Value: A. thaliana
  misc_feature: MA Experiment 20001557 PARAMETER Experiment Name: At_Drought_Soil_Dry_P Parameter: Plant Line Value: WS
  misc_feature: MA Experiment 20001557 PARAMETER Experiment Name: At_Drought_Soil_Dry_P Parameter: Post Timepoint (hr) Value: 3
  misc_feature: MA Experiment 20001557 PARAMETER Experiment Name: At_Drought_Soil_Dry_P Parameter: Post-Treatment Value: Re-Water vs. No Drought
  misc_feature: MA Experiment 20001557 PARAMETER Experiment Name: At_Drought_Soil_Dry_P Parameter: Timepoint (day) Value: 13
  misc_feature: MA Experiment 20001557 PARAMETER Experiment Name: At_Drought_Soil_Dry_P Parameter: Treatment Value: Drought vs. No Drought
  misc_feature: MA Experiment ID: 20001559 Result: Up-regulated in Transcription
  misc_feature: MA Experiment 20001559 PARAMETER Experiment Name: At_Drought_Soil_Dry_P Parameter: Age (day) Value: 28
  misc_feature: MA Experiment 20001559 PARAMETER Experiment Name: At_Drought_Soil_Dry_P Parameter: Organism Value: A. thaliana
  misc_feature: MA Experiment 20001559 PARAMETER Experiment Name: At_Drought_Soil_Dry_P Parameter: Plant Line Value: WS
  misc_feature: MA Experiment 20001559 PARAMETER Experiment Name: At_Drought_Soil_Dry_P Parameter: Post Timepoint (hr) Value: 29
  misc_feature: MA Experiment 20001559 PARAMETER Experiment Name: At_Drought_Soil_Dry_P Parameter: Post-Treatment Value: Re-Water vs. No Drought
  misc_feature: MA Experiment 20001559 PARAMETER Experiment Name: At_Drought_Soil_Dry_P Parameter: Timepoint (day) Value: 14
  misc_feature: MA Experiment 20001559 PARAMETER Experiment Name: At_Drought_Soil_Dry_P Parameter: Treatment Value: Drought vs. No Drought
  misc_feature: MA Experiment ID: 20001911 Result: Up-regulated in Transcription
  misc_feature: MA Experiment 20001911 PARAMETER Experiment Name: At_Drought_Reproduction_P Parameter: Age (day) Value: 40
  misc_feature: MA Experiment 20001911 PARAMETER Experiment Name: At_Drought_Reproduction_P Parameter: Organism Value: A. thaliana
  misc_feature: MA Experiment 20001911 PARAMETER Experiment Name: At_Drought_Reproduction_P Parameter: Plant Line Value: WS
  misc_feature: MA Experiment 20001911 PARAMETER Experiment Name: At_Drought_Reproduction_P Parameter: Timepoint (day) Value: 10
  misc_feature: MA Experiment 20001911 PARAMETER Experiment Name: At_Drought_Reproduction_P Parameter: Tissue Value: Flowers
  misc_feature: MA Experiment 20001911 PARAMETER Experiment Name: At_Drought_Reproduction_P Parameter: Treatment Value: Drought vs. No Drought

SEQ ID NO: 49287 - protein, 286 aa, Arabidopsis thaliana; identical to SEQ ID NO: 39267
  peptide (1)..(286): Ceres Seq. ID no. 13575009
  misc_feature (139)..(194): Pfam Name: KH domain Pfam Description: KH domain
  misc_feature (139)..(194): Pfam Name: KH domain Pfam Description: KH domain
  misc_feature (27)..(284): Homolog of NCBI NO: 19424087 NR Description: putative RNA-binding protein [Arabidopsis
  misc_feature (5)..(284): Homolog of NCBI NO: 15241136 NR Description: KH domain protein [Arabidopsis thaliana]
  misc_feature (13)..(284): Homolog of NCBI NO: 20268733 NR Description: unknown protein [Arabidopsis thaliana]
  misc_feature (13)..(284): Homolog of NCBI NO: 15236738 NR Description: KH domain protein [Arabidopsis thaliana]
  misc_feature (1)..(283): Homolog of NCBI NO: 34909270 NR Description: P0454H12.18 [Oryza sativa (japonica
  misc_feature (27)..(284): Homolog of NCBI NO: 19424087 NR Description: putative RNA-binding protein [Arabidopsis
  misc_feature (13)..(284): Homolog of NCBI NO: 20268733 NR Description: unknown protein [Arabidopsis thaliana]
  misc_feature (1)..(283): Homolog of NCBI NO: 34909270 NR Description: P0454H12.18 [Oryza sativa (japonica
  misc_feature (1)..(286): Homolog of NCBI NO: 15224909 NR Description: KH domain protein [Arabidopsis thaliana]
  misc_feature (1)..(285): Homolog of NCBI NO: 12322716 NR Description: unknown protein; 28504-31237 [Arabidopsis
  misc_feature (1)..(285): Homolog of NCBI NO: 30680583 NR Description: KH domain protein [Arabidopsis thaliana]
  misc_feature (1)..(285): Homolog of NCBI NO: 40645104 NR Description: hypothetical protein [Nicotiana tabacum]
  misc_feature (3)..(283): Homolog of NCBI NO: 34900448 NR Description: contains EST C27129(C51039)~similar to
  misc_feature (13)..(284): Homolog of NCBI NO: 15236738 NR Description: KH domain protein [Arabidopsis thaliana]
  misc_feature (5)..(284): Homolog of NCBI NO: 15241136 NR Description: KH domain protein [Arabidopsis thaliana]
  misc_feature (3)..(283): Homolog of NCBI NO: 34900448 NR Description: contains EST C27129(C51039)~similar to
  misc_feature (1)..(285): Homolog of NCBI NO: 40645104 NR Description: hypothetical protein [Nicotiana tabacum]
  misc_feature (1)..(285): Homolog of NCBI NO: 30680583 NR Description: KH domain protein [Arabidopsis thaliana]
  misc_feature (1)..(285): Homolog of NCBI NO: 12322716 NR Description: unknown protein; 28504-31237 [Arabidopsis
  misc_feature (1)..(286): Homolog of NCBI NO: 15224909 NR Description: KH domain protein [Arabidopsis thaliana]

SEQ ID NO: 49288 - protein, 240 aa, Arabidopsis thaliana; identical to SEQ ID NO: 39268
  peptide (1)..(240): Ceres Seq. ID no. 13575010
  misc_feature (93)..(148): Pfam Name: KH domain Pfam Description: KH domain
  misc_feature (93)..(148): Pfam Name: KH domain Pfam Description: KH domain
  misc_feature (1)..(238): Homolog of NCBI NO: 19424087 NR Description: putative RNA-binding protein [Arabidopsis
  misc_feature (1)..(238): Homolog of NCBI NO: 15241136 NR Description: KH domain protein [Arabidopsis thaliana]
  misc_feature (1)..(238): Homolog of NCBI NO: 20268733 NR Description: unknown protein [Arabidopsis thaliana]
  misc_feature (1)..(238): Homolog of NCBI NO: 15236738 NR Description: KH domain protein [Arabidopsis thaliana]
  misc_feature (1)..(237): Homolog of NCBI NO: 34909270 NR Description: P0454H12.18 [Oryza sativa (japonica
  misc_feature (1)..(238): Homolog of NCBI NO: 19424087 NR Description: putative RNA-binding protein [Arabidopsis
  misc_feature (1)..(238): Homolog of NCBI NO: 20268733 NR Description: unknown protein [Arabidopsis thaliana]
  misc_feature (1)..(237): Homolog of NCBI NO: 34909270 NR Description: P0454H12.18 [Oryza sativa (japonica
  misc_feature (1)..(240): Homolog of NCBI NO: 15224909 NR Description: KH domain protein [Arabidopsis thaliana]
  misc_feature (1)..(239): Homolog of NCBI NO: 12322716 NR Description: unknown protein; 28504-31237 [Arabidopsis
  misc_feature (1)..(239): Homolog of NCBI NO: 30680583 NR Description: KH domain protein [Arabidopsis thaliana]
  misc_feature (1)..(239): Homolog of NCBI NO: 40645104 NR Description: hypothetical protein [Nicotiana tabacum]
  misc_feature (1)..(237): Homolog of NCBI NO: 34900448 NR Description: contains EST C27129(C51039)~similar to
  misc_feature (1)..(238): Homolog of NCBI NO: 15236738 NR Description: KH domain protein [Arabidopsis thaliana]
  misc_feature (1)..(238): Homolog of NCBI NO: 15241136 NR Description: KH domain protein [Arabidopsis thaliana]
  misc_feature (1)..(237): Homolog of NCBI NO: 34900448 NR Description: contains EST C27129(C51039)~similar to
  misc_feature (1)..(239): Homolog of NCBI NO: 40645104 NR Description: hypothetical protein [Nicotiana tabacum]
  misc_feature (1)..(239): Homolog of NCBI NO: 30680583 NR Description: KH domain protein [Arabidopsis thaliana]
  misc_feature (1)..(239): Homolog of NCBI NO: 12322716 NR Description: unknown protein; 28504-31237 [Arabidopsis
  misc_feature (1)..(240): Homolog of NCBI NO: 15224909 NR Description: KH domain protein [Arabidopsis thaliana]

SEQ ID NO: 49289 - protein, 226 aa, Arabidopsis thaliana; identical to SEQ ID NO: 39269
  peptide (1)..(226): Ceres Seq. ID no. 13575011
  misc_feature (79)..(134): Pfam Name: KH domain Pfam Description: KH domain
  misc_feature (79)..(134): Pfam Name: KH domain Pfam Description: KH domain
  misc_feature (1)..(224): Homolog of NCBI NO: 19424087 NR Description: putative RNA-binding protein [Arabidopsis
  misc_feature (1)..(224): Homolog of NCBI NO: 15241136 NR Description: KH domain protein [Arabidopsis thaliana]
  misc_feature (1)..(224): Homolog of NCBI NO: 20268733 NR Description: unknown protein [Arabidopsis thaliana]
  misc_feature (1)..(224): Homolog of NCBI NO: 15236738 NR Description: KH domain protein [Arabidopsis thaliana]
  misc_feature (1)..(223): Homolog of NCBI NO: 34909270 NR Description: P0454H12.18 [Oryza sativa (japonica
  misc_feature (1)..(224): Homolog of NCBI NO: 19424087 NR Description: putative RNA-binding protein [Arabidopsis
  misc_feature (1)..(224): Homolog of NCBI NO: 20268733 NR Description: unknown protein [Arabidopsis thaliana]
  misc_feature (1)..(223): Homolog of NCBI NO: 34909270 NR Description: P0454H12.18 [Oryza sativa (japonica
  misc_feature (1)..(226): Homolog of NCBI NO: 15224909 NR Description: KH domain protein [Arabidopsis thaliana]
  misc_feature (1)..(225): Homolog of NCBI NO: 12322716 NR Description: unknown protein; 28504-31237 [Arabidopsis
  misc_feature (1)..(225): Homolog of NCBI NO: 30680583 NR Description: KH domain protein [Arabidopsis thaliana]
  misc_feature (1)..(225): Homolog of NCBI NO: 40645104 NR Description: hypothetical protein [Nicotiana tabacum]
  misc_feature (1)..(223): Homolog of NCBI NO: 34900448 NR Description: contains EST C27129(C51039)~similar to
  misc_feature (1)..(224): Homolog of NCBI NO: 15236738 NR Description: KH domain protein [Arabidopsis thaliana]
  misc_feature (1)..(224): Homolog of NCBI NO: 15241136 NR Description: KH domain protein [Arabidopsis thaliana]
  misc_feature (1)..(223): Homolog of NCBI NO: 34900448 NR Description: contains EST C27129(C51039)~similar to
  misc_feature (1)..(225): Homolog of NCBI NO: 40645104 NR Description: hypothetical protein [Nicotiana tabacum]
  misc_feature (1)..(225): Homolog of NCBI NO: 30680583 NR Description: KH domain protein [Arabidopsis thaliana]
  misc_feature (1)..(225): Homolog of NCBI NO: 12322716 NR Description: unknown protein; 28504-31237 [Arabidopsis
  misc_feature (1)..(226): Homolog of NCBI NO: 15224909 NR Description: KH domain protein [Arabidopsis thaliana]

SEQ ID NO: 49290 - DNA, 1306 bp, Arabidopsis thaliana
  misc_feature (1)..(1306): Ceres Seq. ID no. 13647617
  misc_feature: MA Experiment ID: 20000185 Result: Up-regulated in Transcription
  misc_feature: MA Experiment 20000185 PARAMETER Experiment Name: At_Roots__P Parameter: Age (day) Value: 7 vs. 21
  misc_feature: MA Experiment 20000185 PARAMETER Experiment Name: At_Roots__P Parameter: Organism Value: A. thaliana
  misc_feature: MA Experiment 20000185 PARAMETER Experiment Name: At_Roots__P Parameter: Tissue Value: Roots vs. Whole Plant
  misc_feature: MA Experiment ID: 20000227 Result: Down-regulated in Transcription
  misc_feature: MA Experiment 20000227 PARAMETER Experiment Name: At_Root-Tips-vs-Tops_P Parameter: Tissue Value: Root Tips vs. Root Tops
  misc_feature: MA Experiment ID: 20000234 Result: Up-regulated in Transcription
  misc_feature: MA Experiment 20000234 PARAMETER Experiment Name: At_Siliques_P Parameter: Age (day) Value: 21
  misc_feature: MA Experiment 20000234 PARAMETER Experiment Name: At_Siliques_P Parameter: Organism Value: A. thaliana
  misc_feature: MA Experiment 20000234 PARAMETER Experiment Name: At_Siliques_P Parameter: Plant Line Value: WS
  misc_feature: MA Experiment 20000234 PARAMETER Experiment Name: At_Siliques_P Parameter: Tissue Value: Less Than 5mm Siliques vs. Whole Plant
  misc_feature: MA Experiment ID: 20000235 Result: Up-regulated in Transcription
  misc_feature: MA Experiment 20000235 PARAMETER Experiment Name: At_Siliques_P Parameter: Age (day) Value: 21
  misc_feature: MA Experiment 20000235 PARAMETER Experiment Name: At_Siliques_P Parameter: Organism Value: A. thaliana
  misc_feature: MA Experiment 20000235 PARAMETER Experiment Name: At_Siliques_P Parameter: Plant Line Value: WS
  misc_feature: MA Experiment 20000235 PARAMETER Experiment Name: At_Siliques_P Parameter: Tissue Value: 5-10mm Siliques vs. Whole Plant
  misc_feature: MA Experiment ID: 20000286 Result: Down-regulated in Transcription
  misc_feature: MA Experiment 20000286 PARAMETER Experiment Name: At_Open_Flower_P Parameter: Age (day) Value: 21
  misc_feature: MA Experiment 20000286 PARAMETER Experiment Name: At_Open_Flower_P Parameter: Plant Line Value: WS
  misc_feature: MA Experiment 20000286 PARAMETER Experiment Name: At_Open_Flower_P Parameter: Tissue Value: Half Open vs. Whole Plant
  misc_feature: MA Experiment ID: 20000439 Result: Up-regulated in Transcription
  misc_feature: MA Experiment 20000439 PARAMETER Experiment Name: At_Roots__P Parameter: Age (day) Value: 14 vs. 21
  misc_feature: MA Experiment 20000439 PARAMETER Experiment Name: At_Roots__P Parameter: Organism Value: A. thaliana
  misc_feature: MA Experiment 20000439 PARAMETER Experiment Name: At_Roots__P Parameter: Tissue Value: Roots vs. Whole Plant
  misc_feature: MA Experiment ID: 20000452 Result: Up-regulated in Transcription
  misc_feature: MA Experiment 20000452 PARAMETER Experiment Name: At_CS6879_Shoots-Roots_P Parameter: Age (day) Value: 14
  misc_feature: MA Experiment 20000452 PARAMETER Experiment Name: At_CS6879_Shoots-Roots_P Parameter: Organism Value: A. thaliana
  misc_feature: MA Experiment 20000452 PARAMETER Experiment Name: At_CS6879_Shoots-Roots_P Parameter: Plant Line Value: CS6879 vs. WS
  misc_feature: MA Experiment 20000452 PARAMETER Experiment Name: At_CS6879_Shoots-Roots_P Parameter: Tissue Value: Shoots
  misc_feature: MA Experiment ID: 20000453 Result: Up-regulated in Transcription
  misc_feature: MA Experiment 20000453 PARAMETER Experiment Name: At_100uM_ABA_P Parameter: Age (day) Value: 15
  misc_feature: MA Experiment 20000453 PARAMETER Experiment Name: At_100uM_ABA_P Parameter: Organism Value: A. thaliana
  misc_feature: MA Experiment 20000453 PARAMETER Experiment Name: At_100uM_ABA_P Parameter: Plant Line Value: WS
  misc_feature: MA Experiment 20000453 PARAMETER Experiment Name: At_100uM_ABA_P Parameter: Timepoint (hr) Value: 24
  misc_feature: MA Experiment 20000453 PARAMETER Experiment Name: At_100uM_ABA_P Parameter: Tissue Value: Aerial
  misc_feature: MA Experiment 20000453 PARAMETER Experiment Name: At_100uM_ABA_P Parameter: Treatment Value: 100uM ABA vs. No Treatment
  misc_feature: MA Experiment ID: 20000460 Result: Down-regulated in Transcription
  misc_feature: MA Experiment 20000460 PARAMETER Experiment Name: At_10percent_PEG_P Parameter: Age (day) Value: 12
  misc_feature: MA Experiment 20000460 PARAMETER Experiment Name: At_10percent_PEG_P Parameter: Organism Value: A. thaliana
  misc_feature: MA Experiment 20000460 PARAMETER Experiment Name: At_10percent_PEG_P Parameter: Plant Line Value: WS
  misc_feature: MA Experiment 20000460 PARAMETER Experiment Name: At_10percent_PEG_P Parameter: Timepoint (day) Value: 12
  misc_feature: MA Experiment 20000460 PARAMETER Experiment Name: At_10percent_PEG_P Parameter: Tissue Value: Whole Plant
  misc_feature: MA Experiment 20000460 PARAMETER Experiment Name: At_10percent_PEG_P Parameter: Treatment Value: 10percent PEG vs. No Treatment
  misc_feature: MA Experiment ID: 20000527 Result: Down-regulated in Transcription
  misc_feature: MA Experiment 20000527 PARAMETER Experiment Name: At_10percent_PEG_P Parameter: Age (day) Value: 20
  misc_feature: MA Experiment 20000527 PARAMETER Experiment Name: At_10percent_PEG_P Parameter: Organism Value: A. thaliana
  misc_feature: MA Experiment 20000527 PARAMETER Experiment Name: At_10percent_PEG_P Parameter: Plant Line Value: WS
  misc_feature: MA Experiment 20000527 PARAMETER Experiment Name: At_10percent_PEG_P Parameter: Timepoint (day) Value: 20
  misc_feature: MA Experiment 20000527 PARAMETER Experiment Name: At_10percent_PEG_P Parameter: Tissue Value: Whole Plant
  misc_feature: MA Experiment 20000527 PARAMETER Experiment Name: At_10percent_PEG_P Parameter: Treatment Value: 10percent PEG vs. No Treatment
  misc_feature: MA Experiment ID: 20000573 Result: Down-regulated in Transcription
  misc_feature: MA Experiment 20000573 PARAMETER Experiment Name: At_100uM_ABA_Mutants__P Parameter: Organism Value: A. thaliana
  misc_feature: MA Experiment 20000573 PARAMETER Experiment Name: At_100uM_ABA_Mutants__P Parameter: Plant Line Value: CS22 vs. Ler wt
  misc_feature: MA Experiment 20000573 PARAMETER Experiment Name: At_100uM_ABA_Mutants__P Parameter: Timepoint (hr) Value: N/A
  misc_feature: MA Experiment 20000573 PARAMETER Experiment Name: At_100uM_ABA_Mutants__P Parameter: Tissue Value: Whole Plant
  misc_feature: MA Experiment 20000573 PARAMETER Experiment Name: At_100uM_ABA_Mutants__P Parameter: Treatment Value: None
  misc_feature: MA Experiment ID: 20001248 Result: Down-regulated in Transcription
  misc_feature: MA Experiment 20001248 PARAMETER Experiment Name: At_Far-red-induction_P Parameter: Age (day) Value: 7
  misc_feature: MA Experiment 20001248 PARAMETER Experiment Name: At_Far-red-induction_P Parameter: Light Value: Far-red vs. White
  misc_feature: MA Experiment 20001248 PARAMETER Experiment Name: At_Far-red-induction_P Parameter: Organism Value: A. thaliana
  misc_feature: MA Experiment 20001248 PARAMETER Experiment Name: At_Far-red-induction_P Parameter: Plant Line Value: Columbia
  misc_feature: MA Experiment 20001248 PARAMETER Experiment Name: At_Far-red-induction_P Parameter: Timepoint (hr) Value: 4
  misc_feature: MA Experiment 20001248 PARAMETER Experiment Name: At_Far-red-induction_P Parameter: Tissue Value: Whole Plant
  misc_feature: MA Experiment ID: 20001556 Result: Up-regulated in Transcription
  misc_feature: MA Experiment 20001556 PARAMETER Experiment Name: At_Drought_Soil_Dry_P Parameter: Age (day) Value: 26
  misc_feature: MA Experiment 20001556 PARAMETER Experiment Name: At_Drought_Soil_Dry_P Parameter: Organism Value: A. thaliana
  misc_feature: MA Experiment 20001556 PARAMETER Experiment Name: At_Drought_Soil_Dry_P Parameter: Plant Line Value: WS
  misc_feature: MA Experiment 20001556 PARAMETER Experiment Name: At_Drought_Soil_Dry_P Parameter: Post Timepoint (hr) Value: None
  misc_feature: MA Experiment 20001556 PARAMETER Experiment Name: At_Drought_Soil_Dry_P Parameter: Post-Treatment Value: None
  misc_feature: MA Experiment 20001556 PARAMETER Experiment Name: At_Drought_Soil_Dry_P Parameter: Timepoint (day) Value: 12
  misc_feature: MA Experiment 20001556 PARAMETER Experiment Name: At_Drought_Soil_Dry_P Parameter: Treatment Value: Drought vs. No Drought
  misc_feature: MA Experiment ID: 20001559 Result: Up-regulated in Transcription
  misc_feature: MA Experiment 20001559 PARAMETER Experiment Name: At_Drought_Soil_Dry_P Parameter: Age (day) Value: 28
  misc_feature: MA Experiment 20001559 PARAMETER Experiment Name: At_Drought_Soil_Dry_P Parameter: Organism Value: A. thaliana
  misc_feature: MA Experiment 20001559 PARAMETER Experiment Name: At_Drought_Soil_Dry_P Parameter: Plant Line Value: WS
  misc_feature: MA Experiment 20001559 PARAMETER Experiment Name: At_Drought_Soil_Dry_P Parameter: Post Timepoint (hr) Value: 29
  misc_feature: MA Experiment 20001559 PARAMETER Experiment Name: At_Drought_Soil_Dry_P Parameter: Post-Treatment Value: Re-Water vs. No Drought
  misc_feature: MA Experiment 20001559 PARAMETER Experiment Name: At_Drought_Soil_Dry_P Parameter: Timepoint (day) Value: 14
  misc_feature: MA Experiment 20001559 PARAMETER Experiment Name: At_Drought_Soil_Dry_P Parameter: Treatment Value: Drought vs. No Drought
  misc_feature: MA Experiment ID: 20001761 Result: Down-regulated in Transcription
  misc_feature: MA Experiment 20001761 PARAMETER Experiment Name: At_50mM_NH4NO3_L-to-H_P Parameter: Timepoint (hr) Value: 4
  misc_feature: MA Experiment 20001761 PARAMETER Experiment Name: At_50mM_NH4NO3_L-to-H_P Parameter: Tissue Value: Siliques
  misc_feature: MA Experiment 20001761 PARAMETER Experiment Name: At_50mM_NH4NO3_L-to-H_P Parameter: Treatment Value: 50mM NH4NO3 vs 100mM Mannitol
  misc_feature: MA Experiment ID: 20001904 Result: Up-regulated in Transcription
  misc_feature: MA Experiment 20001904 PARAMETER Experiment Name: At_Drought_Reproduction_P Parameter: Age (day) Value: 37
  misc_feature: MA Experiment 20001904 PARAMETER Experiment Name: At_Drought_Reproduction_P Parameter: Organism Value: A. thaliana
  misc_feature: MA Experiment 20001904 PARAMETER Experiment Name: At_Drought_Reproduction_P Parameter: Plant Line Value: WS
  misc_feature: MA Experiment 20001904 PARAMETER Experiment Name: At_Drought_Reproduction_P Parameter: Timepoint (day) Value: 7
  misc_feature: MA Experiment 20001904 PARAMETER Experiment Name: At_Drought_Reproduction_P Parameter: Tissue Value: Rosettes
  misc_feature: MA Experiment 20001904 PARAMETER Experiment Name: At_Drought_Reproduction_P Parameter: Treatment Value: Drought vs. No Drought
  misc_feature: MA Experiment ID: 20001906 Result: Up-regulated in Transcription
  misc_feature: MA Experiment 20001906 PARAMETER Experiment Name: At_Drought_Reproduction_P Parameter: Age (day) Value: 35
  misc_feature: MA Experiment 20001906 PARAMETER Experiment Name: At_Drought_Reproduction_P Parameter: Organism Value: A. thaliana
  misc_feature: MA Experiment 20001906 PARAMETER Experiment Name: At_Drought_Reproduction_P Parameter: Plant Line Value: WS
  misc_feature: MA Experiment 20001906 PARAMETER Experiment Name: At_Drought_Reproduction_P Parameter: Timepoint (day) Value: 5
  misc_feature: MA Experiment 20001906 PARAMETER Experiment Name: At_Drought_Reproduction_P Parameter: Tissue Value: Siliques
  misc_feature: MA Experiment 20001906 PARAMETER Experiment Name: At_Drought_Reproduction_P Parameter: Treatment Value: Drought vs. No Drought
  misc_feature: MA Experiment ID: 20001908 Result: Up-regulated in Transcription
  misc_feature: MA Experiment 20001908 PARAMETER Experiment Name: At_Drought_Reproduction_P Parameter: Age (day) Value: 40
  misc_feature: MA Experiment 20001908 PARAMETER Experiment Name: At_Drought_Reproduction_P Parameter: Organism Value: A. thaliana
  misc_feature: MA Experiment 20001908 PARAMETER Experiment Name: At_Drought_Reproduction_P Parameter: Plant Line Value: WS
  misc_feature: MA Experiment 20001908 PARAMETER Experiment Name: At_Drought_Reproduction_P Parameter: Timepoint (day) Value: 10
  misc_feature: MA Experiment 20001908 PARAMETER Experiment Name: At_Drought_Reproduction_P Parameter: Tissue Value: Siliques
  misc_feature: MA Experiment 20001908 PARAMETER Experiment Name: At_Drought_Reproduction_P Parameter: Treatment Value: Drought vs. No Drought
gaaaaatcaagaaatatggccacaagagcttctacatctagcagagtctctccagctttcactttcctcgtcatcttcttcctcttatctctcactgcttcagtagaagctgctggtcgtggagttaacaatgacaagaaaggcggcggattaggagcttctttcatattcggagattctctagtcgatgccggaaataataattatctatcgacgttgtctagggctaatatgaagcctaatggtattgatttcaaagcctccggaggaactcctaccggccggttcaccaatggacggaccatcggtgatatcgttggggaagaactcggatcagcgaactacgcgatcccgttcttggcaccagacgcgaagggaaaagctttattagccggagtgaactatgcatctggaggaggaggaatcatgaatgccaccgggagaatctttgtgaatagattaggtatggatgtacaagttgatttcttcaacactacacggaaacagtttgatgatctacttggaaaagagaaagcaaaagattacatagccaagaaatcgatattctcaatcactataggagcaaatgatttcctcaacaattatctattcccactactctcggtaggaacacggttcactcaaactcccgatgattttattggcgacatgcttgaacatctacgcgaccaactaaccaggctgtatcaattggatgcgaggaagtttgtgatcgggaacgttggaccgattggatgcataccgtaccagaaaacaatcaatcaattagacgaaaacgagtgtgtggatttggctaataaactagcaaatcaatacaatgttcggttaaagagtttattagaggaactaaacaagaaacttcccggagcaatgtttgtccatgcaaacgtctacgatctcgtcatggagctcattactaactacgataaatacgggttcaaaagtgcgacaaaggcttgttgcggtaatggaggacaatacgcgggtataattccgtgcggaccgacttcgagtttgtgtgaagagagggataaatatgtgttttgggatccttatcatccgagtgaagcagcaaatgtcatcatcgcgaagcaattgttatatggtgatgttaaagttatatctccagttaatctcagcaaacttagagatatgtgatttgattgtttgttgaactaaattaaatgtcccttggaggtatttatatacataatttgttatacgccaagttaagattactctttcactctttgtatatgtatgtgtgttggtcgtgtttgatttt

SEQ ID NO: 49291 - protein, 392 aa, Arabidopsis thaliana
  peptide (1)..(392): Ceres Seq. ID no. 13647618
  misc_feature (54)..(390): Homolog of NCBI NO: 21537293 NR Description: GDSL-motif lipase/hydrolase-like protein
  misc_feature (22)..(389): Homolog of NCBI NO: 15241626 NR Description: GDSL-motif lipase/hydrolase protein [Arabidopsis
  misc_feature (53)..(392): Homolog of NCBI NO: 32489520 NR Description: OSJNBa0043L24.11 [Oryza sativa (japonica
  misc_feature (48)..(155): Homolog of NCBI NO: 15234857 NR Description: GDSL-motif lipase/hydrolase protein [Arabidopsis
  misc_feature (236)..(392): Homolog of NCBI NO: 15234857 NR Description: GDSL-motif lipase/hydrolase protein [Arabidopsis
  misc_feature (54)..(392): Homolog of NCBI NO: 15238210 NR Description: GDSL-motif lipase/hydrolase protein [Arabidopsis
  misc_feature (55)..(389): Homolog of NCBI NO: 38345537 NR Description: OSJNBa0020J04.12 [Oryza sativa (japonica
  misc_feature (27)..(389): Homolog of NCBI NO: 34899288 NR Description: similar to GDSL-motif lipase/hydrolase
  misc_feature (23)..(392): Homolog of NCBI NO: 15229742 NR Description: GDSL-motif lipase/hydrolase protein [Arabidopsis
  misc_feature (6)..(392): Homolog of NCBI NO: 15227849 NR Description: GDSL-motif lipase/hydrolase protein [Arabidopsis
EKSRNMATRASTSSRVSPAFTFLVIFFLLSLTASVEAAGRGVNNDKKGGGLGASFIFGDSLVDAGNNNYLSTLSRANMKPNGIDFKASGGTPTGRFTNGRTIGDIVGEELGSANYAIPFLAPDAKGKALLAGVNYASGGGGIMNATGRIFVNRLGMDVQVDFFNTTRKQFDDLLGKEKAKDYIAKKSIFSITIGANDFLNNYLFPLLSVGTRFTQTPDDFIGDMLEHLRDQLTRLYQLDARKFVIGNVGPIGCIPYQKTINQLDENECVDLANKLANQYNVRLKSLLEELNKKLPGAMFVHANVYDLVMELITNYDKYGFKSATKACCGNGGQYAGIIPCGPTSSLCEERDKYVFWDPYHPSEAANVIIAKQLLYGDVKVISPVNLSKLRDM

SEQ ID NO: 49292 - protein, 387 aa, Arabidopsis thaliana
  peptide (1)..(387): Ceres Seq. ID no. 13647619
  misc_feature (49)..(385): Homolog of NCBI NO: 21537293 NR Description: GDSL-motif lipase/hydrolase-like protein
  misc_feature (17)..(384): Homolog of NCBI NO: 15241626 NR Description: GDSL-motif lipase/hydrolase protein [Arabidopsis
  misc_feature (48)..(387): Homolog of NCBI NO: 32489520 NR Description: OSJNBa0043L24.11 [Oryza sativa (japonica
  misc_feature (43)..(150): Homolog of NCBI NO: 15234857 NR Description: GDSL-motif lipase/hydrolase protein [Arabidopsis
  misc_feature (231)..(387): Homolog of NCBI NO: 15234857 NR Description: GDSL-motif lipase/hydrolase protein [Arabidopsis
  misc_feature (49)..(387): Homolog of NCBI NO: 15238210 NR Description: GDSL-motif lipase/hydrolase protein [Arabidopsis
  misc_feature (50)..(384): Homolog of NCBI NO: 38345537 NR Description: OSJNBa0020J04.12 [Oryza sativa (japonica
  misc_feature (22)..(384): Homolog of NCBI NO: 34899288 NR Description: similar to GDSL-motif lipase/hydrolase
  misc_feature (18)..(387): Homolog of NCBI NO: 15229742 NR Description: GDSL-motif lipase/hydrolase protein [Arabidopsis
  misc_feature (1)..(387): Homolog of NCBI NO: 15227849 NR Description: GDSL-motif lipase/hydrolase protein [Arabidopsis
MATRASTSSRVSPAFTFLVIFFLLSLTASVEAAGRGVNNDKKGGGLGASFIFGDSLVDAGNNNYLSTLSRANMKPNGIDFKASGGTPTGRFTNGRTIGDIVGEELGSANYAIPFLAPDAKGKALLAGVNYASGGGGIMNATGRIFVNRLGMDVQVDFFNTTRKQFDDLLGKEKAKDYIAKKSIFSITIGANDFLNNYLFPLLSVGTRFTQTPDDFIGDMLEHLRDQLTRLYQLDARKFVIGNVGPIGCIPYQKTINQLDENECVDLANKLANQYNVRLKSLLEELNKKLPGAMFVHANVYDLVMELITNYDKYGFKSATKACCGNGGQYAGIIPCGPTSSLCEERDKYVFWDPYHPSEAANVIIAKQLLYGDVKVISPVNLSKLRDM

SEQ ID NO: 49293 - protein, 315 aa, Arabidopsis thaliana
  peptide (1)..(315): Ceres Seq. ID no. 13647620
  misc_feature (1)..(313): Homolog of NCBI NO: 21537293 NR Description: GDSL-motif lipase/hydrolase-like protein
  misc_feature (1)..(312): Homolog of NCBI NO: 15241626 NR Description: GDSL-motif lipase/hydrolase protein [Arabidopsis
  misc_feature (1)..(315): Homolog of NCBI NO: 32489520 NR Description: OSJNBa0043L24.11 [Oryza sativa (japonica
  misc_feature (1)..(78): Homolog of NCBI NO: 15234857 NR Description: GDSL-motif lipase/hydrolase protein [Arabidopsis
  misc_feature (159)..(315): Homolog of NCBI NO: 15234857 NR Description: GDSL-motif lipase/hydrolase protein [Arabidopsis
  misc_feature (1)..(315): Homolog of NCBI NO: 15238210 NR Description: GDSL-motif lipase/hydrolase protein [Arabidopsis
  misc_feature (1)..(312): Homolog of NCBI NO: 38345537 NR Description: OSJNBa0020J04.12 [Oryza sativa (japonica
  misc_feature (1)..(312): Homolog of NCBI NO: 34899288 NR Description: similar to GDSL-motif lipase/hydrolase
  misc_feature (1)..(315): Homolog of NCBI NO: 15229742 NR Description: GDSL-motif lipase/hydrolase protein [Arabidopsis
  misc_feature (1)..(315): Homolog of NCBI NO: 15227849 NR Description: GDSL-motif lipase/hydrolase protein [Arabidopsis
MKPNGIDFKASGGTPTGRFTNGRTIGDIVGEELGSANYAIPFLAPDAKGKALLAGVNYASGGGGIMNATGRIFVNRLGMDVQVDFFNTTRKQFDDLLGKEKAKDYIAKKSIFSITIGANDFLNNYLFPLLSVGTRFTQTPDDFIGDMLEHLRDQLTRLYQLDARKFVIGNVGPIGCIPYQKTINQLDENECVDLANKLANQYNVRLKSLLEELNKKLPGAMFVHANVYDLVMELITNYDKYGFKSATKACCGNGGQYAGIIPCGPTSSLCEERDKYVFWDPYHPSEAANVIIAKQLLYGDVKVISPVNLSKLRDM

SEQ ID NO: 49294 - DNA, 2055 bp, Arabidopsis thaliana; identical to SEQ ID NO: 45977
  misc_feature (1)..(2055): Ceres Seq. ID no. 13576063
  misc_feature: MA Experiment ID: 20000182 Result: Up-regulated in Transcription
  misc_feature: MA Experiment 20000182 PARAMETER Experiment Name: At_2mM_SA_P Parameter: Age (day) Value: 14
  misc_feature: MA Experiment 20000182 PARAMETER Experiment Name: At_2mM_SA_P Parameter: Organism Value: A. thaliana
  misc_feature: MA Experiment 20000182 PARAMETER Experiment Name: At_2mM_SA_P Parameter: Plant Line Value: WS
  misc_feature: MA Experiment 20000182 PARAMETER Experiment Name: At_2mM_SA_P Parameter: Timepoint (hr) Value: 6
  misc_feature: MA Experiment 20000182 PARAMETER Experiment Name: At_2mM_SA_P Parameter: Tissue Value: Aerial
  misc_feature: MA Experiment 20000182 PARAMETER Experiment Name: At_2mM_SA_P Parameter: Treatment Value: 2mM SA vs. No Treatment
  misc_feature: MA Experiment ID: 20000439 Result: Down-regulated in Transcription
  misc_feature: MA Experiment 20000439 PARAMETER Experiment Name: At_Roots__P Parameter: Age (day) Value: 14 vs. 21
  misc_feature: MA Experiment 20000439 PARAMETER Experiment Name: At_Roots__P Parameter: Organism Value: A. thaliana
  misc_feature: MA Experiment 20000439 PARAMETER Experiment Name: At_Roots__P Parameter: Tissue Value: Roots vs. Whole Plant
  misc_feature: MA Experiment ID: 20000445 Result: Up-regulated in Transcription
  misc_feature: MA Experiment 20000445 PARAMETER Experiment Name: At_100uM_NAA__P Parameter: Age (day) Value: 14
  misc_feature: MA Experiment 20000445 PARAMETER Experiment Name: At_100uM_NAA__P Parameter: Organism Value: A. thaliana
  misc_feature: MA Experiment 20000445 PARAMETER Experiment Name: At_100uM_NAA__P Parameter: Plant Line Value: WS
  misc_feature: MA Experiment 20000445 PARAMETER Experiment Name: At_100uM_NAA__P Parameter: Timepoint (hr) Value: 6
  misc_feature: MA Experiment 20000445 PARAMETER Experiment Name: At_100uM_NAA__P Parameter: Tissue Value: Aerial
  misc_feature: MA Experiment 20000445 PARAMETER Experiment Name: At_100uM_NAA__P Parameter: Treatment Value: 100uM NAA vs. No Treatment
  misc_feature: MA Experiment ID: 20001451 Result: Down-regulated in Transcription
  misc_feature: MA Experiment 20001451 PARAMETER Experiment Name: At_Far-red-induction_P Parameter: Age (day) Value: 7
  misc_feature: MA Experiment 20001451 PARAMETER Experiment Name: At_Far-red-induction_P Parameter: Light Value: Far-red vs. White
  misc_feature: MA Experiment 20001451 PARAMETER Experiment Name: At_Far-red-induction_P Parameter: Organism Value: A. thaliana
  misc_feature: MA Experiment 20001451 PARAMETER Experiment Name: At_Far-red-induction_P Parameter: Plant Line Value: Columbia
  misc_feature: MA Experiment 20001451 PARAMETER Experiment Name: At_Far-red-induction_P Parameter: Timepoint (hr) Value: 24
  misc_feature: MA Experiment 20001451 PARAMETER Experiment Name: At_Far-red-induction_P Parameter: Tissue Value: Whole Plant

SEQ ID NO: 49295 - protein, 543 aa, Arabidopsis thaliana; identical to SEQ ID NO: 45978
  peptide (1)..(543): Ceres Seq. ID no. 13576064
  misc_feature (194)..(534): Pfam Name: Aminotransferase class I and II Pfam Description: Aminotransferase class I and II
  misc_feature (194)..(534): Pfam Name: Aminotransferase class I and II Pfam Description: Aminotransferase class I and II
  misc_feature (1)..(542): Homolog of NCBI NO: 24641760 NR Description: CG1640-PA [Drosophila melanogaster]
  misc_feature (66)..(543): Homolog of NCBI NO: 4730884 NR Description: alanine aminotransferase [Oryza sativa]
  misc_feature (66)..(543): Homolog of NCBI NO: 1703227 NR Description: ALANINE AMINOTRANSFERASE 2 (GPT)
  misc_feature (66)..(543): Homolog of NCBI NO: 3694807 NR Description: alanine aminotransferase [Zea mays]
  misc_feature (66)..(543): Homolog of NCBI NO: 461498 NR Description: ALANINE AMINOTRANSFERASE 2 (GPT)
  misc_feature (1)..(542): Homolog of NCBI NO: 24641760 NR Description: CG1640-PA [Drosophila melanogaster]
  misc_feature (66)..(543): Homolog of NCBI NO: 1703227 NR Description: ALANINE AMINOTRANSFERASE 2 (GPT)
  misc_feature (66)..(543): Homolog of NCBI NO: 461498 NR Description: ALANINE AMINOTRANSFERASE 2 (GPT)
  misc_feature (1)..(543): Homolog of NCBI NO: 9082270 NR Description: alanine aminotransferase [Arabidopsis thaliana]
  misc_feature (3)..(543): Homolog of NCBI NO: 21954071 NR Description: putative alanine aminotransferase [Arabidopsis
  misc_feature (75)..(543): Homolog of NCBI NO: 25287212 NR Description: hypothetical protein T13M22.3 [imported] -
  misc_feature (1)..(543): Homolog of NCBI NO: 30698866 NR Description: alanine aminotransferase, putative [Arabidopsis
  misc_feature (9)..(543): Homolog of NCBI NO: 21954069 NR Description: putative alanine aminotransferase [Arabidopsis
  misc_feature (66)..(543): Homolog of NCBI NO: 3694807 NR Description: alanine aminotransferase [Zea mays]
  misc_feature (66)..(543): Homolog of NCBI NO: 4730884 NR Description: alanine aminotransferase [Oryza sativa]
  misc_feature (9)..(543): Homolog of NCBI NO: 21954069 NR Description: putative alanine aminotransferase [Arabidopsis
  misc_feature (1)..(543): Homolog of NCBI NO: 30698866 NR Description: alanine aminotransferase, putative [Arabidopsis
  misc_feature (75)..(543): Homolog of NCBI NO: 25287212 NR Description: hypothetical protein T13M22.3 [imported] -
  misc_feature (3)..(543): Homolog of NCBI NO: 21954071 NR Description: putative alanine aminotransferase [Arabidopsis
  misc_feature (1)..(543): Homolog of NCBI NO: 9082270 NR Description: alanine aminotransferase [Arabidopsis thaliana]

SEQ ID NO: 49296 - protein, 489 aa, Arabidopsis thaliana; identical to SEQ ID NO: 45979
  peptide (1)..(489): Ceres Seq. ID no. 13576065
  misc_feature (140)..(480): Pfam Name: Aminotransferase class I and II Pfam Description: Aminotransferase class I and II
  misc_feature (140)..(480): Pfam Name: Aminotransferase class I and II Pfam Description: Aminotransferase class I and II
  misc_feature (1)..(488): Homolog of NCBI NO: 24641760 NR Description: CG1640-PA [Drosophila melanogaster]
  misc_feature (12)..(489): Homolog of NCBI NO: 4730884 NR Description: alanine aminotransferase [Oryza sativa]
  misc_feature (12)..(489): Homolog of NCBI NO: 1703227 NR Description: ALANINE AMINOTRANSFERASE 2 (GPT)
  misc_feature (12)..(489): Homolog of NCBI NO: 3694807 NR Description: alanine aminotransferase [Zea mays]
  misc_feature (12)..(489): Homolog of NCBI NO: 461498 NR Description: ALANINE AMINOTRANSFERASE 2 (GPT)
  misc_feature (1)..(488): Homolog of NCBI NO: 24641760 NR Description: CG1640-PA [Drosophila melanogaster]
  misc_feature (12)..(489): Homolog of NCBI NO: 1703227 NR Description: ALANINE AMINOTRANSFERASE 2 (GPT)
  misc_feature (12)..(489): Homolog of NCBI NO: 461498 NR Description: ALANINE AMINOTRANSFERASE 2 (GPT)
  misc_feature (1)..(489): Homolog of NCBI NO: 9082270 NR Description: alanine aminotransferase [Arabidopsis thaliana]
  misc_feature (1)..(489): Homolog of NCBI NO: 21954071 NR Description: putative alanine aminotransferase [Arabidopsis
  misc_feature (21)..(489): Homolog of NCBI NO: 25287212 NR Description: hypothetical protein T13M22.3 [imported] -
  misc_feature (1)..(489): Homolog of NCBI NO: 30698866 NR Description: alanine aminotransferase, putative [Arabidopsis
  misc_feature (1)..(489): Homolog of NCBI NO: 21954069 NR Description: putative alanine aminotransferase [Arabidopsis
  misc_feature (12)..(489): Homolog of NCBI NO: 3694807 NR Description: alanine aminotransferase [Zea mays]
  misc_feature (12)..(489): Homolog of NCBI NO: 4730884 NR Description: alanine aminotransferase [Oryza sativa]
  misc_feature (1)..(489): Homolog of NCBI NO: 21954069 NR Description: putative alanine aminotransferase [Arabidopsis
  misc_feature (1)..(489): Homolog of NCBI NO: 30698866 NR Description: alanine aminotransferase, putative [Arabidopsis
  misc_feature (21)..(489): Homolog of NCBI NO: 25287212 NR Description: hypothetical protein T13M22.3 [imported] -
  misc_feature (1)..(489): Homolog of NCBI NO: 21954071 NR Description: putative alanine aminotransferase [Arabidopsis
  misc_feature (1)..(489): Homolog of NCBI NO: 9082270 NR Description: alanine aminotransferase [Arabidopsis thaliana]

SEQ ID NO: 49297 - protein, 339 aa, Arabidopsis thaliana; identical to SEQ ID NO: 45980
  peptide (1)..(339): Ceres Seq. ID no. 13576066
  misc_feature (1)..(330): Pfam Name: Aminotransferase class I and II Pfam Description: Aminotransferase class I and II
  misc_feature (1)..(330): Pfam Name: Aminotransferase class I and II Pfam Description: Aminotransferase class I and II
  misc_feature (1)..(338): Homolog of NCBI NO: 24641760 NR Description: CG1640-PA [Drosophila melanogaster]
  misc_feature (1)..(339): Homolog of NCBI NO: 4730884 NR Description: alanine aminotransferase [Oryza sativa]
  misc_feature (1)..(339): Homolog of NCBI NO: 1703227 NR Description: ALANINE AMINOTRANSFERASE 2 (GPT)
  misc_feature (1)..(339): Homolog of NCBI NO: 3694807 NR Description: alanine aminotransferase [Zea mays]
  misc_feature (1)..(339): Homolog of NCBI NO: 461498 NR Description: ALANINE AMINOTRANSFERASE 2 (GPT)
  misc_feature (1)..(338): Homolog of NCBI NO: 24641760 NR Description: CG1640-PA [Drosophila melanogaster]
  misc_feature (1)..(339): Homolog of NCBI NO: 1703227 NR Description: ALANINE AMINOTRANSFERASE 2 (GPT)
  misc_feature (1)..(339): Homolog of NCBI NO: 461498 NR Description: ALANINE AMINOTRANSFERASE 2 (GPT)
  misc_feature (1)..(339): Homolog of NCBI NO: 9082270 NR Description: alanine aminotransferase [Arabidopsis thaliana]
  misc_feature (1)..(339): Homolog of NCBI NO: 21954071 NR Description: putative alanine aminotransferase [Arabidopsis
  misc_feature (1)..(339): Homolog of NCBI NO: 25287212 NR Description: hypothetical protein T13M22.3 [imported] -
  misc_feature (1)..(339): Homolog of NCBI NO: 30698866 NR Description: alanine aminotransferase, putative [Arabidopsis
  misc_feature (1)..(339): Homolog of NCBI NO: 21954069 NR Description: putative alanine aminotransferase [Arabidopsis
  misc_feature (1)..(339): Homolog of NCBI NO: 3694807 NR Description: alanine aminotransferase [Zea mays]
  misc_feature (1)..(339): Homolog of NCBI NO: 4730884 NR Description: alanine aminotransferase [Oryza sativa]
  misc_feature (1)..(339): Homolog of NCBI NO: 21954069 NR Description: putative alanine aminotransferase [Arabidopsis
  misc_feature (1)..(339): Homolog of NCBI NO: 30698866 NR Description: alanine aminotransferase, putative [Arabidopsis
  misc_feature (1)..(339): Homolog of NCBI NO: 25287212 NR Description: hypothetical protein T13M22.3 [imported] -
  misc_feature (1)..(339): Homolog of NCBI NO: 21954071 NR Description: putative alanine aminotransferase [Arabidopsis
  misc_feature (1)..(339): Homolog of NCBI NO: 9082270 NR Description: alanine aminotransferase [Arabidopsis thaliana]

SEQ ID NO: 49298 - DNA, 1498 bp, Arabidopsis thaliana
  misc_feature (1)..(1498): Ceres Seq. ID no. 13588542
  misc_feature: MA Experiment ID: 20000173 Result: Down-regulated in Transcription
  misc_feature: MA Experiment 20000173 PARAMETER Experiment Name: At_42deg_Heat_P Parameter: Age (day) Value: 14
  misc_feature: MA Experiment 20000173 PARAMETER Experiment Name: At_42deg_Heat_P Parameter: Organism Value: A. thaliana
  misc_feature: MA Experiment 20000173 PARAMETER Experiment Name: At_42deg_Heat_P Parameter: Plant Line Value: WS
  misc_feature: MA Experiment 20000173 PARAMETER Experiment Name: At_42deg_Heat_P Parameter: Temperature (deg C) Value: 42 vs. 22
  misc_feature: MA Experiment 20000173 PARAMETER Experiment Name: At_42deg_Heat_P Parameter: Timepoint (hr) Value: 6
  misc_feature: MA Experiment 20000173 PARAMETER Experiment Name: At_42deg_Heat_P Parameter: Tissue Value: Aerial
  misc_feature: MA Experiment ID: 20000180 Result: Up-regulated in Transcription
  misc_feature: MA Experiment 20000180 PARAMETER Experiment Name: At_Germinating_Seeds_P Parameter: Age (hr) Value: 24 vs. 0
  misc_feature: MA Experiment 20000180 PARAMETER Experiment Name: At_Germinating_Seeds_P Parameter: Tissue Value: Germinating Seeds
  misc_feature: MA Experiment ID: 20000182 Result: Down-regulated in Transcription
  misc_feature: MA Experiment 20000182 PARAMETER Experiment Name: At_2mM_SA_P Parameter: Age (day) Value: 14
  misc_feature: MA Experiment 20000182 PARAMETER Experiment Name: At_2mM_SA_P Parameter: Organism Value: A. thaliana
  misc_feature: MA Experiment 20000182 PARAMETER Experiment Name: At_2mM_SA_P Parameter: Plant Line Value: WS
  misc_feature: MA Experiment 20000182 PARAMETER Experiment Name: At_2mM_SA_P Parameter: Timepoint (hr) Value: 6
  misc_feature: MA Experiment 20000182 PARAMETER Experiment Name: At_2mM_SA_P Parameter: Tissue Value: Aerial
  misc_feature: MA Experiment 20000182 PARAMETER Experiment Name: At_2mM_SA_P Parameter: Treatment Value: 2mM SA vs. No Treatment
  misc_feature: MA Experiment ID: 20000184 Result: Down-regulated in Transcription
  misc_feature: MA Experiment 20000184 PARAMETER Experiment Name: At_Shoots__P Parameter: Age (day) Value: 7
  misc_feature: MA Experiment 20000184 PARAMETER Experiment Name: At_Shoots__P Parameter: Tissue Value: Shoots vs. Whole Plant
  misc_feature: MA Experiment ID: 20000234 Result: Up-regulated in Transcription
  misc_feature: MA Experiment 20000234 PARAMETER Experiment Name: At_Siliques_P Parameter: Age (day) Value: 21
  misc_feature: MA Experiment 20000234 PARAMETER Experiment Name: At_Siliques_P Parameter: Organism Value: A. thaliana
  misc_feature: MA Experiment 20000234 PARAMETER Experiment Name: At_Siliques_P Parameter: Plant Line Value: WS
  misc_feature: MA Experiment 20000234 PARAMETER Experiment Name: At_Siliques_P Parameter: Tissue Value: Less Than 5mm Siliques vs. Whole Plant
  misc_feature: MA Experiment ID: 20000264 Result: Up-regulated in Transcription
  misc_feature: MA Experiment 20000264 PARAMETER Experiment Name: At_Open_Flower_P Parameter: Age (day) Value: 21
  misc_feature: MA Experiment 20000264 PARAMETER Experiment Name: At_Open_Flower_P Parameter: Plant Line Value: WS
  misc_feature: MA Experiment 20000264 PARAMETER Experiment Name: At_Open_Flower_P Parameter: Tissue Value: Open Flower vs. Whole Plant
  misc_feature: MA Experiment ID: 20000265 Result: Up-regulated in Transcription
  misc_feature: MA Experiment 20000265 PARAMETER Experiment Name: At_Open_Flower_P Parameter: Age (day) Value: 21
  misc_feature: MA Experiment 20000265 PARAMETER Experiment Name: At_Open_Flower_P Parameter: Plant Line Value: WS
  misc_feature: MA Experiment 20000265 PARAMETER Experiment Name: At_Open_Flower_P Parameter: Tissue Value: Closed Flower vs. Whole Plant
  misc_feature: MA Experiment ID: 20000436 Result: Down-regulated in Transcription
  misc_feature: MA Experiment 20000436 PARAMETER Experiment Name: At_Drought_P Parameter: Age (day) Value: 7
  misc_feature: MA Experiment 20000436 PARAMETER Experiment Name: At_Drought_P Parameter: Organism Value: A. thaliana
  misc_feature: MA Experiment 20000436 PARAMETER Experiment Name: At_Drought_P Parameter: Plant Line Value: WS
  misc_feature: MA Experiment 20000436 PARAMETER Experiment Name: At_Drought_P Parameter: Timepoint (hr) Value: 12
  misc_feature: MA Experiment 20000436 PARAMETER Experiment Name: At_Drought_P Parameter: Tissue Value: Whole Plant
  misc_feature: MA Experiment 20000436 PARAMETER Experiment Name: At_Drought_P Parameter: Treatment Value: Drought vs. No Drought
  misc_feature: MA Experiment ID: 20000495 Result: Up-regulated in Transcription
  misc_feature: MA Experiment 20000495 PARAMETER Experiment Name: At_Guard_Cells_P Parameter: Harvest Date Value: 8/2/2002
  misc_feature: MA Experiment 20000495 PARAMETER Experiment Name: At_Guard_Cells_P Parameter: Organism Value: A. thaliana
  misc_feature: MA Experiment 20000495 PARAMETER Experiment Name: At_Guard_Cells_P Parameter: Tissue Value: Guard Cells vs. Leaves
  misc_feature: MA Experiment ID: 20000794 Result: Up-regulated in Transcription
  misc_feature: MA Experiment 20000794 PARAMETER Experiment Name: At_Petals_P Parameter: Age (day) Value: 23-25 days
  misc_feature: MA Experiment 20000794 PARAMETER Experiment Name: At_Petals_P Parameter: Plant Line Value: WS
  misc_feature: MA Experiment 20000794 PARAMETER Experiment Name: At_Petals_P Parameter: Tissue Value: Petals vs. Whole plant
  misc_feature: MA Experiment ID: 20001450 Result: Down-regulated in Transcription
  misc_feature: MA Experiment 20001450 PARAMETER Experiment Name: At_Far-red-induction_P Parameter: Age (day) Value: 7
  misc_feature: MA Experiment 20001450 PARAMETER Experiment Name: At_Far-red-induction_P Parameter: Light Value: Far-red vs. White
  misc_feature: MA Experiment 20001450 PARAMETER Experiment Name: At_Far-red-induction_P Parameter: Organism Value: A. thaliana
  misc_feature: MA Experiment 20001450 PARAMETER Experiment Name: At_Far-red-induction_P Parameter: Plant Line Value: Columbia
  misc_feature: MA Experiment 20001450 PARAMETER Experiment Name: At_Far-red-induction_P Parameter: Timepoint (hr) Value: 8
  misc_feature: MA Experiment 20001450 PARAMETER Experiment Name: At_Far-red-induction_P Parameter: Tissue Value: Whole Plant
  misc_feature: MA Experiment ID: 20001757 Result: Up-regulated in Transcription
  misc_feature: MA Experiment 20001757 PARAMETER Experiment Name: At_50mM_NH4NO3_L-to-H_P Parameter: Timepoint (hr) Value: 6
  misc_feature: MA Experiment 20001757 PARAMETER Experiment Name: At_50mM_NH4NO3_L-to-H_P Parameter: Tissue Value: Leaf
  misc_feature: MA Experiment 20001757 PARAMETER Experiment Name: At_50mM_NH4NO3_L-to-H_P Parameter: Treatment Value: 50mM NH4NO3 vs 100mM Mannitol
  misc_feature: MA Experiment ID: 20001906 Result: Down-regulated in Transcription
  misc_feature: MA Experiment 20001906 PARAMETER Experiment Name: At_Drought_Reproduction_P Parameter: Age (day) Value: 35
  misc_feature: MA Experiment 20001906 PARAMETER Experiment Name: At_Drought_Reproduction_P Parameter: Organism Value: A. thaliana
  misc_feature: MA Experiment 20001906 PARAMETER Experiment Name: At_Drought_Reproduction_P Parameter: Plant Line Value: WS
  misc_feature: MA Experiment 20001906 PARAMETER Experiment Name: At_Drought_Reproduction_P Parameter: Timepoint (day) Value: 5
  misc_feature: MA Experiment 20001906 PARAMETER Experiment Name: At_Drought_Reproduction_P Parameter: Tissue Value: Siliques
  misc_feature: MA Experiment 20001906 PARAMETER Experiment Name: At_Drought_Reproduction_P Parameter: Treatment Value: Drought vs. No Drought
atccttatcactcttcctcaaaacttcgaaaatgcatgcgatcgatttcaaagagattcaggagaagctctctgatggattccggccttggcaacgatcgtttcagttctgggctcgtgccactgatatctacaccggatacaaggtatttcaacttcgtatgaacttcgtcaaggatgttaataagcacgaggagatgtgggagagacaacatgaacttgctgctcataaagtttattctatgtgctctgaccttggtggtttcttccttaagattgcacaaattctagggaaacctgacttggctccagctgcttgggtgagaaaactcgtcactttgtgtgatcaagctcctgccacaccatttgatgccgttcgagttgtcctggagaaagagttaggtaaaagcatcgaacaagtgtttgaaacatttgatgagaagcctcttggctctgcttctattgctcaggtacaccgagcaagagtaaagggtgacaagagggatgttgttgtaaaggtccaacatcctggcgttgagaagttgatgatggttgatatcagaaacttgcaaatatttgcattatacatgcagaaaactgatatcaaatttgacttgttctccatgacaaaggaaatagagaagcagattgggtatgaattcgactttaaaagggaggccaatgcaatggagaagatccgacgttttctatatgataacaatagaaagagtcctgttctggttcccagggtgtttccaaatttggtgaccaggaaggttctggttatggaattcatgaacggaatcccgatcttgagccttggtgatgagatggcaaaaagagggataaatcctcatggtaaaatggcagaggcagcaaaattcaatatactacacagtttgtcccaagcatatggccaaatgatactgaagagtggtttctttcatgcggatccacatcctgggaatatcttgattggtaaaggttcagaggcaagtcatcttttgtttgtagttgcactgctggactatggtcaagtgaaagaactccctgaccacctgagacttggttatgcaaatttggtaattgccatcgctgataacaatgcgtcattggcgttacagagctttagggaacttggtatagctacagtagccaagtgtaagaatgagcaacaagagcttctccagttagcaaaaacaatgttcgacacagagatgcctcctggtacgacaactctgcaacctttctcagaagactcttcgatcaaaaagatttcggttgaggcatttccagaggaactcttctctgttcttcgcacagtagttctgttaagaggactcagcgtagggattggcattaattactcctgcgctcaacactggagggctatggcagaagaggctttgcatgcatctggaagactctcaacaggtagaaagcagaagcgtcgatgtagttctcttagaaggctatacccagggccaagagagagttaa

SEQ ID NO: 49299 - protein, 498 aa, Arabidopsis thaliana
  peptide (1)..(498): Ceres Seq. ID no. 13588543
  misc_feature (131)..(251): Pfam Name: ABC1 family Pfam Description: ABC1 family
  misc_feature (63)..(489): Homolog of NCBI NO: 39592068 NR Description: Hypothetical protein CBG23256 [Caenorhabditis
  misc_feature (2)..(478): Homolog of NCBI NO: 18420844 NR Description: expressed protein [Arabidopsis thaliana]
  misc_feature (326)..(478): Homolog of NCBI NO: 15234008 NR Description: hypothetical protein [Arabidopsis thaliana]
  misc_feature (453)..(498): Homolog of NCBI NO: 34907760 NR Description: ABC transporter-like protein
  misc_feature (17)..(428): Homolog of NCBI NO: 34907760 NR Description: ABC transporter-like protein
  misc_feature (11)..(335): Homolog of NCBI NO: 15234008 NR Description: hypothetical protein [Arabidopsis thaliana]
  misc_feature (378)..(479): Homolog of NCBI NO: 9758915 NR Description: contains similarity to ABC
  misc_feature (11)..(335): Homolog of NCBI NO: 9758915 NR Description: contains similarity to ABC
  misc_feature (378)..(494): Homolog of NCBI NO: 30695871 NR Description: expressed protein [Arabidopsis thaliana]
  misc_feature (11)..(335): Homolog of NCBI NO: 30695871 NR Description: expressed protein [Arabidopsis thaliana]
SLSLFLKTSKMHAIDFKEIQEKLSDGFRPWQRSFQFWARATDIYTGYKVFQLRMNFVKDVNKHEEMWERQHELAAHKVYSMCSDLGGFFLKIAQILGKPDLAPAAWVRKLVTLCDQAPATPFDAVRVVLEKELGKSIEQVFETFDEKPLGSASIAQVHRARVKGDKRDVVVKVQHPGVEKLMMVDIRNLQIFALYMQKTDIKFDLFSMTKEIEKQIGYEFDFKREANAMEKIRRFLYDNNRKSPVLVPRVFPNLVTRKVLVMEFMNGIPILSLGDEMAKRGINPHGKMAEAAKFNILHSLSQAYGQMILKSGFFHADPHPGNILIGKGSEASHLLFVVALLDYGQVKELPDHLRLGYANLVIAIADNNASLALQSFRELGIATVAKCKNEQQELLQLAKTMFDTEMPPGTTTLQPFSEDSSIKKISVEAFPEELFSVLRTVVLLRGLSVGIGINYSCAQHWRAMAEEALHASGRLSTGRKQKRRCSSLRRLYPGPRES

SEQ ID NO: 49300 - protein, 488 aa, Arabidopsis thaliana
  peptide (1)..(488): Ceres Seq. ID no. 13588544
  misc_feature (121)..(241): Pfam Name: ABC1 family Pfam Description: ABC1 family
  misc_feature (53)..(479): Homolog of NCBI NO: 39592068 NR Description: Hypothetical protein CBG23256 [Caenorhabditis
  misc_feature (1)..(468): Homolog of NCBI NO: 18420844 NR Description: expressed protein [Arabidopsis thaliana]
  misc_feature (316)..(468): Homolog of NCBI NO: 15234008 NR Description: hypothetical protein [Arabidopsis thaliana]
  misc_feature (443)..(488): Homolog of NCBI NO: 34907760 NR Description: ABC transporter-like protein
  misc_feature (7)..(418): Homolog of NCBI NO: 34907760 NR Description: ABC transporter-like protein
  misc_feature (1)..(325): Homolog of NCBI NO: 15234008 NR Description: hypothetical protein [Arabidopsis thaliana]
  misc_feature (368)..(469): Homolog of NCBI NO: 9758915 NR Description: contains similarity to ABC
  misc_feature (1)..(325): Homolog of NCBI NO: 9758915 NR Description: contains similarity to ABC
  misc_feature (368)..(484): Homolog of NCBI NO: 30695871 NR Description: expressed protein [Arabidopsis thaliana]
  misc_feature (1)..(325): Homolog of NCBI NO: 30695871 NR Description: expressed protein [Arabidopsis thaliana]
MHAIDFKEIQEKLSDGFRPWQRSFQFWARATDIYTGYKVFQLRMNFVKDVNKHEEMWERQHELAAHKVYSMCSDLGGFFLKIAQILGKPDLAPAAWVRKLVTLCDQAPATPFDAVRVVLEKELGKSIEQVFETFDEKPLGSASIAQVHRARVKGDKRDVVVKVQHPGVEKLMMVDIRNLQIFALYMQKTDIKFDLFSMTKEIEKQIGYEFDFKREANAMEKIRRFLYDNNRKSPVLVPRVFPNLVTRKVLVMEFMNGIPILSLGDEMAKRGINPHGKMAEAAKFNILHSLSQAYGQMILKSGFFHADPHPGNILIGKGSEASHLLFVVALLDYGQVKELPDHLRLGYANLVIAIADNNASLALQSFRELGIATVAKCKNEQQELLQLAKTMFDTEMPPGTTTLQPFSEDSSIKKISVEAFPEELFSVLRTVVLLRGLSVGIGINYSCAQHWRAMAEEALHASGRLSTGRKQKRRCSSLRRLYPGPRES

SEQ ID NO: 49301 - protein, 445 aa, Arabidopsis thaliana
  peptide (1)..(445): Ceres Seq. ID no. 13588545
  misc_feature (78)..(198): Pfam Name: ABC1 family Pfam Description: ABC1 family
  misc_feature (10)..(436): Homolog of NCBI NO: 39592068 NR Description: Hypothetical protein CBG23256 [Caenorhabditis
  misc_feature (1)..(425): Homolog of NCBI NO: 18420844 NR Description: expressed protein [Arabidopsis thaliana]
  misc_feature (273)..(425): Homolog of NCBI NO: 15234008 NR Description: hypothetical protein [Arabidopsis thaliana]
  misc_feature (400)..(445): Homolog of NCBI NO: 34907760 NR Description: ABC transporter-like protein
  misc_feature (1)..(375): Homolog of NCBI NO: 34907760 NR Description: ABC transporter-like protein
  misc_feature (1)..(282): Homolog of NCBI NO: 15234008 NR Description: hypothetical protein [Arabidopsis thaliana]
  misc_feature (325)..(426): Homolog of NCBI NO: 9758915 NR Description: contains similarity to ABC
  misc_feature (1)..(282): Homolog of NCBI NO: 9758915 NR Description: contains similarity to ABC
  misc_feature (325)..(441): Homolog of NCBI NO: 30695871 NR Description: expressed protein [Arabidopsis thaliana]
  misc_feature (1)..(282): Homolog of NCBI NO: 30695871 NR Description: expressed protein [Arabidopsis thaliana]
MNFVKDVNKHEEMWERQHELAAHKVYSMCSDLGGFFLKIAQILGKPDLAPAAWVRKLVTLCDQAPATPFDAVRVVLEKELGKSIEQVFETFDEKPLGSASIAQVHRARVKGDKRDVVVKVQHPGVEKLMMVDIRNLQIFALYMQKTDIKFDLFSMTKEIEKQIGYEFDFKREANAMEKIRRFLYDNNRKSPVLVPRVFPNLVTRKVLVMEFMNGIPILSLGDEMAKRGINPHGKMAEAAKFNILHSLSQAYGQMILKSGFFHADPHPGNILIGKGSEASHLLFVVALLDYGQVKELPDHLRLGYANLVIAIADNNASLALQSFRELGIATVAKCKNEQQELLQLAKTMFDTEMPPGTTTLQPFSEDSSIKKISVEAFPEELFSVLRTVVLLRGLSVGIGINYSCAQHWRAMAEEALHASGRLSTGRKQKRRCSSLRRLYPGPRES

SEQ ID NO: 49302 - DNA, 1241 bp, Arabidopsis thaliana
  misc_feature (1)..(1241): Ceres Seq. ID no. 12591132
  misc_feature: MA Experiment ID: 20000306 Result: Up-regulated in Transcription
  misc_feature: MA Experiment 20000306 PARAMETER Experiment Name: At_Germinating_Seeds_Sub_P Parameter: Age (hr) Value: 6 vs. 0
  misc_feature: MA Experiment 20000306 PARAMETER Experiment Name: At_Germinating_Seeds_Sub_P Parameter: Organism Value: A. thaliana
  misc_feature: MA Experiment 20000306 PARAMETER Experiment Name: At_Germinating_Seeds_Sub_P Parameter: Plant Line Value: WS
  misc_feature: MA Experiment 20000306 PARAMETER Experiment Name: At_Germinating_Seeds_Sub_P Parameter: Tissue Value: Germinating Seeds
  misc_feature: MA Experiment ID: 20000307 Result: Up-regulated in Transcription
  misc_feature: MA Experiment 20000307 PARAMETER Experiment Name: At_Germinating_Seeds_Sub_P Parameter: Age (hr) Value: 24 vs. 0
  misc_feature: MA Experiment 20000307 PARAMETER Experiment Name: At_Germinating_Seeds_Sub_P Parameter: Organism Value: A. thaliana
  misc_feature: MA Experiment 20000307 PARAMETER Experiment Name: At_Germinating_Seeds_Sub_P Parameter: Plant Line Value: WS
  misc_feature: MA Experiment 20000307 PARAMETER Experiment Name: At_Germinating_Seeds_Sub_P Parameter: Tissue Value: Germinating Seeds
  misc_feature: MA Experiment ID: 20000315 Result: Down-regulated in Transcription
  misc_feature: MA Experiment 20000315 PARAMETER Experiment Name: At_14day_Shoots-Roots_Sub_P Parameter: Age (day) Value: 14
  misc_feature: MA Experiment 20000315 PARAMETER Experiment Name: At_14day_Shoots-Roots_Sub_P Parameter: Organism Value: A. thaliana
  misc_feature: MA Experiment 20000315 PARAMETER Experiment Name: At_14day_Shoots-Roots_Sub_P Parameter: Plant Line Value: WS
  misc_feature: MA Experiment 20000315 PARAMETER Experiment Name: At_14day_Shoots-Roots_Sub_P Parameter: Tissue Value: Shoots vs. Whole Plant
  misc_feature: MA Experiment ID: 20000329 Result: Down-regulated in Transcription
  misc_feature: MA Experiment 20000329 PARAMETER Experiment Name: At_4deg_Cold_Sub_P Parameter: Age (day) Value: 14
  misc_feature: MA Experiment 20000329 PARAMETER Experiment Name: At_4deg_Cold_Sub_P Parameter: Organism Value: A. thaliana
  misc_feature: MA Experiment 20000329 PARAMETER Experiment Name: At_4deg_Cold_Sub_P Parameter: Plant Line Value: WS
  misc_feature: MA Experiment 20000329 PARAMETER Experiment Name: At_4deg_Cold_Sub_P Parameter: Temperature (deg C) Value: 4 vs. 22
  misc_feature: MA Experiment 20000329 PARAMETER Experiment Name: At_4deg_Cold_Sub_P Parameter: Timepoint (hr) Value: 6
  misc_feature: MA Experiment 20000329 PARAMETER Experiment Name: At_4deg_Cold_Sub_P Parameter: Tissue Value: Aerial
  misc_feature: MA Experiment ID: 20000347 Result: Up-regulated in Transcription
  misc_feature: MA Experiment 20000347 PARAMETER Experiment Name: At_2mM_SA_Sub_P Parameter: Age (day) Value: 14
  misc_feature: MA Experiment 20000347 PARAMETER Experiment Name: At_2mM_SA_Sub_P Parameter: Organism Value: A. thaliana
  misc_feature: MA Experiment 20000347 PARAMETER Experiment Name: At_2mM_SA_Sub_P Parameter: Plant Line Value: WS
  misc_feature: MA Experiment 20000347 PARAMETER Experiment Name: At_2mM_SA_Sub_P Parameter: Timepoint (hr) Value: 6
  misc_feature: MA Experiment 20000347 PARAMETER Experiment Name: At_2mM_SA_Sub_P Parameter: Tissue Value: Aerial
  misc_feature: MA Experiment 20000347 PARAMETER Experiment Name: At_2mM_SA_Sub_P Parameter: Treatment Value: 2mM SA vs. No Treatment
  misc_feature: MA Experiment ID: 20000355 Result: Down-regulated in Transcription
  misc_feature: MA Experiment 20000355 PARAMETER Experiment Name: At_Siliques_Sub_P Parameter: Age (day) Value: 21
  misc_feature: MA Experiment 20000355 PARAMETER Experiment Name: At_Siliques_Sub_P Parameter: Organism Value: A. thaliana
  misc_feature: MA Experiment 20000355 PARAMETER Experiment Name: At_Siliques_Sub_P Parameter: Plant Line Value: WS
  misc_feature: MA Experiment 20000355 PARAMETER Experiment Name: At_Siliques_Sub_P Parameter: Tissue Value: Less Than 5mm Siliques vs. Whole Plant
acggcttcttcttcttctcgctgacgctctttctccgtcaattctcttcgaagatcgttttgatccaagagagaattctctgagagattgagaggggaagagaaattcttcgatccatagagagataattctctttgaacatcgatccatagagagatatgcaaaccatctcgaaagcttcttctgccacctccttttttcgatgttctaggaagctatcaagccagccatgtgtgagacagcttaacataagaaagagtcttgtgtgcagagtgatgaagctggtctcttcacctcttaggactttgcgtggtgctggtaaatctatccgagtttcaaagttctgcagtgtctccaatgtctcctcattgcaaattgaactggtgccttgccttaaggataactatgcttatatcttgcatgacgaggatactggtacagttggggtggttgacccttctgaagctgaacctattatcgattcgttgaagaggagtggtcgtaatctaacatatatattaaatacacatcatcattatgatcacactggtgggaatttggaattaaaagacaggtacggggcaaaggtgattggctcagctatggataaagaccggattcctggaattgatatggccttgaaggatggtgacaaatggatgtttgctggccatgaagtccatgttatggatactcctggccacacaaaaggccatatcagcttatactttccaggatcacgagcgatcttcaccggggacacgatgtttagcttatcatgtggtaaactctttgaaggcactcctaagcagatgcttgcttctctccaaaagatcacatctttaccagatgacacaagcatatactgtggtcatgaatatacactgagtaattccaagtttgcgttgtctctagagccaaacaacgaagtacttcagtcctatgcagctcatgttgcagagctccgaagcaagaaattaccaacgattccgacaacagtgaagatggagaaagcttgtaaccccttcctccgcagctcaaatacagatatccgtcgggctttacgcattccagaggccgcagatgaagcagaagctttagggattatccggaaagcaaaggatgatttctaagcttaggctttttctgaggtaaacctttggtttgcttatgtagtcctcaaatgagtgtgcaccctttgactttgacgttttataaaaaaaaatacaaatacaaaacct

SEQ ID NO: 49303 - protein, 324 aa, Arabidopsis thaliana
  peptide (1)..(324): Ceres Seq. ID no. 12591133
  misc_feature (81)..(239): Pfam Name: Metallo-beta-lactamase superfamily Pfam Description: Metallo-beta-lactamase superfamily
  misc_feature (55)..(324): Homolog of NCBI NO: 10334501 NR Description: putative mitochondrial glyoxalase II [Cicer
  misc_feature (1)..(324): Homolog of NCBI NO: 21070362 NR Description: glyoxalase II [Pennisetum glaucum]
  misc_feature (1)..(324): Homolog of NCBI NO: 16209608 NR Description: glyoxalase II [Oryza sativa]
  misc_feature (1)..(324): Homolog of NCBI NO: 2570340 NR Description: glyoxalase II mitochondrial isozyme [Arabidopsis
  misc_feature (1)..(324): Homolog of NCBI NO: 18406237 NR Description: glyoxalase II (hydroxyacylglutathione
  misc_feature (23)..(324): Homolog of NCBI NO: 25406895 NR Description: hypothetical protein [imported] - Arabidopsis
  misc_feature (1)..(324): Homolog of NCBI NO: 30679573 NR Description: glyoxalase II, putative (hydroxyacylglutathione
  misc_feature (1)..(324): Homolog of NCBI NO: 18390616 NR Description: glyoxalase II, putative (hydroxyacylglutathione
  misc_feature (1)..(324): Homolog of NCBI NO: 30684920 NR Description: glyoxalase II, putative (hydroxyacylglutathione
  misc_feature (1)..(324): Homolog of NCBI NO: 15224661 NR Description: glyoxalase II, putative (hydroxyacylglutathione
MQTISKASSATSFFRCSRKLSSQPCVRQLNIRKSLVCRVMKLVSSPLRTLRGAGKSIRVSKFCSVSNVSSLQIELVPCLKDNYAYILHDEDTGTVGVVDPSEAEPIIDSLKRSGRNLTYILNTHHHYDHTGGNLELKDRYGAKVIGSAMDKDRIPGIDMALKDGDKWMFAGHEVHVMDTPGHTKGHISLYFPGSRAIFTGDTMFSLSCGKLFEGTPKQMLASLQKITSLPDDTSIYCGHEYTLSNSKFALSLEPNNEVLQSYAAHVAELRSKKLPTIPTTVKMEKACNPFLRSSNTDIRRALRIPEAADEAEALGIIRKAKDDF

SEQ ID NO: 49304 - protein, 285 aa, Arabidopsis thaliana
  peptide (1)..(285): Ceres Seq. ID no. 12591134
  misc_feature (42)..(200): Pfam Name: Metallo-beta-lactamase superfamily Pfam Description: Metallo-beta-lactamase superfamily
  misc_feature (16)..(285): Homolog of NCBI NO: 10334501 NR Description: putative mitochondrial glyoxalase II [Cicer
  misc_feature (1)..(285): Homolog of NCBI NO: 21070362 NR Description: glyoxalase II [Pennisetum glaucum]
  misc_feature (1)..(285): Homolog of NCBI NO: 16209608 NR Description: glyoxalase II [Oryza sativa]
  misc_feature (1)..(285): Homolog of NCBI NO: 2570340 NR Description: glyoxalase II mitochondrial isozyme [Arabidopsis
  misc_feature (1)..(285): Homolog of NCBI NO: 18406237 NR Description: glyoxalase II (hydroxyacylglutathione
  misc_feature (1)..(285): Homolog of NCBI NO: 25406895 NR Description: hypothetical protein [imported] - Arabidopsis
  misc_feature (1)..(285): Homolog of NCBI NO: 30679573 NR Description: glyoxalase II, putative (hydroxyacylglutathione
  misc_feature (1)..(285): Homolog of NCBI NO: 18390616 NR Description: glyoxalase II, putative (hydroxyacylglutathione
  misc_feature (1)..(285): Homolog of NCBI NO: 30684920 NR Description: glyoxalase II, putative (hydroxyacylglutathione
  misc_feature (1)..(285): Homolog of NCBI NO: 15224661 NR Description: glyoxalase II, putative (hydroxyacylglutathione
MKLVSSPLRTLRGAGKSIRVSKFCSVSNVSSLQIELVPCLKDNYAYILHDEDTGTVGVVDPSEAEPIIDSLKRSGRNLTYILNTHHHYDHTGGNLELKDRYGAKVIGSAMDKDRIPGIDMALKDGDKWMFAGHEVHVMDTPGHTKGHISLYFPGSRAIFTGDTMFSLSCGKLFEGTPKQMLASLQKITSLPDDTSIYCGHEYTLSNSKFALSLEPNNEVLQSYAAHVAELRSKKLPTIPTTVKMEKACNPFLRSSNTDIRRALRIPEAADEAEALGIIRKAKDDF

SEQ ID NO: 49305 - protein, 176 aa, Arabidopsis thaliana
  peptide (1)..(176): Ceres Seq. ID no. 12591135
  misc_feature (1)..(91): Pfam Name: Metallo-beta-lactamase superfamily Pfam Description: Metallo-beta-lactamase superfamily
  misc_feature (1)..(176): Homolog of NCBI NO: 10334501 NR Description: putative mitochondrial glyoxalase II [Cicer
  misc_feature (1)..(176): Homolog of NCBI NO: 21070362 NR Description: glyoxalase II [Pennisetum glaucum]
  misc_feature (1)..(176): Homolog of NCBI NO: 16209608 NR Description: glyoxalase II [Oryza sativa]
  misc_feature (1)..(176): Homolog of NCBI NO: 2570340 NR Description: glyoxalase II mitochondrial isozyme [Arabidopsis
  misc_feature (1)..(176): Homolog of NCBI NO: 18406237 NR Description: glyoxalase II (hydroxyacylglutathione
  misc_feature (1)..(176): Homolog of NCBI NO: 25406895 NR Description: hypothetical protein [imported] - Arabidopsis
  misc_feature (1)..(176): Homolog of NCBI NO: 30679573 NR Description: glyoxalase II, putative (hydroxyacylglutathione
  misc_feature (1)..(176): Homolog of NCBI NO: 18390616 NR Description: glyoxalase II, putative (hydroxyacylglutathione
  misc_feature (1)..(176): Homolog of NCBI NO: 30684920 NR Description: glyoxalase II, putative (hydroxyacylglutathione
  misc_feature (1)..(176): Homolog of NCBI NO: 15224661 NR Description: glyoxalase II, putative (hydroxyacylglutathione
MDKDRIPGIDMALKDGDKWMFAGHEVHVMDTPGHTKGHISLYFPGSRAIFTGDTMFSLSCGKLFEGTPKQMLASLQKITSLPDDTSIYCGHEYTLSNSKFALSLEPNNEVLQSYAAHVAELRSKKLPTIPTTVKMEKACNPFLRSSNTDIRRALRIPEAADEAEALGIIRKAKDDF

SEQ ID NO: 49306 - DNA, 1170 bp, Arabidopsis thaliana
  misc_feature (1)..(1170): Ceres Seq. ID no. 13588546
  misc_feature: MA Experiment ID: 20000173 Result: Down-regulated in Transcription
  misc_feature: MA Experiment 20000173 PARAMETER Experiment Name: At_42deg_Heat_P Parameter: Age (day) Value: 14
  misc_feature: MA Experiment 20000173 PARAMETER Experiment Name: At_42deg_Heat_P Parameter: Organism Value: A. thaliana
  misc_feature: MA Experiment 20000173 PARAMETER Experiment Name: At_42deg_Heat_P Parameter: Plant Line Value: WS
  misc_feature: MA Experiment 20000173 PARAMETER Experiment Name: At_42deg_Heat_P Parameter: Temperature (deg C) Value: 42 vs. 22
  misc_feature: MA Experiment 20000173 PARAMETER Experiment Name: At_42deg_Heat_P Parameter: Timepoint (hr) Value: 6
  misc_feature: MA Experiment 20000173 PARAMETER Experiment Name: At_42deg_Heat_P Parameter: Tissue Value: Aerial
  misc_feature: MA Experiment ID: 20000179 Result: Up-regulated in Transcription
  misc_feature: MA Experiment 20000179 PARAMETER Experiment Name: At_Germinating_Seeds_P Parameter: Age (hr) Value: 6 vs. 0
  misc_feature: MA Experiment 20000179 PARAMETER Experiment Name: At_Germinating_Seeds_P Parameter: Tissue Value: Germinating Seeds
  misc_feature: MA Experiment ID: 20000180 Result: Up-regulated in Transcription
  misc_feature: MA Experiment 20000180 PARAMETER Experiment Name: At_Germinating_Seeds_P Parameter: Age (hr) Value: 24 vs. 0
  misc_feature: MA Experiment 20000180 PARAMETER Experiment Name: At_Germinating_Seeds_P Parameter: Tissue Value: Germinating Seeds
  misc_feature: MA Experiment ID: 20000185 Result: Up-regulated in Transcription
  misc_feature: MA Experiment 20000185 PARAMETER Experiment Name: At_Roots__P Parameter: Age (day) Value: 7 vs. 21
  misc_feature: MA Experiment 20000185 PARAMETER Experiment Name: At_Roots__P Parameter: Organism Value: A. thaliana
  misc_feature: MA Experiment 20000185 PARAMETER Experiment Name: At_Roots__P Parameter: Tissue Value: Roots vs. Whole Plant
  misc_feature: MA Experiment ID: 20000234 Result: Up-regulated in Transcription
  misc_feature: MA Experiment 20000234 PARAMETER Experiment Name: At_Siliques_P Parameter: Age (day) Value: 21
  misc_feature: MA Experiment 20000234 PARAMETER Experiment Name: At_Siliques_P Parameter: Organism Value: A. thaliana
  misc_feature: MA Experiment 20000234 PARAMETER Experiment Name: At_Siliques_P Parameter: Plant Line Value: WS
  misc_feature: MA Experiment 20000234 PARAMETER Experiment Name: At_Siliques_P Parameter: Tissue Value: Less Than 5mm Siliques vs. Whole Plant
  misc_feature: MA Experiment ID: 20000235 Result: Up-regulated in Transcription
  misc_feature: MA Experiment 20000235 PARAMETER Experiment Name: At_Siliques_P Parameter: Age (day) Value: 21
  misc_feature: MA Experiment 20000235 PARAMETER Experiment Name: At_Siliques_P Parameter: Organism Value: A. thaliana
  misc_feature: MA Experiment 20000235 PARAMETER Experiment Name: At_Siliques_P Parameter: Plant Line Value: WS
  misc_feature: MA Experiment 20000235 PARAMETER Experiment Name: At_Siliques_P Parameter: Tissue Value: 5-10mm Siliques vs. Whole Plant
  misc_feature: MA Experiment ID: 20000439 Result: Up-regulated in Transcription
  misc_feature: MA Experiment 20000439 PARAMETER Experiment Name: At_Roots__P Parameter: Age (day) Value: 14 vs. 21
  misc_feature: MA Experiment 20000439 PARAMETER Experiment Name: At_Roots__P Parameter: Organism Value: A. thaliana
  misc_feature: MA Experiment 20000439 PARAMETER Experiment Name: At_Roots__P Parameter: Tissue Value: Roots vs. Whole Plant
  misc_feature: MA Experiment ID: 20001911 Result: Down-regulated in Transcription
  misc_feature: MA Experiment 20001911 PARAMETER Experiment Name: At_Drought_Reproduction_P Parameter: Age (day) Value: 40
  misc_feature: MA Experiment 20001911 PARAMETER Experiment Name: At_Drought_Reproduction_P Parameter: Organism Value: A. thaliana
  misc_feature: MA Experiment 20001911 PARAMETER Experiment Name: At_Drought_Reproduction_P Parameter: Plant Line Value: WS
  misc_feature: MA Experiment 20001911 PARAMETER Experiment Name: At_Drought_Reproduction_P Parameter: Timepoint (day) Value: 10
  misc_feature: MA Experiment 20001911 PARAMETER Experiment Name: At_Drought_Reproduction_P Parameter: Tissue Value: Flowers
  misc_feature: MA Experiment 20001911 PARAMETER Experiment Name: At_Drought_Reproduction_P Parameter: Treatment Value: Drought vs. No Drought
atgggtgagacgcagaagattttgcaagggccacgtcaccacacatctctgaagaagcccttatgggttgttttgacagtctcagtgaccagcatgcttctaatctgtactcacatgtatccaaaacatggcaagagctcctcgtgtcacggcctctatagcaccagaggctgtgaggatgctctctctaagtggctacctgttcatgtcaggaaattcactgatgaggagatagcagctcgagcagtggttagagacatactaagaacgcctcccttcataaccaataactccaaaatcgctttcttgttcttgactcccggtactttgccatttgagaagctctgggatgaatttttcaagggtcatgaagggaaattctcgatatatatccacccgtcaaaggaacgaccagttcacatcagccgtcacttttctgatcgagagattcacagtgatgaggttacttggggaaggatttctatggttgatgctgagaagcggttactggttagcgctcttgaagatcctgacaaccaacactttgttcttgtttcagagagttgtattccgttgcatacttttgactacacttatagatatttgttgtactccaacgttagcttcattgagagttttgtggatccgggtccacatggaaccggtagacatatggaacacatgttaccagaaatcgccaaggaagattttagaaagggtgctcagtggttcacaatgaagcgacaacacgcgattatagtgatggccgatggtctttactactcaaaattccgcgagtattgtggacctggaatagaggccgacaagaactgcattgccgatgaacattacttgccaacattcttcaatatgattgatcccatggggatctcaaattggtcagtgacgtttgttgattggtctgaacgaaggtggcatccaaagacatacggaggaaacgagatttcattagaatttatgaaaaatgtcacatccgaggacatgagtgtacatgtcaccagtgtggggaagcatggagatgagctgcattggccttgtacatggaacgggattaaacggccttgctatctatttgcaagaaagttccatcctgatactctcgacacattggtcaacctcttcccaaactacacaaacacagctgtctga

SEQ ID NO: 49307 - protein, 389 aa, Arabidopsis thaliana
  peptide (1)..(389): Ceres Seq. ID no. 15220890
  misc_feature (133)..(244): Pfam Name: Arabidopsis protein of unknown function, DUF266 Pfam Description: Arabidopsis protein of unknown function, DUF266
  misc_feature (12)..(386): Homolog of NCBI NO: 26452247 NR Description: unknown protein [Arabidopsis thaliana]
  misc_feature (6)..(385): Homolog of NCBI NO: 38637182 NR Description: unknown protein [Oryza sativa (japonica
  misc_feature (11)..(385): Homolog of NCBI NO: 38346557 NR Description: OSJNBa0035M09.18 [Oryza sativa (japonica
  misc_feature (8)..(341): Homolog of NCBI NO: 7487281 NR Description: hypothetical protein T20K24.18 - Arabidopsis
  misc_feature (8)..(386): Homolog of NCBI NO: 30680587 NR Description: expressed protein [Arabidopsis thaliana]
  misc_feature (18)..(387): Homolog of NCBI NO: 22329024 NR Description: expressed protein [Arabidopsis thaliana]
  misc_feature (1)..(344): Homolog of NCBI NO: 8777360 NR Description: gene_id:MJB24.8~pir||T04241~strong similarity to
  misc_feature (1)..(389): Homolog of NCBI NO: 17065016 NR Description: Unknown protein [Arabidopsis thaliana]
  misc_feature (1)..(389): Homolog of NCBI NO: 22327910 NR Description: expressed protein [Arabidopsis thaliana]
  misc_feature (1)..(389): Homolog of NCBI NO: 15236024 NR Description: expressed protein [Arabidopsis thaliana]
MGETQKILQGPRHHTSLKKPLWVVLTVSVTSMLLICTHMYPKHGKSSSCHGLYSTRGCEDALSKWLPVHVRKFTDEEIAARAVVRDILRTPPFITNNSKIAFLFLTPGTLPFEKLWDEFFKGHEGKFSIYIHPSKERPVHISRHFSDREIHSDEVTWGRISMVDAEKRLLVSALEDPDNQHFVLVSESCIPLHTFDYTYRYLLYSNVSFIESFVDPGPHGTGRHMEHMLPEIAKEDFRKGAQWFTMKRQHAIIVMADGLYYSKFREYCGPGIEADKNCIADEHYLPTFFNMIDPMGISNWSVTFVDWSERRWHPKTYGGNEISLEFMKNVTSEDMSVHVTSVGKHGDELHWPCTWNGIKRPCYLFARKFHPDTLDTLVNLFPNYTNTAV

SEQ ID NO: 49308 - protein, 358 aa, Arabidopsis thaliana
  peptide (1)..(358): Ceres Seq. ID no. 15220891
  misc_feature (102)..(213): Pfam Name: Arabidopsis protein of unknown function, DUF266 Pfam Description: Arabidopsis protein of unknown function, DUF266
  misc_feature (1)..(355): Homolog of NCBI NO: 26452247 NR Description: unknown protein [Arabidopsis thaliana]
  misc_feature (1)..(354): Homolog of NCBI NO: 38637182 NR Description: unknown protein [Oryza sativa (japonica
  misc_feature (1)..(354): Homolog of NCBI NO: 38346557 NR Description: OSJNBa0035M09.18 [Oryza sativa (japonica
  misc_feature (1)..(310): Homolog of NCBI NO: 7487281 NR Description: hypothetical protein T20K24.18 - Arabidopsis
  misc_feature (1)..(355): Homolog of NCBI NO: 30680587 NR Description: expressed protein [Arabidopsis thaliana]
  misc_feature (1)..(356): Homolog of NCBI NO: 22329024 NR Description: expressed protein [Arabidopsis thaliana]
  misc_feature (1)..(313): Homolog of NCBI NO: 8777360 NR Description: gene_id:MJB24.8~pir||T04241~strong similarity to
  misc_feature (1)..(358): Homolog of NCBI NO: 17065016 NR Description: Unknown protein [Arabidopsis thaliana]
  misc_feature (1)..(358): Homolog of NCBI NO: 22327910 NR Description: expressed protein [Arabidopsis thaliana]
  misc_feature (1)..(358): Homolog of NCBI NO: 15236024 NR Description: expressed protein [Arabidopsis thaliana]
MLLICTHMYPKHGKSSSCHGLYSTRGCEDALSKWLPVHVRKFTDEEIAARAVVRDILRTPPFITNNSKIAFLFLTPGTLPFEKLWDEFFKGHEGKFSIYIHPSKERPVHISRHFSDREIHSDEVTWGRISMVDAEKRLLVSALEDPDNQHFVLVSESCIPLHTFDYTYRYLLYSNVSFIESFVDPGPHGTGRHMEHMLPEIAKEDFRKGAQWFTMKRQHAIIVMADGLYYSKFREYCGPGIEADKNCIADEHYLPTFFNMIDPMGISNWSVTFVDWSERRWHPKTYGGNEISLEFMKNVTSEDMSVHVTSVGKHGDELHWPCTWNGIKRPCYLFARKFHPDTLDTLVNLFPNYTNTAV

SEQ ID NO: 49309 - protein, 351 aa, Arabidopsis thaliana
  peptide (1)..(351): Ceres Seq. ID no. 15220892
  misc_feature (95)..(206): Pfam Name: Arabidopsis protein of unknown function, DUF266 Pfam Description: Arabidopsis protein of unknown function, DUF266
  misc_feature (1)..(348): Homolog of NCBI NO: 26452247 NR Description: unknown protein [Arabidopsis thaliana]
  misc_feature (1)..(347): Homolog of NCBI NO: 38637182 NR Description: unknown protein [Oryza sativa (japonica
  misc_feature (1)..(347): Homolog of NCBI NO: 38346557 NR Description: OSJNBa0035M09.18 [Oryza sativa (japonica
  misc_feature (1)..(303): Homolog of NCBI NO: 7487281 NR Description: hypothetical protein T20K24.18 - Arabidopsis
  misc_feature (1)..(348): Homolog of NCBI NO: 30680587 NR Description: expressed protein [Arabidopsis thaliana]
  misc_feature (1)..(349): Homolog of NCBI NO: 22329024 NR Description: expressed protein [Arabidopsis thaliana]
  misc_feature (1)..(306): Homolog of NCBI NO: 8777360 NR Description: gene_id:MJB24.8~pir||T04241~strong similarity to
  misc_feature (1)..(351): Homolog of NCBI NO: 17065016 NR Description: Unknown protein [Arabidopsis thaliana]
  misc_feature (1)..(351): Homolog of NCBI NO: 22327910 NR Description: expressed protein [Arabidopsis thaliana]
  misc_feature (1)..(351): Homolog of NCBI NO: 15236024 NR Description: expressed protein [Arabidopsis thaliana]
MYPKHGKSSSCHGLYSTRGCEDALSKWLPVHVRKFTDEEIAARAVVRDILRTPPFITNNSKIAFLFLTPGTLPFEKLWDEFFKGHEGKFSIYIHPSKERPVHISRHFSDREIHSDEVTWGRISMVDAEKRLLVSALEDPDNQHFVLVSESCIPLHTFDYTYRYLLYSNVSFIESFVDPGPHGTGRHMEHMLPEIAKEDFRKGAQWFTMKRQHAIIVMADGLYYSKFREYCGPGIEADKNCIADEHYLPTFFNMIDPMGISNWSVTFVDWSERRWHPKTYGGNEISLEFMKNVTSEDMSVHVTSVGKHGDELHWPCTWNGIKRPCYLFARKFHPDTLDTLVNLFPNYTNTAV

SEQ ID NO: 49310 - DNA, 1517 bp, Arabidopsis thaliana
  misc_feature (1)..(1517): Ceres Seq. ID no. 12575274
  misc_feature: MA Experiment ID: 20000794 Result: Up-regulated in Transcription
  misc_feature: MA Experiment 20000794 PARAMETER Experiment Name: At_Petals_P Parameter: Age (day) Value: 23-25 days
  misc_feature: MA Experiment 20000794 PARAMETER Experiment Name: At_Petals_P Parameter: Plant Line Value: WS
  misc_feature: MA Experiment 20000794 PARAMETER Experiment Name: At_Petals_P Parameter: Tissue Value: Petals vs. Whole plant
gattacatctacgtaaagagtttctggtagaaattttccctcttttagctgcagattggcatcagattccgttctggatgtgtcggtgatcgattttccgcgtcggtgatgatagctaacggattcgagagtatggataaagaacgagtcaggaaacgtcctcgtatgacctgggacgaggccccagctgaaccagaggctaaaagggctgtgattaaaggacatggaagcgatgggaggattttgtcaccaccattaagggacgatgatcgtgatggtcattatgttttcagtttgagggacaatctcactcctagatataaaatacttagcaagatgggtgaaggcacatttggtcgggttttggaatgttgggatcgtgatacaaaagaatatgtggcaataaagataattcgaagcattaagaaataccgggatgcagcaatgattgaaattgatgtacttcagaaacttgttaagagtgataaaggccgcacacgctgtgtacagatgaagaactggtttgattaccgaaatcatatttgcattgtgttcgagaagcttgggccaagtttgtttgactttctaaagagaaataaatactccgcatttcctctggcccttgttcgggattttggatgccagcttttggaatctgtagcatatatgcacgagttacagttagttcacaccgacctcaagcctgagaacattctgttggtgtcttctgaaaatgtaaagcttcctgacaataagaggagtgctgcaaatgagacacatttcaggtgcttaccaaagtcaagcgccattaaactgattgattttggcagtactgtttgtgataaccggattcatcactccattgtccaaacaagacattacagatcccccgaggtcattttaggtctaggatggagttaccagtgtgacttatggagtataggttgtatactatttgaactatgcacgggtgaggctctctttcagacgcatgataacctagaacatctagctatgatggagagggcgcttggacctttacctgaacatatgactcgaaaagccagccggggtgctgagaaatatttcaggagagggtgtcggttgaattggccagaaggagccaactctagagaaagtattagggctgtaaaaagacttgatcgtctcaaggatatggtatcgaaacatgttgacaacacgagatctagatttgcagatctattgtatggtttattggcatatgatccatctgagcgtctcacagcaaacgaagctcttgaccatcctttctttaagagctcaagttgagaagaagcaaaatcagaaccataaaatgtagaattttacttggtaacaagtttttttgttagattcctctaaagctcccgttctcagtagcaccaaacagtagtattcctatttcagttacgagtttggctacgtttattctggaaaatacctctgttgtacattgtgttgttgagaatataaaacttgcatcatattttgaaact

SEQ ID NO: 49311 - protein, 400 aa, Arabidopsis thaliana; identical to SEQ ID NO: 46548
  peptide (1)..(400): Ceres Seq. ID no. 12575275
  misc_feature (71)..(396): Pfam Name: Protein kinase domain Pfam Description: Protein kinase domain
  misc_feature (62)..(396): Homolog of NCBI NO: 7211773 NR Description: protein kinase MK5 [Mesembryanthemum crystallinum]
  misc_feature (25)..(396): Homolog of NCBI NO: 15233948 NR Description: protein kinase (AFC2)
  misc_feature (29)..(396): Homolog of NCBI NO: 7489189 NR Description: protein kinase PK12 (EC 2.7.1.-),
  misc_feature (47)..(399): Homolog of NCBI NO: 601787 NR Description: protein kinase
  misc_feature (44)..(396): Homolog of NCBI NO: 34908100 NR Description: putative protein kinase AFC1
  misc_feature (47)..(399): Homolog of NCBI NO: 30693861 NR Description: protein kinase (AME2/AFC1) [Arabidopsis thaliana]
  misc_feature (47)..(399): Homolog of NCBI NO: 15231839 NR Description: protein kinase (AME2/AFC1)
  misc_feature (7)..(400): Homolog of NCBI NO: 34912246 NR Description: putative protein kinase AFC3
  misc_feature (6)..(400): Homolog of NCBI NO: 601791 NR Description: protein kinase
  misc_feature (1)..(400): Homolog of NCBI NO: 15233872 NR Description: protein kinase AME3

SEQ ID NO: 49312 - protein, 392 aa, Arabidopsis thaliana; identical to SEQ ID NO: 46549
  peptide (1)..(392): Ceres Seq. ID no. 12575276
  misc_feature (63)..(388): Pfam Name: Protein kinase domain Pfam Description: Protein kinase domain
  misc_feature (54)..(388): Homolog of NCBI NO: 7211773 NR Description: protein kinase MK5 [Mesembryanthemum crystallinum]
  misc_feature (17)..(388): Homolog of NCBI NO: 15233948 NR Description: protein kinase (AFC2)
  misc_feature (21)..(388): Homolog of NCBI NO: 7489189 NR Description: protein kinase PK12 (EC 2.7.1.-),
  misc_feature (39)..(391): Homolog of NCBI NO: 601787 NR Description: protein kinase
  misc_feature (36)..(388): Homolog of NCBI NO: 34908100 NR Description: putative protein kinase AFC1
  misc_feature (39)..(391): Homolog of NCBI NO: 30693861 NR Description: protein kinase (AME2/AFC1) [Arabidopsis thaliana]
  misc_feature (39)..(391): Homolog of NCBI NO: 15231839 NR Description: protein kinase (AME2/AFC1)
  misc_feature (1)..(392): Homolog of NCBI NO: 34912246 NR Description: putative protein kinase AFC3
  misc_feature (1)..(392): Homolog of NCBI NO: 601791 NR Description: protein kinase
  misc_feature (1)..(392): Homolog of NCBI NO: 15233872 NR Description: protein kinase AME3

SEQ ID NO: 49313 - protein, 381 aa, Arabidopsis thaliana; identical to SEQ ID NO: 46550
  peptide (1)..(381): Ceres Seq. ID no. 12575277
  misc_feature (52)..(377): Pfam Name: Protein kinase domain Pfam Description: Protein kinase domain
  misc_feature (43)..(377): Homolog of NCBI NO: 7211773 NR Description: protein kinase MK5 [Mesembryanthemum crystallinum]
  misc_feature (6)..(377): Homolog of NCBI NO: 15233948 NR Description: protein kinase (AFC2)
  misc_feature (10)..(377): Homolog of NCBI NO: 7489189 NR Description: protein kinase PK12 (EC 2.7.1.-),
  misc_feature (28)..(380): Homolog of NCBI NO: 601787 NR Description: protein kinase
  misc_feature (25)..(377): Homolog of NCBI NO: 34908100 NR Description: putative protein kinase AFC1
  misc_feature (28)..(380): Homolog of NCBI NO: 30693861 NR Description: protein kinase (AME2/AFC1) [Arabidopsis thaliana]
  misc_feature (28)..(380): Homolog of NCBI NO: 15231839 NR Description: protein kinase (AME2/AFC1)
  misc_feature (1)..(381): Homolog of NCBI NO: 34912246 NR Description: putative protein kinase AFC3
  misc_feature (1)..(381): Homolog of NCBI NO: 601791 NR Description: protein kinase
  misc_feature (1)..(381): Homolog of NCBI NO: 15233872 NR Description: protein kinase AME3

SEQ ID NO: 49314 - DNA, 1884 bp, Arabidopsis thaliana
  misc_feature (1)..(1884): Ceres Seq. ID no. 12591136
  misc_feature: MA Experiment ID: 20000234 Result: Up-regulated in Transcription
  misc_feature: MA Experiment 20000234 PARAMETER Experiment Name: At_Siliques_P Parameter: Age (day) Value: 21
  misc_feature: MA Experiment 20000234 PARAMETER Experiment Name: At_Siliques_P Parameter: Organism Value: A. thaliana
  misc_feature: MA Experiment 20000234 PARAMETER Experiment Name: At_Siliques_P Parameter: Plant Line Value: WS
  misc_feature: MA Experiment 20000234 PARAMETER Experiment Name: At_Siliques_P Parameter: Tissue Value: Less Than 5mm Siliques vs. Whole Plant
  misc_feature: MA Experiment ID: 20000235 Result: Up-regulated in Transcription
  misc_feature: MA Experiment 20000235 PARAMETER Experiment Name: At_Siliques_P Parameter: Age (day) Value: 21
  misc_feature: MA Experiment 20000235 PARAMETER Experiment Name: At_Siliques_P Parameter: Organism Value: A. thaliana
  misc_feature: MA Experiment 20000235 PARAMETER Experiment Name: At_Siliques_P Parameter: Plant Line Value: WS
  misc_feature: MA Experiment 20000235 PARAMETER Experiment Name: At_Siliques_P Parameter: Tissue Value: 5-10mm Siliques vs. Whole Plant
atgagttctctggttcctgttatggagaagcaagagagcgttcgaggtaactctgtggaggaacagcagagtctcagatgcgttggtgcagagaatcaggtgagaaagggaagagctttggacaagcaagttagtttcctagctgtgaatgttgttgagaaacatggaatcaaaggaagagcaatggagaaacaggagagggcaatggagaggcagagaagctttcgtgggtttgttgagaagcagaaaagctttagggtagtaatggagagacagttaagtttcatgaatgttggtggtgagaggaagaagaagactgactcacctggtaaaagaggagattctcctcttcatctcgcagctcgaacggggaatttgggaaaggttatggaattgattcgagcttgtaacggcattgaagagttgaaggagttgtcatcaaagcagaatctagaaggagagacccctctttatagtgcagcagaaaatgggcattcattagttgttgaagagatgttgaaacatatggatcttgatactgcatcagttaaagctcgcaacggttttgatcctttccatgtcgctgcaaaacaaggccatattgaggcattgaagaaattgttggagacatttccgaatctggctatgacggtggatctatcgtgtacaactgcattgcacacggctgcttcacaaggacacactgatgtggtgaatcttcttttaaagacggattctcatttagctaagatagctaagaacaatggtaaaaccgcacttcattctgcagcgcgaatggggcacagagaagtggttaagtctttgataggtaatgatgcaagcatcgggtttagaactgataagaagggacaaacagcgcttcacatggctgtcaaaggtcagaacgaagggattgttcttgagttggtgaaacctgatcctgcgattttgagtgttgaggatagtaaagggaatacgccgttgcacactgccacaaacaaaggccgtattaagatagtgagatgtttggtatcatttgatggaattaaccttaatgctatgaataaggctggagatactgcacttgatatagccgaaaagattggaaatccagagcttgtgtcggttctgaaggaagcaggagctgcaacagctaaagatcttgggaagcctcgaaacccggctaagcaacttaaccaaacggtcagtgacattaaacacgaggtacagtctcagctccaacagtctcgccaaacgggtgttagggtgcggagaatcgcaaagagactgaagaagcttcacatcaatggtttaaacaacgctataaactctgcaaccgttgtggctgtcctaattgcaacagttgcatttgcagcaatcttcaccattcctgggcaatatgaagaagacagaacaaagggactgttgttattaggagaagcccgcatagccggcaaagccccgtttttagtcttcttcatatttgacagcttggcgctgttcatatctttggctgttgttgtggtgcagacttcagttgtggtgattgagcagaaggcaaagaagaatcttgtgtttgtgatcaacaagctcatgtggttggcttgtttgttcatatccgtagcctttgtttctctttcgtttatcgttgtgggtaaggaggacatttggctggcgatttgtgcaacgattattggcgggacgattatgctaaccacgataggtgcaatgtgttactgtgtggtcatgcataggatcgaggaatctaaactgaaaagcttaaggaaagagagaagcaaatcgaaatctttctcactatctcatatgccttcagagtcagagattctcaacggcgaattcaacaagagaatgtatgcactctga

SEQ ID NO: 49315 - protein, 627 aa, Arabidopsis thaliana
  peptide (1)..(627): Ceres Seq. ID no. 12591137
  misc_feature (323)..(356): Pfam Name: Ankyrin repeat Pfam Description: Ankyrin repeat
  misc_feature (120)..(622): Homolog of NCBI NO: 18379277 NR Description: expressed protein
  misc_feature (96)..(627): Homolog of NCBI NO: 34908074 NR Description: P0506B12.26 [Oryza sativa (japonica
  misc_feature (96)..(615): Homolog of NCBI NO: 21553618 NR Description: ankyrin-like protein [Arabidopsis thaliana]
  misc_feature (96)..(615): Homolog of NCBI NO: 15230470 NR Description: ankyrin-like protein; protein id: At3g12360.1
  misc_feature (111)..(627): Homolog of NCBI NO: 30679697 NR Description: ankyrin repeat protein family [Arabidopsis
  misc_feature (111)..(627): Homolog of NCBI NO: 11357168 NR Description: ankyrin-like protein - Arabidopsis thaliana
  misc_feature (110)..(627): Homolog of NCBI NO: 15238604 NR Description: ankyrin-like protein; protein id: At5g60070.1
  misc_feature (102)..(627): Homolog of NCBI NO: 24796797 NR Description: putative ankyrin repeat containing protein
  misc_feature (101)..(627): Homolog of NCBI NO: 15222993 NR Description: hypothetical protein; protein id: At1g07710.1
  misc_feature (7)..(627): Homolog of NCBI NO: 15225141 NR Description: ankyrin-like protein; protein id: At2g31820.1
MSSLVPVMEKQESVRGNSVEEQQSLRCVGAENQVRKGRALDKQVSFLAVNVVEKHGIKGRAMEKQERAMERQRSFRGFVEKQKSFRVVMERQLSFMNVGGERKKKTDSPGKRGDSPLHLAARTGNLGKVMELIRACNGIEELKELSSKQNLEGETPLYSAAENGHSLVVEEMLKHMDLDTASVKARNGFDPFHVAAKQGHIEALKKLLETFPNLAMTVDLSCTTALHTAASQGHTDVVNLLLKTDSHLAKIAKNNGKTALHSAARMGHREVVKSLIGNDASIGFRTDKKGQTALHMAVKGQNEGIVLELVKPDPAILSVEDSKGNTPLHTATNKGRIKIVRCLVSFDGINLNAMNKAGDTALDIAEKIGNPELVSVLKEAGAATAKDLGKPRNPAKQLNQTVSDIKHEVQSQLQQSRQTGVRVRRIAKRLKKLHINGLNNAINSATVVAVLIATVAFAAIFTIPGQYEEDRTKGLLLLGEARIAGKAPFLVFFIFDSLALFISLAVVVVQTSVVVIEQKAKKNLVFVINKLMWLACLFISVAFVSLSFIVVGKEDIWLAICATIIGGTIMLTTIGAMCYCVVMHRIEESKLKSLRKERSKSKSFSLSHMPSESEILNGEFNKRMYAL

SEQ ID NO: 49316 - protein, 620 aa, Arabidopsis thaliana
  peptide (1)..(620): Ceres Seq. ID no. 12591138
  misc_feature (316)..(349): Pfam Name: Ankyrin repeat Pfam Description: Ankyrin repeat
  misc_feature (113)..(615): Homolog of NCBI NO: 18379277 NR Description: expressed protein
  misc_feature (89)..(620): Homolog of NCBI NO: 34908074 NR Description: P0506B12.26 [Oryza sativa (japonica
  misc_feature (89)..(608): Homolog of NCBI NO: 21553618 NR Description: ankyrin-like protein [Arabidopsis thaliana]
  misc_feature (89)..(608): Homolog of NCBI NO: 15230470 NR Description: ankyrin-like protein; protein id: At3g12360.1
  misc_feature (104)..(620): Homolog of NCBI NO: 30679697 NR Description: ankyrin repeat protein family [Arabidopsis
  misc_feature (104)..(620): Homolog of NCBI NO: 11357168 NR Description: ankyrin-like protein - Arabidopsis thaliana
  misc_feature (103)..(620): Homolog of NCBI NO: 15238604 NR Description: ankyrin-like protein; protein id: At5g60070.1
  misc_feature (95)..(620): Homolog of NCBI NO: 24796797 NR Description: putative ankyrin repeat containing protein
  misc_feature (94)..(620): Homolog of NCBI NO: 15222993 NR Description: hypothetical protein; protein id: At1g07710.1
  misc_feature (1)..(620): Homolog of NCBI NO: 15225141 NR Description: ankyrin-like protein; protein id: At2g31820.1
MEKQESVRGNSVEEQQSLRCVGAENQVRKGRALDKQVSFLAVNVVEKHGIKGRAMEKQERAMERQRSFRGFVEKQKSFRVVMERQLSFMNVGGERKKKTDSPGKRGDSPLHLAARTGNLGKVMELIRACNGIEELKELSSKQNLEGETPLYSAAENGHSLVVEEMLKHMDLDTASVKARNGFDPFHVAAKQGHIEALKKLLETFPNLAMTVDLSCTTALHTAASQGHTDVVNLLLKTDSHLAKIAKNNGKTALHSAARMGHREVVKSLIGNDASIGFRTDKKGQTALHMAVKGQNEGIVLELVKPDPAILSVEDSKGNTPLHTATNKGRIKIVRCLVSFDGINLNAMNKAGDTALDIAEKIGNPELVSVLKEAGAATAKDLGKPRNPAKQLNQTVSDIKHEVQSQLQQSRQTGVRVRRIAKRLKKLHINGLNNAINSATVVAVLIATVAFAAIFTIPGQYEEDRTKGLLLLGEARIAGKAPFLVFFIFDSLALFISLAVVVVQTSVVVIEQKAKKNLVFVINKLMWLACLFISVAFVSLSFIVVGKEDIWLAICATIIGGTIMLTTIGAMCYCVVMHRIEESKLKSLRKERSKSKSFSLSHMPSESEILNGEFNKRMYAL

SEQ ID NO: 49317 - protein, 566 aa, Arabidopsis thaliana
  peptide (1)..(566): Ceres Seq. ID no. 12591139
  misc_feature (262)..(295): Pfam Name: Ankyrin repeat Pfam Description: Ankyrin repeat
  misc_feature (59)..(561): Homolog of NCBI NO: 18379277 NR Description: expressed protein
  misc_feature (35)..(566): Homolog of NCBI NO: 34908074 NR Description: P0506B12.26 [Oryza sativa (japonica
  misc_feature (35)..(554): Homolog of NCBI NO: 21553618 NR Description: ankyrin-like protein [Arabidopsis thaliana]
  misc_feature (35)..(554): Homolog of NCBI NO: 15230470 NR Description: ankyrin-like protein; protein id: At3g12360.1
  misc_feature (50)..(566): Homolog of NCBI NO: 30679697 NR Description: ankyrin repeat protein family [Arabidopsis
  misc_feature (50)..(566): Homolog of NCBI NO: 11357168 NR Description: ankyrin-like protein - Arabidopsis thaliana
  misc_feature (49)..(566): Homolog of NCBI NO: 15238604 NR Description: ankyrin-like protein; protein id: At5g60070.1
  misc_feature (41)..(566): Homolog of NCBI NO: 24796797 NR Description: putative ankyrin repeat containing protein
  misc_feature (40)..(566): Homolog of NCBI NO: 15222993 NR Description: hypothetical protein; protein id: At1g07710.1
  misc_feature (1)..(566): Homolog of NCBI NO: 15225141 NR Description: ankyrin-like protein; protein id: At2g31820.1
MEKQERAMERQRSFRGFVEKQKSFRVVMERQLSFMNVGGERKKKTDSPGKRGDSPLHLAARTGNLGKVMELIRACNGIEELKELSSKQNLEGETPLYSAAENGHSLVVEEMLKHMDLDTASVKARNGFDPFHVAAKQGHIEALKKLLETFPNLAMTVDLSCTTALHTAASQGHTDVVNLLLKTDSHLAKIAKNNGKTALHSAARMGHREVVKSLIGNDASIGFRTDKKGQTALHMAVKGQNEGIVLELVKPDPAILSVEDSKGNTPLHTATNKGRIKIVRCLVSFDGINLNAMNKAGDTALDIAEKIGNPELVSVLKEAGAATAKDLGKPRNPAKQLNQTVSDIKHEVQSQLQQSRQTGVRVRRIAKRLKKLHINGLNNAINSATVVAVLIATVAFAAIFTIPGQYEEDRTKGLLLLGEARIAGKAPFLVFFIFDSLALFISLAVVVVQTSVVVIEQKAKKNLVFVINKLMWLACLFISVAFVSLSFIVVGKEDIWLAICATIIGGTIMLTTIGAMCYCVVMHRIEESKLKSLRKERSKSKSFSLSHMPSESEILNGEFNKRMYAL

SEQ ID NO: 49318 - DNA, 1436 bp, Arabidopsis thaliana
  misc_feature (1)..(1436): Ceres Seq. ID no. 14312095
  misc_feature: MA Experiment ID: 20000179 Result: Up-regulated in Transcription
  misc_feature: MA Experiment 20000179 PARAMETER Experiment Name: At_Germinating_Seeds_P Parameter: Age (hr) Value: 6 vs. 0
  misc_feature: MA Experiment 20000179 PARAMETER Experiment Name: At_Germinating_Seeds_P Parameter: Tissue Value: Germinating Seeds
  misc_feature: MA Experiment ID: 20000234 Result: Down-regulated in Transcription
  misc_feature: MA Experiment 20000234 PARAMETER Experiment Name: At_Siliques_P Parameter: Age (day) Value: 21
  misc_feature: MA Experiment 20000234 PARAMETER Experiment Name: At_Siliques_P Parameter: Organism Value: A. thaliana
  misc_feature: MA Experiment 20000234 PARAMETER Experiment Name: At_Siliques_P Parameter: Plant Line Value: WS
  misc_feature: MA Experiment 20000234 PARAMETER Experiment Name: At_Siliques_P Parameter: Tissue Value: Less Than 5mm Siliques vs. Whole Plant
  misc_feature: MA Experiment ID: 20000495 Result: Down-regulated in Transcription
  misc_feature: MA Experiment 20000495 PARAMETER Experiment Name: At_Guard_Cells_P Parameter: Harvest Date Value: 8/2/2002
  misc_feature: MA Experiment 20000495 PARAMETER Experiment Name: At_Guard_Cells_P Parameter: Organism Value: A. thaliana
  misc_feature: MA Experiment 20000495 PARAMETER Experiment Name: At_Guard_Cells_P Parameter: Tissue Value: Guard Cells vs. Leaves
  misc_feature: MA Experiment ID: 20001559 Result: Down-regulated in Transcription
  misc_feature: MA Experiment 20001559 PARAMETER Experiment Name: At_Drought_Soil_Dry_P Parameter: Age (day) Value: 28
  misc_feature: MA Experiment 20001559 PARAMETER Experiment Name: At_Drought_Soil_Dry_P Parameter: Organism Value: A. thaliana
  misc_feature: MA Experiment 20001559 PARAMETER Experiment Name: At_Drought_Soil_Dry_P Parameter: Plant Line Value: WS
  misc_feature: MA Experiment 20001559 PARAMETER Experiment Name: At_Drought_Soil_Dry_P Parameter: Post Timepoint (hr) Value: 29
  misc_feature: MA Experiment 20001559 PARAMETER Experiment Name: At_Drought_Soil_Dry_P Parameter: Post-Treatment Value: Re-Water vs. No Drought
  misc_feature: MA Experiment 20001559 PARAMETER Experiment Name: At_Drought_Soil_Dry_P Parameter: Timepoint (day) Value: 14
  misc_feature: MA Experiment 20001559 PARAMETER Experiment Name: At_Drought_Soil_Dry_P Parameter: Treatment Value: Drought vs. No Drought
  misc_feature: MA Experiment ID: 20001560 Result: Down-regulated in Transcription
  misc_feature: MA Experiment 20001560 PARAMETER Experiment Name: At_Drought_Soil_Dry_P Parameter: Age (day) Value: 28
  misc_feature: MA Experiment 20001560 PARAMETER Experiment Name: At_Drought_Soil_Dry_P Parameter: Organism Value: A. thaliana
  misc_feature: MA Experiment 20001560 PARAMETER Experiment Name: At_Drought_Soil_Dry_P Parameter: Plant Line Value: WS
  misc_feature: MA Experiment 20001560 PARAMETER Experiment Name: At_Drought_Soil_Dry_P Parameter: Post Timepoint (hr) Value: None
  misc_feature: MA Experiment 20001560 PARAMETER Experiment Name: At_Drought_Soil_Dry_P Parameter: Post-Treatment Value: None
  misc_feature: MA Experiment 20001560 PARAMETER Experiment Name: At_Drought_Soil_Dry_P Parameter: Timepoint (day) Value: 14
  misc_feature: MA Experiment 20001560 PARAMETER Experiment Name: At_Drought_Soil_Dry_P Parameter: Treatment Value: Drought vs. No Drought
gaccaattcctcattcttccaatcgcacttcctttaccagatcagacgtcaatttcaactcttcagtgaagagatttctttcaccgagttttctactccgatcgatcaattgaagattgaaatggaagctaattcaggcggaggaggaggagctgaaggcggaagagcggtaaccggaggaggaggagggagcgatgtggaattggtgagcaagacgttgcaagtggagcataagctattctattttgatcttaaggagaatcctcgtggaaggtatctaaagatatcggagaagacgtcggcgacgaggtcaaccatcattgttccttcctccggcatctcttggttccttgatctcttcaactactatgtcaattctgaggaacacgagctttttagcaaagaattgcagcttgattccaaggtgttttacttcgatatcggtgagaacagaagaggacgcttcttgaaggtgtcagaagcatcggttagtagaaatcgaagtaccattattgttccagctggaagctctcctgatgaaggatgggcagctttcaggaatatattggctgagatacatgaagcatcaggactttttgtgatgccaaatcagaaaccttctgatggacaggaacacttggttgatgatgttggagctggttttatacctggacatggtagtcagcagccatcttcttcagaacataatgtggatcgaacaattgactcgccaggccaggaagaaaccggaatgactggtgtttctaaagtaatcagagctgaccagaaacggttcttctttgatcttgggaacaataacaggggccatttcttaaggatatctgaggtggcaggttctgacaggtcttccatcattctaccgttatcgggtcttaagcagtttcacgaagtaattggtcactttgtggagatcaccaaagataaaattgaaggtatgacaggtgcaaatgtcaggacagttgatcctcctcagagataagtattgattctcttagaggatggaaattttcaatcctctaaccatttgaatctggcaacttcaagtcgactgcctgatcgcggtgtgcaatagtttcacgtaatatctctcgccccttcacatcttctaaaaataattcagcaggatcatcatttgccttaatagtagataaaacaaactttggagtccgcaactgggaataagctgaaaatcatccaccatgtgtatctctctctctctgtatctctctctctctctctccctccctccctcatttgcttctgttctgttttaactttttttgtttttgttcagtttgggtcattgggtgtatatctgttgacggcttgatgcatttcaattgtaaaagaatattggggtttatatgtttgggctaatgcctgttggaataaaagatgaagtgtaagttctatcc

SEQ ID NO: 49319 - protein, 332 aa, Arabidopsis thaliana
  peptide (1)..(332): Ceres Seq. ID no. 14312096
  misc_feature (65)..(312): Pfam Name: PurA ssDNA and RNA-binding protein Pfam Description: PurA ssDNA and RNA-binding protein
  misc_feature (43)..(197): Homolog of NCBI NO: 24638636 NR Description: Purine-rich binding protein-alpha CG1507-PB
  misc_feature (258)..(320): Homolog of NCBI NO: 24638638 NR Description: Purine-rich binding protein-alpha CG1507-PA
  misc_feature (43)..(197): Homolog of NCBI NO: 24638638 NR Description: Purine-rich binding protein-alpha CG1507-PA
  misc_feature (258)..(320): Homolog of NCBI NO: 24638642 NR Description: Purine-rich binding protein-alpha CG1507-PD
  misc_feature (60)..(197): Homolog of NCBI NO: 24638642 NR Description: Purine-rich binding protein-alpha CG1507-PD
  misc_feature (46)..(332): Homolog of NCBI NO: 34902984 NR Description: unnamed protein product [Oryza sativa (japonica
  misc_feature (279)..(332): Homolog of NCBI NO: 25408208 NR Description: hypothetical protein At2g32080 [imported] -
  misc_feature (41)..(251): Homolog of NCBI NO: 25408208 NR Description: hypothetical protein At2g32080 [imported] -
  misc_feature (41)..(332): Homolog of NCBI NO: 18402871 NR Description: purine-rich single-stranded DNA-binding protein
  misc_feature (41)..(332): Homolog of NCBI NO: 30685174 NR Description: purine-rich single-stranded DNA-binding protein
TNSSFFQSHFLYQIRRQFQLFSEEISFTEFSTPIDQLKIEMEANSGGGGGAEGGRAVTGGGGGSDVELVSKTLQVEHKLFYFDLKENPRGRYLKISEKTSATRSTIIVPSSGISWFLDLFNYYVNSEEHELFSKELQLDSKVFYFDIGENRRGRFLKVSEASVSRNRSTIIVPAGSSPDEGWAAFRNILAEIHEASGLFVMPNQKPSDGQEHLVDDVGAGFIPGHGSQQPSSSEHNVDRTIDSPGQEETGMTGVSKVIRADQKRFFFDLGNNNRGHFLRISEVAGSDRSSIILPLSGLKQFHEVIGHFVEITKDKIEGMTGANVRTVDPPQR

SEQ ID NO: 49320 - protein, 292 aa, Arabidopsis thaliana
  peptide (1)..(292): Ceres Seq. ID no. 14312097
  misc_feature (25)..(272): Pfam Name: PurA ssDNA and RNA-binding protein Pfam Description: PurA ssDNA and RNA-binding protein
  misc_feature (3)..(157): Homolog of NCBI NO: 24638636 NR Description: Purine-rich binding protein-alpha CG1507-PB
  misc_feature (218)..(280): Homolog of NCBI NO: 24638638 NR Description: Purine-rich binding protein-alpha CG1507-PA
  misc_feature (3)..(157): Homolog of NCBI NO: 24638638 NR Description: Purine-rich binding protein-alpha CG1507-PA
  misc_feature (218)..(280): Homolog of NCBI NO: 24638642 NR Description: Purine-rich binding protein-alpha CG1507-PD
  misc_feature (20)..(157): Homolog of NCBI NO: 24638642 NR Description: Purine-rich binding protein-alpha CG1507-PD
  misc_feature (6)..(292): Homolog of NCBI NO: 34902984 NR Description: unnamed protein product [Oryza sativa (japonica
  misc_feature (239)..(292): Homolog of NCBI NO: 25408208 NR Description: hypothetical protein At2g32080 [imported] -
  misc_feature (1)..(211): Homolog of NCBI NO: 25408208 NR Description: hypothetical protein At2g32080 [imported] -
  misc_feature (1)..(292): Homolog of NCBI NO: 18402871 NR Description: purine-rich single-stranded DNA-binding protein
  misc_feature (1)..(292): Homolog of NCBI NO: 30685174 NR Description: purine-rich single-stranded DNA-binding protein
MEANSGGGGGAEGGRAVTGGGGGSDVELVSKTLQVEHKLFYFDLKENPRGRYLKISEKTSATRSTIIVPSSGISWFLDLFNYYVNSEEHELFSKELQLDSKVFYFDIGENRRGRFLKVSEASVSRNRSTIIVPAGSSPDEGWAAFRNILAEIHEASGLFVMPNQKPSDGQEHLVDDVGAGFIPGHGSQQPSSSEHNVDRTIDSPGQEETGMTGVSKVIRADQKRFFFDLGNNNRGHFLRISEVAGSDRSSIILPLSGLKQFHEVIGHFVEITKDKIEGMTGANVRTVDPPQR

SEQ ID NO: 49321 - DNA, 1789 bp, Arabidopsis thaliana; identical to SEQ ID NO: 27706
  misc_feature (1)..(1789): Ceres Seq. ID no. 13592258
  misc_feature: MA Experiment ID: 108434 Result: Down-regulated in Transcription
  misc_feature: MA Experiment 108434 PARAMETER Experiment Name: At_Root_Tips_cDNA_P Parameter: Tissue Value: Root Tips
  misc_feature: MA Experiment ID: 108461 Result: Up-regulated in Transcription
  misc_feature: MA Experiment 108461 PARAMETER Experiment Name: At_Germinating_Seeds_cDNA_P Parameter: Age (day) Value: 1 vs. 0
  misc_feature: MA Experiment 108461 PARAMETER Experiment Name: At_Germinating_Seeds_cDNA_P Parameter: Tissue Value: Germinating Seeds
  misc_feature: MA Experiment ID: 108462 Result: Up-regulated in Transcription
  misc_feature: MA Experiment 108462 PARAMETER Experiment Name: At_Germinating_Seeds_cDNA_P Parameter: Age (day) Value: 2 vs. 0
  misc_feature: MA Experiment 108462 PARAMETER Experiment Name: At_Germinating_Seeds_cDNA_P Parameter: Tissue Value: Germinating Seeds
  misc_feature: MA Experiment ID: 108463 Result: Up-regulated in Transcription
  misc_feature: MA Experiment 108463 PARAMETER Experiment Name: At_Germinating_Seeds_cDNA_P Parameter: Age (day) Value: 3 vs. 0
  misc_feature: MA Experiment 108463 PARAMETER Experiment Name: At_Germinating_Seeds_cDNA_P Parameter: Tissue Value: Germinating Seeds
  misc_feature: MA Experiment ID: 108464 Result: Up-regulated in Transcription
  misc_feature: MA Experiment 108464 PARAMETER Experiment Name: At_Germinating_Seeds_cDNA_P Parameter: Age (day) Value: 4 vs. 0
  misc_feature: MA Experiment 108464 PARAMETER Experiment Name: At_Germinating_Seeds_cDNA_P Parameter: Tissue Value: Germinating Seeds
  misc_feature: MA Experiment ID: 108488 Result: Up-regulated in Transcription
  misc_feature: MA Experiment ID: 108595 Result: Up-regulated in Transcription
  misc_feature: MA Experiment 108595 PARAMETER Experiment Name: At_Ler-pi_Ovule_cDNA_P Parameter: Plant Line Value: null
  misc_feature: MA Experiment ID: 20000069 Result: Down-regulated in Transcription
  misc_feature: MA Experiment 20000069 PARAMETER Experiment Name: At_100uM_ABA_Mutants_cDNA_P Parameter: Plant Line Value: CS23
  misc_feature: MA Experiment 20000069 PARAMETER Experiment Name: At_100uM_ABA_Mutants_cDNA_P Parameter: Timepoint (hr) Value: 6
  misc_feature: MA Experiment 20000069 PARAMETER Experiment Name: At_100uM_ABA_Mutants_cDNA_P Parameter: Tissue Value: Aerial
  misc_feature: MA Experiment 20000069 PARAMETER Experiment Name: At_100uM_ABA_Mutants_cDNA_P Parameter: Treatment Value: 100uM ABA vs. No Treatment
  misc_feature: MA Experiment ID: 20000070 Result: Down-regulated in Transcription
  misc_feature: MA Experiment 20000070 PARAMETER Experiment Name: At_100uM_ABA_Mutants_cDNA_P Parameter: Plant Line Value: CS24
  misc_feature: MA Experiment 20000070 PARAMETER Experiment Name: At_100uM_ABA_Mutants_cDNA_P Parameter: Timepoint (hr) Value: 6
  misc_feature: MA Experiment 20000070 PARAMETER Experiment Name: At_100uM_ABA_Mutants_cDNA_P Parameter: Tissue Value: Aerial
  misc_feature: MA Experiment 20000070 PARAMETER Experiment Name: At_100uM_ABA_Mutants_cDNA_P Parameter: Treatment Value: 100uM ABA vs. No Treatment
  misc_feature: MA Experiment ID: 20000071 Result: Down-regulated in Transcription
  misc_feature: MA Experiment 20000071 PARAMETER Experiment Name: At_100uM_ABA_Mutants_cDNA_P Parameter: Plant Line Value: CS8104
  misc_feature: MA Experiment 20000071 PARAMETER Experiment Name: At_100uM_ABA_Mutants_cDNA_P Parameter: Timepoint (hr) Value: 6
  misc_feature: MA Experiment 20000071 PARAMETER Experiment Name: At_100uM_ABA_Mutants_cDNA_P Parameter: Tissue Value: Aerial
  misc_feature: MA Experiment 20000071 PARAMETER Experiment Name: At_100uM_ABA_Mutants_cDNA_P Parameter: Treatment Value: 100uM ABA vs. No Treatment
  misc_feature: MA Experiment ID: 20000072 Result: Down-regulated in Transcription
  misc_feature: MA Experiment 20000072 PARAMETER Experiment Name: At_100uM_ABA_Mutants_cDNA_P Parameter: Plant Line Value: CS8105
  misc_feature: MA Experiment 20000072 PARAMETER Experiment Name: At_100uM_ABA_Mutants_cDNA_P Parameter: Timepoint (hr) Value: 6
  misc_feature: MA Experiment 20000072 PARAMETER Experiment Name: At_100uM_ABA_Mutants_cDNA_P Parameter: Tissue Value: Aerial
  misc_feature: MA Experiment 20000072 PARAMETER Experiment Name: At_100uM_ABA_Mutants_cDNA_P Parameter: Treatment Value: 100uM ABA vs. No Treatment
  misc_feature: MA Experiment ID: 20000086 Result: Down-regulated in Transcription
  misc_feature: MA Experiment 20000086 PARAMETER Experiment Name: At_100uM_ABA_Mutants_cDNA_P Parameter: Plant Line Value: CS22
  misc_feature: MA Experiment 20000086 PARAMETER Experiment Name: At_100uM_ABA_Mutants_cDNA_P Parameter: Timepoint (hr) Value: 6
  misc_feature: MA Experiment 20000086 PARAMETER Experiment Name: At_100uM_ABA_Mutants_cDNA_P Parameter: Tissue Value: Aerial
  misc_feature: MA Experiment 20000086 PARAMETER Experiment Name: At_100uM_ABA_Mutants_cDNA_P Parameter: Treatment Value: 100uM ABA vs. No Treatment
  misc_feature: MA Experiment ID: 20000087 Result: Down-regulated in Transcription
  misc_feature: MA Experiment 20000087 PARAMETER Experiment Name: At_100uM_ABA_Mutants_cDNA_P Parameter: Plant Line Value: WS
  misc_feature: MA Experiment 20000087 PARAMETER Experiment Name: At_100uM_ABA_Mutants_cDNA_P Parameter: Timepoint (hr) Value: 6
  misc_feature: MA Experiment 20000087 PARAMETER Experiment Name: At_100uM_ABA_Mutants_cDNA_P Parameter: Tissue Value: Aerial
  misc_feature: MA Experiment 20000087 PARAMETER Experiment Name: At_100uM_ABA_Mutants_cDNA_P Parameter: Treatment Value: 100uM ABA vs. No Treatment
  misc_feature: MA Experiment ID: 20000088 Result: Down-regulated in Transcription
  misc_feature: MA Experiment 20000088 PARAMETER Experiment Name: At_100uM_ABA_Mutants_cDNA_P Parameter: Plant Line Value: Landsberg
  misc_feature: MA Experiment 20000088 PARAMETER Experiment Name: At_100uM_ABA_Mutants_cDNA_P Parameter: Timepoint (hr) Value: 6
  misc_feature: MA Experiment 20000088 PARAMETER Experiment Name: At_100uM_ABA_Mutants_cDNA_P Parameter: Tissue Value: Aerial
  misc_feature: MA Experiment 20000088 PARAMETER Experiment Name: At_100uM_ABA_Mutants_cDNA_P Parameter: Treatment Value: 100uM ABA vs. No Treatment
  misc_feature: MA Experiment ID: 20000090 Result: Down-regulated in Transcription
  misc_feature: MA Experiment ID: 20000111 Result: Up-regulated in Transcription
  misc_feature: MA Experiment 20000111 PARAMETER Experiment Name: At_42deg_Heat_cDNA_P Parameter: Temperature (deg C) Value: 42 vs. 22
  misc_feature: MA Experiment 20000111 PARAMETER Experiment Name: At_42deg_Heat_cDNA_P Parameter: Timepoint (hr) Value: 6
  misc_feature: MA Experiment 20000111 PARAMETER Experiment Name: At_42deg_Heat_cDNA_P Parameter: Tissue Value: Aerial
  misc_feature: MA Experiment ID: 20000117 Result: Down-regulated in Transcription
  misc_feature: MA Experiment 20000117 PARAMETER Experiment Name: At_100uM_ABA_Mutants_cDNA_P Parameter: Plant Line Value: Columbia
  misc_feature: MA Experiment 20000117 PARAMETER Experiment Name: At_100uM_ABA_Mutants_cDNA_P Parameter: Timepoint (hr) Value: 6
  misc_feature: MA Experiment 20000117 PARAMETER Experiment Name: At_100uM_ABA_Mutants_cDNA_P Parameter: Tissue Value: Aerial
  misc_feature: MA Experiment 20000117 PARAMETER Experiment Name: At_100uM_ABA_Mutants_cDNA_P Parameter: Treatment Value: 100uM ABA vs. No Treatment
  misc_feature: MA Experiment ID: 20000179 Result: Up-regulated in Transcription
  misc_feature: MA Experiment 20000179 PARAMETER Experiment Name: At_Germinating_Seeds_P Parameter: Age (hr) Value: 6 vs. 0
  misc_feature: MA Experiment 20000179 PARAMETER Experiment Name: At_Germinating_Seeds_P Parameter: Tissue Value: Germinating Seeds
  misc_feature: MA Experiment ID: 20000180 Result: Up-regulated in Transcription
  misc_feature: MA Experiment 20000180 PARAMETER Experiment Name: At_Germinating_Seeds_P Parameter: Age (hr) Value: 24 vs. 0
  misc_feature: MA Experiment 20000180 PARAMETER Experiment Name: At_Germinating_Seeds_P Parameter: Tissue Value: Germinating Seeds
  misc_feature: MA Experiment ID: 20000185 Result: Down-regulated in Transcription
  misc_feature: MA Experiment 20000185 PARAMETER Experiment Name: At_Roots__P Parameter: Age (day) Value: 7 vs. 21
  misc_feature: MA Experiment 20000185 PARAMETER Experiment Name: At_Roots__P Parameter: Organism Value: A. thaliana
  misc_feature: MA Experiment 20000185 PARAMETER Experiment Name: At_Roots__P Parameter: Tissue Value: Roots vs. Whole Plant
  misc_feature: MA Experiment ID: 20000438 Result: Up-regulated in Transcription
  misc_feature: MA Experiment 20000438 PARAMETER Experiment Name: At_Shoots__P Parameter: Age (day) Value: 14
  misc_feature: MA Experiment 20000438 PARAMETER Experiment Name: At_Shoots__P Parameter: Tissue Value: Shoots vs. Whole Plant
  misc_feature: MA Experiment ID: 20000439 Result: Down-regulated in Transcription
  misc_feature: MA Experiment 20000439 PARAMETER Experiment Name: At_Roots__P Parameter: Age (day) Value: 14 vs. 21
  misc_feature: MA Experiment 20000439 PARAMETER Experiment Name: At_Roots__P Parameter: Organism Value: A. thaliana
  misc_feature: MA Experiment 20000439 PARAMETER Experiment Name: At_Roots__P Parameter: Tissue Value: Roots vs. Whole Plant
  misc_feature: MA Experiment ID: 20001247 Result: Up-regulated in Transcription
  misc_feature: MA Experiment 20001247 PARAMETER Experiment Name: At_Far-red-induction_P Parameter: Age (day) Value: 7
  misc_feature: MA Experiment 20001247 PARAMETER Experiment Name: At_Far-red-induction_P Parameter: Light Value: Far-red vs. White
  misc_feature: MA Experiment 20001247 PARAMETER Experiment Name: At_Far-red-induction_P Parameter: Organism Value: A. thaliana
  misc_feature: MA Experiment 20001247 PARAMETER Experiment Name: At_Far-red-induction_P Parameter: Plant Line Value: Columbia
  misc_feature: MA Experiment 20001247 PARAMETER Experiment Name: At_Far-red-induction_P Parameter: Timepoint (hr) Value: 1
  misc_feature: MA Experiment 20001247 PARAMETER Experiment Name: At_Far-red-induction_P Parameter: Tissue Value: Whole Plant
  misc_feature: MA Experiment ID: 20001450 Result: Down-regulated in Transcription
  misc_feature: MA Experiment 20001450 PARAMETER Experiment Name: At_Far-red-induction_P Parameter: Age (day) Value: 7
  misc_feature: MA Experiment 20001450 PARAMETER Experiment Name: At_Far-red-induction_P Parameter: Light Value: Far-red vs. White
  misc_feature: MA Experiment 20001450 PARAMETER Experiment Name: At_Far-red-induction_P Parameter: Organism Value: A. thaliana
  misc_feature: MA Experiment 20001450 PARAMETER Experiment Name: At_Far-red-induction_P Parameter: Plant Line Value: Columbia
  misc_feature: MA Experiment 20001450 PARAMETER Experiment Name: At_Far-red-induction_P Parameter: Timepoint (hr) Value: 8
  misc_feature: MA Experiment 20001450 PARAMETER Experiment Name: At_Far-red-induction_P Parameter: Tissue Value: Whole Plant
  misc_feature: MA Experiment ID: 20001556 Result: Down-regulated in Transcription
  misc_feature: MA Experiment 20001556 PARAMETER Experiment Name: At_Drought_Soil_Dry_P Parameter: Age (day) Value: 26
  misc_feature: MA Experiment 20001556 PARAMETER Experiment Name: At_Drought_Soil_Dry_P Parameter: Organism Value: A. thaliana
  misc_feature: MA Experiment 20001556 PARAMETER Experiment Name: At_Drought_Soil_Dry_P Parameter: Plant Line Value: WS
  misc_feature: MA Experiment 20001556 PARAMETER Experiment Name: At_Drought_Soil_Dry_P Parameter: Post Timepoint (hr) Value: None
  misc_feature: MA Experiment 20001556 PARAMETER Experiment Name: At_Drought_Soil_Dry_P Parameter: Post-Treatment Value: None
  misc_feature: MA Experiment 20001556 PARAMETER Experiment Name: At_Drought_Soil_Dry_P Parameter: Timepoint (day) Value: 12
  misc_feature: MA Experiment 20001556 PARAMETER Experiment Name: At_Drought_Soil_Dry_P Parameter: Treatment Value: Drought vs. No Drought
  misc_feature: MA Experiment ID: 20001559 Result: Down-regulated in Transcription
  misc_feature: MA Experiment 20001559 PARAMETER Experiment Name: At_Drought_Soil_Dry_P Parameter: Age (day) Value: 28
  misc_feature: MA Experiment 20001559 PARAMETER Experiment Name: At_Drought_Soil_Dry_P Parameter: Organism Value: A. thaliana
  misc_feature: MA Experiment 20001559 PARAMETER Experiment Name: At_Drought_Soil_Dry_P Parameter: Plant Line Value: WS
  misc_feature: MA Experiment 20001559 PARAMETER Experiment Name: At_Drought_Soil_Dry_P Parameter: Post Timepoint (hr) Value: 29
  misc_feature: MA Experiment 20001559 PARAMETER Experiment Name: At_Drought_Soil_Dry_P Parameter: Post-Treatment Value: Re-Water vs. No Drought
  misc_feature: MA Experiment 20001559 PARAMETER Experiment Name: At_Drought_Soil_Dry_P Parameter: Timepoint (day) Value: 14
  misc_feature: MA Experiment 20001559 PARAMETER Experiment Name: At_Drought_Soil_Dry_P Parameter: Treatment Value: Drought vs. No Drought
  misc_feature: MA Experiment ID: 20001904 Result: Down-regulated in Transcription
  misc_feature: MA Experiment 20001904 PARAMETER Experiment Name: At_Drought_Reproduction_P Parameter: Age (day) Value: 37
  misc_feature: MA Experiment 20001904 PARAMETER Experiment Name: At_Drought_Reproduction_P Parameter: Organism Value: A. thaliana
  misc_feature: MA Experiment 20001904 PARAMETER Experiment Name: At_Drought_Reproduction_P Parameter: Plant Line Value: WS
  misc_feature: MA Experiment 20001904 PARAMETER Experiment Name: At_Drought_Reproduction_P Parameter: Timepoint (day) Value: 7
  misc_feature: MA Experiment 20001904 PARAMETER Experiment Name: At_Drought_Reproduction_P Parameter: Tissue Value: Rosettes
  misc_feature: MA Experiment 20001904 PARAMETER Experiment Name: At_Drought_Reproduction_P Parameter: Treatment Value: Drought vs. No Drought
  misc_feature: MA Experiment ID: 20001905 Result: Down-regulated in Transcription
  misc_feature: MA Experiment 20001905 PARAMETER Experiment Name: At_Drought_Reproduction_P Parameter: Age (day) Value: 40
  misc_feature: MA Experiment 20001905 PARAMETER Experiment Name: At_Drought_Reproduction_P Parameter: Organism Value: A. thaliana
  misc_feature: MA Experiment 20001905 PARAMETER Experiment Name: At_Drought_Reproduction_P Parameter: Plant Line Value: WS
  misc_feature: MA Experiment 20001905 PARAMETER Experiment Name: At_Drought_Reproduction_P Parameter: Timepoint (day) Value: 10
  misc_feature: MA Experiment 20001905 PARAMETER Experiment Name: At_Drought_Reproduction_P Parameter: Tissue Value: Rosettes
  misc_feature: MA Experiment 20001905 PARAMETER Experiment Name: At_Drought_Reproduction_P Parameter: Treatment Value: Drought vs. No Drought
  misc_feature: MA Experiment ID: 20001906 Result: Down-regulated in Transcription
  misc_feature: MA Experiment 20001906 PARAMETER Experiment Name: At_Drought_Reproduction_P Parameter: Age (day) Value: 35
  misc_feature: MA Experiment 20001906 PARAMETER Experiment Name: At_Drought_Reproduction_P Parameter: Organism Value: A. thaliana
  misc_feature: MA Experiment 20001906 PARAMETER Experiment Name: At_Drought_Reproduction_P Parameter: Plant Line Value: WS
  misc_feature: MA Experiment 20001906 PARAMETER Experiment Name: At_Drought_Reproduction_P Parameter: Timepoint (day) Value: 5
  misc_feature: MA Experiment 20001906 PARAMETER Experiment Name: At_Drought_Reproduction_P Parameter: Tissue Value: Siliques
  misc_feature: MA Experiment 20001906 PARAMETER Experiment Name: At_Drought_Reproduction_P Parameter: Treatment Value: Drought vs. No Drought

SEQ ID NO: 49322 - protein, 474 aa, Arabidopsis thaliana; identical to SEQ ID NO: 27707
  peptide (1)..(474): Ceres Seq. ID no. 13592259
  misc_feature (160)..(358): Pfam Name: ATPase family associated with various cellular Pfam Description: ATPase family associated with various cellular
  misc_feature (160)..(358): Pfam Name: ATPase family associated with various cellular Pfam Description: ATPase family associated with various cellular
  misc_feature (23)..(474): Homolog of NCBI NO: 32481061 NR Description: Rubisco activase alpha form precursor
  misc_feature (44)..(474): Homolog of NCBI NO: 12620883 NR Description: ribulose-1,5-bisphosphate carboxylase/oxygenase
  misc_feature (23)..(474): Homolog of NCBI NO: 8918359 NR Description: RuBisCO activase large isoform precursor
  misc_feature (1)..(474): Homolog of NCBI NO: 32481065 NR Description: Rubisco activase alpha form precursor [Larrea
  misc_feature (1)..(438): Homolog of NCBI NO: 30687999 NR Description: auxin-regulated protein [Arabidopsis thaliana]
  misc_feature (23)..(474): Homolog of NCBI NO: 32481061 NR Description: Rubisco activase alpha form precursor
  misc_feature (23)..(474): Homolog of NCBI NO: 8918359 NR Description: RuBisCO activase large isoform precursor
  misc_feature (1)..(438): Homolog of NCBI NO: 30687999 NR Description: auxin-regulated protein [Arabidopsis thaliana]
  misc_feature (1)..(474): Homolog of NCBI NO: 18405145 NR Description: auxin-regulated protein [Arabidopsis thaliana]
  misc_feature (1)..(474): Homolog of NCBI NO: 15450379 NR Description: At2g39730/T5I7.3 [Arabidopsis thaliana]
  misc_feature (1)..(474): Homolog of NCBI NO: 23308421 NR Description: At2g39730/T5I7.3 [Arabidopsis thaliana]
  misc_feature (1)..(474): Homolog of NCBI NO: 81660 NR Description: ribulose-bisphosphate carboxylase activase (EC
  misc_feature (1)..(438): Homolog of NCBI NO: 30687995 NR Description: auxin-regulated protein [Arabidopsis thaliana]
  misc_feature (1)..(474): Homolog of NCBI NO: 32481065 NR Description: Rubisco activase alpha form precursor [Larrea
  misc_feature (44)..(474): Homolog of NCBI NO: 12620883 NR Description: ribulose-1,5-bisphosphate carboxylase/oxygenase
  misc_feature (1)..(438): Homolog of NCBI NO: 30687995 NR Description: auxin-regulated protein [Arabidopsis thaliana]
  misc_feature (1)..(474): Homolog of NCBI NO: 81660 NR Description: ribulose-bisphosphate carboxylase activase (EC
  misc_feature (1)..(474): Homolog of NCBI NO: 23308421 NR Description: At2g39730/T5I7.3 [Arabidopsis thaliana]
  misc_feature (1)..(474): Homolog of NCBI NO: 15450379 NR Description: At2g39730/T5I7.3 [Arabidopsis thaliana]
  misc_feature (1)..(474): Homolog of NCBI NO: 18405145 NR Description: auxin-regulated protein [Arabidopsis thaliana]

SEQ ID NO: 49323 - protein, 384 aa, Arabidopsis thaliana; identical to SEQ ID NO: 27708
  peptide (1)..(384): Ceres Seq. ID no. 13592260
  misc_feature (70)..(268): Pfam Name: ATPase family associated with various cellular Pfam Description: ATPase family associated with various cellular
  misc_feature (70)..(268): Pfam Name: ATPase family associated with various cellular Pfam Description: ATPase family associated with various cellular
  misc_feature (1)..(384): Homolog of NCBI NO: 32481061 NR Description: Rubisco activase alpha form precursor
  misc_feature (1)..(384): Homolog of NCBI NO: 12620883 NR Description: ribulose-1,5-bisphosphate carboxylase/oxygenase
  misc_feature (1)..(384): Homolog of NCBI NO: 8918359 NR Description: RuBisCO activase large isoform precursor
  misc_feature (1)..(384): Homolog of NCBI NO: 32481065 NR Description: Rubisco activase alpha form precursor [Larrea
  misc_feature (1)..(348): Homolog of NCBI NO: 30687999 NR Description: auxin-regulated protein [Arabidopsis thaliana]
  misc_feature (1)..(384): Homolog of NCBI NO: 32481061 NR Description: Rubisco activase alpha form precursor
  misc_feature (1)..(384): Homolog of NCBI NO: 8918359 NR Description: RuBisCO activase large isoform precursor
  misc_feature (1)..(348): Homolog of NCBI NO: 30687999 NR Description: auxin-regulated protein [Arabidopsis thaliana]
  misc_feature (1)..(384): Homolog of NCBI NO: 18405145 NR Description: auxin-regulated protein [Arabidopsis thaliana]
  misc_feature (1)..(384): Homolog of NCBI NO: 15450379 NR Description: At2g39730/T5I7.3 [Arabidopsis thaliana]
  misc_feature (1)..(384): Homolog of NCBI NO: 23308421 NR Description: At2g39730/T5I7.3 [Arabidopsis thaliana]
  misc_feature (1)..(384): Homolog of NCBI NO: 81660 NR Description: ribulose-bisphosphate carboxylase activase (EC
  misc_feature (1)..(348): Homolog of NCBI NO: 30687995 NR Description: auxin-regulated protein [Arabidopsis thaliana]
  misc_feature (1)..(384): Homolog of NCBI NO: 32481065 NR Description: Rubisco activase alpha form precursor [Larrea
  misc_feature (1)..(384): Homolog of NCBI NO: 12620883 NR Description: ribulose-1,5-bisphosphate carboxylase/oxygenase
  misc_feature (1)..(348): Homolog of NCBI NO: 30687995 NR Description: auxin-regulated protein [Arabidopsis thaliana]
  misc_feature (1)..(384): Homolog of NCBI NO: 81660 NR Description: ribulose-bisphosphate carboxylase activase (EC
  misc_feature (1)..(384): Homolog of NCBI NO: 23308421 NR Description: At2g39730/T5I7.3 [Arabidopsis thaliana]
  misc_feature (1)..(384): Homolog of NCBI NO: 15450379 NR Description: At2g39730/T5I7.3 [Arabidopsis thaliana]
  misc_feature (1)..(384): Homolog of NCBI NO: 18405145 NR Description: auxin-regulated protein [Arabidopsis thaliana]

SEQ ID NO: 49324 - protein, 375 aa, Arabidopsis thaliana; identical to SEQ ID NO: 27709
  peptide (1)..(375): Ceres Seq. ID no. 13592261
  misc_feature (61)..(259): Pfam Name: ATPase family associated with various cellular Pfam Description: ATPase family associated with various cellular
  misc_feature (61)..(259): Pfam Name: ATPase family associated with various cellular Pfam Description: ATPase family associated with various cellular
  misc_feature (1)..(375): Homolog of NCBI NO: 32481061 NR Description: Rubisco activase alpha form precursor
  misc_feature (1)..(375): Homolog of NCBI NO: 12620883 NR Description: ribulose-1,5-bisphosphate carboxylase/oxygenase
  misc_feature (1)..(375): Homolog of NCBI NO: 8918359 NR Description: RuBisCO activase large isoform precursor
  misc_feature (1)..(375): Homolog of NCBI NO: 32481065 NR Description: Rubisco activase alpha form precursor [Larrea
  misc_feature (1)..(339): Homolog of NCBI NO: 30687999 NR Description: auxin-regulated protein [Arabidopsis thaliana]
  misc_feature (1)..(375): Homolog of NCBI NO: 32481061 NR Description: Rubisco activase alpha form precursor
  misc_feature (1)..(375): Homolog of NCBI NO: 8918359 NR Description: RuBisCO activase large isoform precursor
  misc_feature (1)..(339): Homolog of NCBI NO: 30687999 NR Description: auxin-regulated protein [Arabidopsis thaliana]
  misc_feature (1)..(375): Homolog of NCBI NO: 18405145 NR Description: auxin-regulated protein [Arabidopsis thaliana]
  misc_feature (1)..(375): Homolog of NCBI NO: 15450379 NR Description: At2g39730/T5I7.3 [Arabidopsis thaliana]
  misc_feature (1)..(375): Homolog of NCBI NO: 23308421 NR Description: At2g39730/T5I7.3 [Arabidopsis thaliana]
  misc_feature (1)..(375): Homolog of NCBI NO: 81660 NR Description: ribulose-bisphosphate carboxylase activase (EC
  misc_feature (1)..(339): Homolog of NCBI NO: 30687995 NR Description: auxin-regulated protein [Arabidopsis thaliana]
  misc_feature (1)..(375): Homolog of NCBI NO: 32481065 NR Description: Rubisco activase alpha form precursor [Larrea
  misc_feature (1)..(375): Homolog of NCBI NO: 12620883 NR Description: ribulose-1,5-bisphosphate carboxylase/oxygenase
  misc_feature (1)..(339): Homolog of NCBI NO: 30687995 NR Description: auxin-regulated protein [Arabidopsis thaliana]
  misc_feature (1)..(375): Homolog of NCBI NO: 81660 NR Description: ribulose-bisphosphate carboxylase activase (EC
  misc_feature (1)..(375): Homolog of NCBI NO: 23308421 NR Description: At2g39730/T5I7.3 [Arabidopsis thaliana]
  misc_feature (1)..(375): Homolog of NCBI NO: 15450379 NR Description: At2g39730/T5I7.3 [Arabidopsis thaliana]
  misc_feature (1)..(375): Homolog of NCBI NO: 18405145 NR Description: auxin-regulated protein [Arabidopsis thaliana]

SEQ ID NO: 49325 - DNA, 1357 bp, Arabidopsis thaliana; identical to SEQ ID NO: 45687
  misc_feature (1)..(1357): Ceres Seq. ID no. 13646545
  misc_feature: MA Experiment ID: 108462 Result: Up-regulated in Transcription
  misc_feature: MA Experiment 108462 PARAMETER Experiment Name: At_Germinating_Seeds_cDNA_P Parameter: Age (day) Value: 2 vs. 0
  misc_feature: MA Experiment 108462 PARAMETER Experiment Name: At_Germinating_Seeds_cDNA_P Parameter: Tissue Value: Germinating Seeds
  misc_feature: MA Experiment ID: 108463 Result: Up-regulated in Transcription
  misc_feature: MA Experiment 108463 PARAMETER Experiment Name: At_Germinating_Seeds_cDNA_P Parameter: Age (day) Value: 3 vs. 0
  misc_feature: MA Experiment 108463 PARAMETER Experiment Name: At_Germinating_Seeds_cDNA_P Parameter: Tissue Value: Germinating Seeds
  misc_feature: MA Experiment ID: 108574 Result: Down-regulated in Transcription
  misc_feature: MA Experiment 108574 PARAMETER Experiment Name: At_Wounding__cDNA_P Parameter: Timepoint (hr) Value: 1
  misc_feature: MA Experiment 108574 PARAMETER Experiment Name: At_Wounding__cDNA_P Parameter: Tissue Value: Aerial
  misc_feature: MA Experiment 108574 PARAMETER Experiment Name: At_Wounding__cDNA_P Parameter: Treatment Value: Wounding vs. No Wounding
  misc_feature: MA Experiment ID: 108577 Result: Down-regulated in Transcription
  misc_feature: MA Experiment 108577 PARAMETER Experiment Name: At_42deg_Heat_cDNA_P Parameter: Temperature (deg C) Value: 42 vs. 22
  misc_feature: MA Experiment 108577 PARAMETER Experiment Name: At_42deg_Heat_cDNA_P Parameter: Timepoint (hr) Value: 6
  misc_feature: MA Experiment 108577 PARAMETER Experiment Name: At_42deg_Heat_cDNA_P Parameter: Tissue Value: Aerial
  misc_feature: MA Experiment ID: 108595 Result: Down-regulated in Transcription
  misc_feature: MA Experiment 108595 PARAMETER Experiment Name: At_Ler-pi_Ovule_cDNA_P Parameter: Plant Line Value: null
  misc_feature: MA Experiment ID: 108607 Result: Down-regulated in Transcription
  misc_feature: MA Experiment 108607 PARAMETER Experiment Name: At_100uM_ABA_cDNA_P Parameter: Timepoint (hr) Value: 4
  misc_feature: MA Experiment 108607 PARAMETER Experiment Name: At_100uM_ABA_cDNA_P Parameter: Tissue Value: Aerial
  misc_feature: MA Experiment 108607 PARAMETER Experiment Name: At_100uM_ABA_cDNA_P Parameter: Treatment Value: 100uM ABA vs. No Treatment
  misc_feature: MA Experiment ID: 108668 Result: Down-regulated in Transcription
  misc_feature: MA Experiment 108668 PARAMETER Experiment Name: At_2mM_SA_cDNA_P Parameter: Plant Line Value: WS
  misc_feature: MA Experiment 108668 PARAMETER Experiment Name: At_2mM_SA_cDNA_P Parameter: Timepoint (hr) Value: 6
  misc_feature: MA Experiment 108668 PARAMETER Experiment Name: At_2mM_SA_cDNA_P Parameter: Treatment Value: 2mM SA vs. No Treatment
  misc_feature: MA Experiment ID: 20000112 Result: Down-regulated in Transcription
  misc_feature: MA Experiment 20000112 PARAMETER Experiment Name: At_42deg_Heat_cDNA_P Parameter: Temperature (deg C) Value: 42 vs. 22
  misc_feature: MA Experiment 20000112 PARAMETER Experiment Name: At_42deg_Heat_cDNA_P Parameter: Timepoint (hr) Value: 2
  misc_feature: MA Experiment 20000112 PARAMETER Experiment Name: At_42deg_Heat_cDNA_P Parameter: Tissue Value: Aerial
  misc_feature: MA Experiment ID: 20000180 Result: Up-regulated in Transcription
  misc_feature: MA Experiment 20000180 PARAMETER Experiment Name: At_Germinating_Seeds_P Parameter: Age (hr) Value: 24 vs. 0
  misc_feature: MA Experiment 20000180 PARAMETER Experiment Name: At_Germinating_Seeds_P Parameter: Tissue Value: Germinating Seeds
  misc_feature: MA Experiment ID: 20000185 Result: Down-regulated in Transcription
  misc_feature: MA Experiment 20000185 PARAMETER Experiment Name: At_Roots__P Parameter: Age (day) Value: 7 vs. 21
  misc_feature: MA Experiment 20000185 PARAMETER Experiment Name: At_Roots__P Parameter: Organism Value: A. thaliana
  misc_feature: MA Experiment 20000185 PARAMETER Experiment Name: At_Roots__P Parameter: Tissue Value: Roots vs. Whole Plant
  misc_feature: MA Experiment ID: 20000224 Result: Down-regulated in Transcription
  misc_feature: MA Experiment ID: 20000235 Result: Down-regulated in Transcription
  misc_feature: MA Experiment 20000235 PARAMETER Experiment Name: At_Siliques_P Parameter: Age (day) Value: 21
  misc_feature: MA Experiment 20000235 PARAMETER Experiment Name: At_Siliques_P Parameter: Organism Value: A. thaliana
  misc_feature: MA Experiment 20000235 PARAMETER Experiment Name: At_Siliques_P Parameter: Plant Line Value: WS
  misc_feature: MA Experiment 20000235 PARAMETER Experiment Name: At_Siliques_P Parameter: Tissue Value: 5-10mm Siliques vs. Whole Plant
  misc_feature: MA Experiment ID: 20000264 Result: Down-regulated in Transcription
  misc_feature: MA Experiment 20000264 PARAMETER Experiment Name: At_Open_Flower_P Parameter: Age (day) Value: 21
  misc_feature: MA Experiment 20000264 PARAMETER Experiment Name: At_Open_Flower_P Parameter: Plant Line Value: WS
  misc_feature: MA Experiment 20000264 PARAMETER Experiment Name: At_Open_Flower_P Parameter: Tissue Value: Open Flower vs. Whole Plant
  misc_feature: MA Experiment ID: 20000438 Result: Up-regulated in Transcription
  misc_feature: MA Experiment 20000438 PARAMETER Experiment Name: At_Shoots__P Parameter: Age (day) Value: 14
  misc_feature: MA Experiment 20000438 PARAMETER Experiment Name: At_Shoots__P Parameter: Tissue Value: Shoots vs. Whole Plant
  misc_feature: MA Experiment ID: 20000439 Result: Down-regulated in Transcription
  misc_feature: MA Experiment 20000439 PARAMETER Experiment Name: At_Roots__P Parameter: Age (day) Value: 14 vs. 21
  misc_feature: MA Experiment 20000439 PARAMETER Experiment Name: At_Roots__P Parameter: Organism Value: A. thaliana
  misc_feature: MA Experiment 20000439 PARAMETER Experiment Name: At_Roots__P Parameter: Tissue Value: Roots vs. Whole Plant
  misc_feature: MA Experiment ID: 20001555 Result: Down-regulated in Transcription
  misc_feature: MA Experiment 20001555 PARAMETER Experiment Name: At_Drought_Soil_Dry_P Parameter: Age (day) Value: 24
  misc_feature: MA Experiment 20001555 PARAMETER Experiment Name: At_Drought_Soil_Dry_P Parameter: Organism Value: A. thaliana
  misc_feature: MA Experiment 20001555 PARAMETER Experiment Name: At_Drought_Soil_Dry_P Parameter: Plant Line Value: WS
  misc_feature: MA Experiment 20001555 PARAMETER Experiment Name: At_Drought_Soil_Dry_P Parameter: Post Timepoint (hr) Value: None
  misc_feature: MA Experiment 20001555 PARAMETER Experiment Name: At_Drought_Soil_Dry_P Parameter: Post-Treatment Value: None
  misc_feature: MA Experiment 20001555 PARAMETER Experiment Name: At_Drought_Soil_Dry_P Parameter: Timepoint (day) Value: 10
  misc_feature: MA Experiment 20001555 PARAMETER Experiment Name: At_Drought_Soil_Dry_P Parameter: Treatment Value: Drought vs. No Drought
  misc_feature: MA Experiment ID: 20001556 Result: Down-regulated in Transcription
  misc_feature: MA Experiment 20001556 PARAMETER Experiment Name: At_Drought_Soil_Dry_P Parameter: Age (day) Value: 26
  misc_feature: MA Experiment 20001556 PARAMETER Experiment Name: At_Drought_Soil_Dry_P Parameter: Organism Value: A. thaliana
  misc_feature: MA Experiment 20001556 PARAMETER Experiment Name: At_Drought_Soil_Dry_P Parameter: Plant Line Value: WS
  misc_feature: MA Experiment 20001556 PARAMETER Experiment Name: At_Drought_Soil_Dry_P Parameter: Post Timepoint (hr) Value: None
  misc_feature: MA Experiment 20001556 PARAMETER Experiment Name: At_Drought_Soil_Dry_P Parameter: Post-Treatment Value: None
  misc_feature: MA Experiment 20001556 PARAMETER Experiment Name: At_Drought_Soil_Dry_P Parameter: Timepoint (day) Value: 12
  misc_feature: MA Experiment 20001556 PARAMETER Experiment Name: At_Drought_Soil_Dry_P Parameter: Treatment Value: Drought vs. No Drought
  misc_feature: MA Experiment ID: 20001559 Result: Down-regulated in Transcription
  misc_feature: MA Experiment 20001559 PARAMETER Experiment Name: At_Drought_Soil_Dry_P Parameter: Age (day) Value: 28
  misc_feature: MA Experiment 20001559 PARAMETER Experiment Name: At_Drought_Soil_Dry_P Parameter: Organism Value: A. thaliana
  misc_feature: MA Experiment 20001559 PARAMETER Experiment Name: At_Drought_Soil_Dry_P Parameter: Plant Line Value: WS
  misc_feature: MA Experiment 20001559 PARAMETER Experiment Name: At_Drought_Soil_Dry_P Parameter: Post Timepoint (hr) Value: 29
  misc_feature: MA Experiment 20001559 PARAMETER Experiment Name: At_Drought_Soil_Dry_P Parameter: Post-Treatment Value: Re-Water vs. No Drought
  misc_feature: MA Experiment 20001559 PARAMETER Experiment Name: At_Drought_Soil_Dry_P Parameter: Timepoint (day) Value: 14
  misc_feature: MA Experiment 20001559 PARAMETER Experiment Name: At_Drought_Soil_Dry_P Parameter: Treatment Value: Drought vs. No Drought
  misc_feature: MA Experiment ID: 20001757 Result: Up-regulated in Transcription
  misc_feature: MA Experiment 20001757 PARAMETER Experiment Name: At_50mM_NH4NO3_L-to-H_P Parameter: Timepoint (hr) Value: 6
  misc_feature: MA Experiment 20001757 PARAMETER Experiment Name: At_50mM_NH4NO3_L-to-H_P Parameter: Tissue Value: Leaf
  misc_feature: MA Experiment 20001757 PARAMETER Experiment Name: At_50mM_NH4NO3_L-to-H_P Parameter: Treatment Value: 50mM NH4NO3 vs 100mM Mannitol
  misc_feature: MA Experiment ID: 20001906 Result: Down-regulated in Transcription
  misc_feature: MA Experiment 20001906 PARAMETER Experiment Name: At_Drought_Reproduction_P Parameter: Age (day) Value: 35
  misc_feature: MA Experiment 20001906 PARAMETER Experiment Name: At_Drought_Reproduction_P Parameter: Organism Value: A. thaliana
  misc_feature: MA Experiment 20001906 PARAMETER Experiment Name: At_Drought_Reproduction_P Parameter: Plant Line Value: WS
  misc_feature: MA Experiment 20001906 PARAMETER Experiment Name: At_Drought_Reproduction_P Parameter: Timepoint (day) Value: 5
  misc_feature: MA Experiment 20001906 PARAMETER Experiment Name: At_Drought_Reproduction_P Parameter: Tissue Value: Siliques
  misc_feature: MA Experiment 20001906 PARAMETER Experiment Name: At_Drought_Reproduction_P Parameter: Treatment Value: Drought vs. No Drought
  misc_feature: MA Experiment ID: 20001911 Result: Down-regulated in Transcription
  misc_feature: MA Experiment 20001911 PARAMETER Experiment Name: At_Drought_Reproduction_P Parameter: Age (day) Value: 40
  misc_feature: MA Experiment 20001911 PARAMETER Experiment Name: At_Drought_Reproduction_P Parameter: Organism Value: A. thaliana
  misc_feature: MA Experiment 20001911 PARAMETER Experiment Name: At_Drought_Reproduction_P Parameter: Plant Line Value: WS
  misc_feature: MA Experiment 20001911 PARAMETER Experiment Name: At_Drought_Reproduction_P Parameter: Timepoint (day) Value: 10
  misc_feature: MA Experiment 20001911 PARAMETER Experiment Name: At_Drought_Reproduction_P Parameter: Tissue Value: Flowers
  misc_feature: MA Experiment 20001911 PARAMETER Experiment Name: At_Drought_Reproduction_P Parameter: Treatment Value: Drought vs. No Drought

SEQ ID NO: 49326 - protein, 213 aa, Arabidopsis thaliana; identical to SEQ ID NO: 45688
  peptide (1)..(213): Ceres Seq. ID no. 13646546
  misc_feature (1)..(115): Homolog of NCBI NO: 18417127 NR Description: expressed protein [Arabidopsis thaliana]
  misc_feature (1)..(115): Homolog of NCBI NO: 21593735 NR Description: unknown [Arabidopsis thaliana]
  misc_feature (1)..(189): Homolog of NCBI NO: 21593735 NR Description: unknown [Arabidopsis thaliana]
  misc_feature (1)..(189): Homolog of NCBI NO: 18417127 NR Description: expressed protein [Arabidopsis thaliana]
  misc_feature (1)..(189): Homolog of NCBI NO: 34394002 NR Description: unknown protein [Oryza sativa (japonica
  misc_feature (1)..(213): Homolog of NCBI NO: 18401752 NR Description: expressed protein [Arabidopsis thaliana]
  misc_feature (1)..(115): Homolog of NCBI NO: 18417127 NR Description: expressed protein [Arabidopsis thaliana]
  misc_feature (1)..(115): Homolog of NCBI NO: 21593735 NR Description: unknown [Arabidopsis thaliana]
  misc_feature (1)..(189): Homolog of NCBI NO: 21593735 NR Description: unknown [Arabidopsis thaliana]
  misc_feature (1)..(189): Homolog of NCBI NO: 18417127 NR Description: expressed protein [Arabidopsis thaliana]
  misc_feature (1)..(189): Homolog of NCBI NO: 34394002 NR Description: unknown protein [Oryza sativa (japonica
  misc_feature (1)..(213): Homolog of NCBI NO: 18401752 NR Description: expressed protein [Arabidopsis thaliana]

SEQ ID NO: 49327 - protein, 114 aa, Arabidopsis thaliana; identical to SEQ ID NO: 45689
  peptide (1)..(114): Ceres Seq. ID no. 13646547

SEQ ID NO: 49328 - DNA, 1010 bp, Arabidopsis thaliana; identical to SEQ ID NO: 21192
  misc_feature (1)..(1010): Ceres Seq. ID no. 13648013
  misc_feature: MA Experiment ID: 108435 Result: Down-regulated in Transcription
  misc_feature: MA Experiment 108435 PARAMETER Experiment Name: At_stm_Mutants_cDNA_P Parameter: Plant Line Value: wt Landsburg vs stm
  misc_feature: MA Experiment 108435 PARAMETER Experiment Name: At_stm_Mutants_cDNA_P Parameter: Tissue Value: Shoot Apical Meristem Region
  misc_feature: MA Experiment ID: 108461 Result: Up-regulated in Transcription
  misc_feature: MA Experiment 108461 PARAMETER Experiment Name: At_Germinating_Seeds_cDNA_P Parameter: Age (day) Value: 1 vs. 0
  misc_feature: MA Experiment 108461 PARAMETER Experiment Name: At_Germinating_Seeds_cDNA_P Parameter: Tissue Value: Germinating Seeds
  misc_feature: MA Experiment ID: 108462 Result: Up-regulated in Transcription
  misc_feature: MA Experiment 108462 PARAMETER Experiment Name: At_Germinating_Seeds_cDNA_P Parameter: Age (day) Value: 2 vs. 0
  misc_feature: MA Experiment 108462 PARAMETER Experiment Name: At_Germinating_Seeds_cDNA_P Parameter: Tissue Value: Germinating Seeds
  misc_feature: MA Experiment ID: 108488 Result: Up-regulated in Transcription
  misc_feature: MA Experiment ID: 108561 Result: Down-regulated in Transcription
  misc_feature: MA Experiment 108561 PARAMETER Experiment Name: At_100uM_ABA_cDNA_P Parameter: Timepoint (hr) Value: 6
  misc_feature: MA Experiment 108561 PARAMETER Experiment Name: At_100uM_ABA_cDNA_P Parameter: Tissue Value: Aerial
  misc_feature: MA Experiment 108561 PARAMETER Experiment Name: At_100uM_ABA_cDNA_P Parameter: Treatment Value: 100uM ABA vs. No Treatment
  misc_feature: MA Experiment ID: 108573 Result: Down-regulated in Transcription
  misc_feature: MA Experiment 108573 PARAMETER Experiment Name: At_Drought_cDNA_P Parameter: Timepoint (hr) Value: 6
  misc_feature: MA Experiment 108573 PARAMETER Experiment Name: At_Drought_cDNA_P Parameter: Tissue Value: Aerial
  misc_feature: MA Experiment 108573 PARAMETER Experiment Name: At_Drought_cDNA_P Parameter: Treatment Value: Drought vs. No Drought
  misc_feature: MA Experiment ID: 108585 Result: Down-regulated in Transcription
  misc_feature: MA Experiment 108585 PARAMETER Experiment Name: At_5mM_NaNP_cDNA_P Parameter: Timepoint (hr) Value: 6
  misc_feature: MA Experiment 108585 PARAMETER Experiment Name: At_5mM_NaNP_cDNA_P Parameter: Tissue Value: Aerial
  misc_feature: MA Experiment 108585 PARAMETER Experiment Name: At_5mM_NaNP_cDNA_P Parameter: Treatment Value: null
  misc_feature: MA Experiment ID: 108595 Result: Down-regulated in Transcription
  misc_feature: MA Experiment 108595 PARAMETER Experiment Name: At_Ler-pi_Ovule_cDNA_P Parameter: Plant Line Value: null
  misc_feature: MA Experiment ID: 108607 Result: Down-regulated in Transcription
  misc_feature: MA Experiment 108607 PARAMETER Experiment Name: At_100uM_ABA_cDNA_P Parameter: Timepoint (hr) Value: 4
  misc_feature: MA Experiment 108607 PARAMETER Experiment Name: At_100uM_ABA_cDNA_P Parameter: Tissue Value: Aerial
  misc_feature: MA Experiment 108607 PARAMETER Experiment Name: At_100uM_ABA_cDNA_P Parameter: Treatment Value: 100uM ABA vs. No Treatment
  misc_feature: MA Experiment ID: 108668 Result: Down-regulated in Transcription
  misc_feature: MA Experiment 108668 PARAMETER Experiment Name: At_2mM_SA_cDNA_P Parameter: Plant Line Value: WS
  misc_feature: MA Experiment 108668 PARAMETER Experiment Name: At_2mM_SA_cDNA_P Parameter: Timepoint (hr) Value: 6
  misc_feature: MA Experiment 108668 PARAMETER Experiment Name: At_2mM_SA_cDNA_P Parameter: Treatment Value: 2mM SA vs. No Treatment
  misc_feature: MA Experiment ID: 20000070 Result: Down-regulated in Transcription
  misc_feature: MA Experiment 20000070 PARAMETER Experiment Name: At_100uM_ABA_Mutants_cDNA_P Parameter: Plant Line Value: CS24
  misc_feature: MA Experiment 20000070 PARAMETER Experiment Name: At_100uM_ABA_Mutants_cDNA_P Parameter: Timepoint (hr) Value: 6
  misc_feature: MA Experiment 20000070 PARAMETER Experiment Name: At_100uM_ABA_Mutants_cDNA_P Parameter: Tissue Value: Aerial
  misc_feature: MA Experiment 20000070 PARAMETER Experiment Name: At_100uM_ABA_Mutants_cDNA_P Parameter: Treatment Value: 100uM ABA vs. No Treatment
  misc_feature: MA Experiment ID: 20000071 Result: Down-regulated in Transcription
  misc_feature: MA Experiment 20000071 PARAMETER Experiment Name: At_100uM_ABA_Mutants_cDNA_P Parameter: Plant Line Value: CS8104
  misc_feature: MA Experiment 20000071 PARAMETER Experiment Name: At_100uM_ABA_Mutants_cDNA_P Parameter: Timepoint (hr) Value: 6
  misc_feature: MA Experiment 20000071 PARAMETER Experiment Name: At_100uM_ABA_Mutants_cDNA_P Parameter: Tissue Value: Aerial
  misc_feature: MA Experiment 20000071 PARAMETER Experiment Name: At_100uM_ABA_Mutants_cDNA_P Parameter: Treatment Value: 100uM ABA vs. No Treatment
  misc_feature: MA Experiment ID: 20000086 Result: Down-regulated in Transcription
  misc_feature: MA Experiment 20000086 PARAMETER Experiment Name: At_100uM_ABA_Mutants_cDNA_P Parameter: Plant Line Value: CS22
  misc_feature: MA Experiment 20000086 PARAMETER Experiment Name: At_100uM_ABA_Mutants_cDNA_P Parameter: Timepoint (hr) Value: 6
  misc_feature: MA Experiment 20000086 PARAMETER Experiment Name: At_100uM_ABA_Mutants_cDNA_P Parameter: Tissue Value: Aerial
  misc_feature: MA Experiment 20000086 PARAMETER Experiment Name: At_100uM_ABA_Mutants_cDNA_P Parameter: Treatment Value: 100uM ABA vs. No Treatment
  misc_feature: MA Experiment ID: 20000112 Result: Down-regulated in Transcription
  misc_feature: MA Experiment 20000112 PARAMETER Experiment Name: At_42deg_Heat_cDNA_P Parameter: Temperature (deg C) Value: 42 vs. 22
  misc_feature: MA Experiment 20000112 PARAMETER Experiment Name: At_42deg_Heat_cDNA_P Parameter: Timepoint (hr) Value: 2
  misc_feature: MA Experiment 20000112 PARAMETER Experiment Name: At_42deg_Heat_cDNA_P Parameter: Tissue Value: Aerial
  misc_feature: MA Experiment ID: 20000113 Result: Down-regulated in Transcription
  misc_feature: MA Experiment 20000113 PARAMETER Experiment Name: At_42deg_Heat_cDNA_P Parameter: Temperature (deg C) Value: 42 vs. 22
  misc_feature: MA Experiment 20000113 PARAMETER Experiment Name: At_42deg_Heat_cDNA_P Parameter: Timepoint (hr) Value: 8
  misc_feature: MA Experiment 20000113 PARAMETER Experiment Name: At_42deg_Heat_cDNA_P Parameter: Tissue Value: Aerial
  misc_feature: MA Experiment ID: 20000117 Result: Down-regulated in Transcription
  misc_feature: MA Experiment 20000117 PARAMETER Experiment Name: At_100uM_ABA_Mutants_cDNA_P Parameter: Plant Line Value: Columbia
  misc_feature: MA Experiment 20000117 PARAMETER Experiment Name: At_100uM_ABA_Mutants_cDNA_P Parameter: Timepoint (hr) Value: 6
  misc_feature: MA Experiment 20000117 PARAMETER Experiment Name: At_100uM_ABA_Mutants_cDNA_P Parameter: Tissue Value: Aerial
  misc_feature: MA Experiment 20000117 PARAMETER Experiment Name: At_100uM_ABA_Mutants_cDNA_P Parameter: Treatment Value: 100uM ABA vs. No Treatment
  misc_feature: MA Experiment ID: 20000173 Result: Down-regulated in Transcription
  misc_feature: MA Experiment 20000173 PARAMETER Experiment Name: At_42deg_Heat_P Parameter: Age (day) Value: 14
  misc_feature: MA Experiment 20000173 PARAMETER Experiment Name: At_42deg_Heat_P Parameter: Organism Value: A. thaliana
  misc_feature: MA Experiment 20000173 PARAMETER Experiment Name: At_42deg_Heat_P Parameter: Plant Line Value: WS
  misc_feature: MA Experiment 20000173 PARAMETER Experiment Name: At_42deg_Heat_P Parameter: Temperature (deg C) Value: 42 vs. 22
  misc_feature: MA Experiment 20000173 PARAMETER Experiment Name: At_42deg_Heat_P Parameter: Timepoint (hr) Value: 6
  misc_feature: MA Experiment 20000173 PARAMETER Experiment Name: At_42deg_Heat_P Parameter: Tissue Value: Aerial
  misc_feature: MA Experiment ID: 20000180 Result: Up-regulated in Transcription
  misc_feature: MA Experiment 20000180 PARAMETER Experiment Name: At_Germinating_Seeds_P Parameter: Age (hr) Value: 24 vs. 0
  misc_feature: MA Experiment 20000180 PARAMETER Experiment Name: At_Germinating_Seeds_P Parameter: Tissue Value: Germinating Seeds
  misc_feature: MA Experiment ID: 20000182 Result: Down-regulated in Transcription
  misc_feature: MA Experiment 20000182 PARAMETER Experiment Name: At_2mM_SA_P Parameter: Age (day) Value: 14
  misc_feature: MA Experiment 20000182 PARAMETER Experiment Name: At_2mM_SA_P Parameter: Organism Value: A. thaliana
  misc_feature: MA Experiment 20000182 PARAMETER Experiment Name: At_2mM_SA_P Parameter: Plant Line Value: WS
  misc_feature: MA Experiment 20000182 PARAMETER Experiment Name: At_2mM_SA_P Parameter: Timepoint (hr) Value: 6
  misc_feature: MA Experiment 20000182 PARAMETER Experiment Name: At_2mM_SA_P Parameter: Tissue Value: Aerial
  misc_feature: MA Experiment 20000182 PARAMETER Experiment Name: At_2mM_SA_P Parameter: Treatment Value: 2mM SA vs. No Treatment
  misc_feature: MA Experiment ID: 20000185 Result: Down-regulated in Transcription
  misc_feature: MA Experiment 20000185 PARAMETER Experiment Name: At_Roots__P Parameter: Age (day) Value: 7 vs. 21
  misc_feature: MA Experiment 20000185 PARAMETER Experiment Name: At_Roots__P Parameter: Organism Value: A. thaliana
  misc_feature: MA Experiment 20000185 PARAMETER Experiment Name: At_Roots__P Parameter: Tissue Value: Roots vs. Whole Plant
  misc_feature: MA Experiment ID: 20000224 Result: Up-regulated in Transcription
  misc_feature: MA Experiment ID: 20000234 Result: Up-regulated in Transcription
  misc_feature: MA Experiment 20000234 PARAMETER Experiment Name: At_Siliques_P Parameter: Age (day) Value: 21
  misc_feature: MA Experiment 20000234 PARAMETER Experiment Name: At_Siliques_P Parameter: Organism Value: A. thaliana
  misc_feature: MA Experiment 20000234 PARAMETER Experiment Name: At_Siliques_P Parameter: Plant Line Value: WS
  misc_feature: MA Experiment 20000234 PARAMETER Experiment Name: At_Siliques_P Parameter: Tissue Value: Less Than 5mm Siliques vs. Whole Plant
  misc_feature: MA Experiment ID: 20000437 Result: Down-regulated in Transcription
  misc_feature: MA Experiment 20000437 PARAMETER Experiment Name: At_Drought_P Parameter: Age (day) Value: 8
  misc_feature: MA Experiment 20000437 PARAMETER Experiment Name: At_Drought_P Parameter: Organism Value: A. thaliana
  misc_feature: MA Experiment 20000437 PARAMETER Experiment Name: At_Drought_P Parameter: Plant Line Value: WS
  misc_feature: MA Experiment 20000437 PARAMETER Experiment Name: At_Drought_P Parameter: Timepoint (hr) Value: 24
  misc_feature: MA Experiment 20000437 PARAMETER Experiment Name: At_Drought_P Parameter: Tissue Value: Whole Plant
  misc_feature: MA Experiment 20000437 PARAMETER Experiment Name: At_Drought_P Parameter: Treatment Value: Drought vs. No Drought
  misc_feature: MA Experiment ID: 20000438 Result: Up-regulated in Transcription
  misc_feature: MA Experiment 20000438 PARAMETER Experiment Name: At_Shoots__P Parameter: Age (day) Value: 14
  misc_feature: MA Experiment 20000438 PARAMETER Experiment Name: At_Shoots__P Parameter: Tissue Value: Shoots vs. Whole Plant
  misc_feature: MA Experiment ID: 20000439 Result: Down-regulated in Transcription
  misc_feature: MA Experiment 20000439 PARAMETER Experiment Name: At_Roots__P Parameter: Age (day) Value: 14 vs. 21
  misc_feature: MA Experiment 20000439 PARAMETER Experiment Name: At_Roots__P Parameter: Organism Value: A. thaliana
  misc_feature: MA Experiment 20000439 PARAMETER Experiment Name: At_Roots__P Parameter: Tissue Value: Roots vs. Whole Plant
  misc_feature: MA Experiment ID: 20000794 Result: Down-regulated in Transcription
  misc_feature: MA Experiment 20000794 PARAMETER Experiment Name: At_Petals_P Parameter: Age (day) Value: 23-25 days
  misc_feature: MA Experiment 20000794 PARAMETER Experiment Name: At_Petals_P Parameter: Plant Line Value: WS
  misc_feature: MA Experiment 20000794 PARAMETER Experiment Name: At_Petals_P Parameter: Tissue Value: Petals vs. Whole plant
  misc_feature: MA Experiment ID: 20001248 Result: Down-regulated in Transcription
  misc_feature: MA Experiment 20001248 PARAMETER Experiment Name: At_Far-red-induction_P Parameter: Age (day) Value: 7
  misc_feature: MA Experiment 20001248 PARAMETER Experiment Name: At_Far-red-induction_P Parameter: Light Value: Far-red vs. White
  misc_feature: MA Experiment 20001248 PARAMETER Experiment Name: At_Far-red-induction_P Parameter: Organism Value: A. thaliana
  misc_feature: MA Experiment 20001248 PARAMETER Experiment Name: At_Far-red-induction_P Parameter: Plant Line Value: Columbia
  misc_feature: MA Experiment 20001248 PARAMETER Experiment Name: At_Far-red-induction_P Parameter: Timepoint (hr) Value: 4
  misc_feature: MA Experiment 20001248 PARAMETER Experiment Name: At_Far-red-induction_P Parameter: Tissue Value: Whole Plant
  misc_feature: MA Experiment ID: 20001450 Result: Down-regulated in Transcription
  misc_feature: MA Experiment 20001450 PARAMETER Experiment Name: At_Far-red-induction_P Parameter: Age (day) Value: 7
  misc_feature: MA Experiment 20001450 PARAMETER Experiment Name: At_Far-red-induction_P Parameter: Light Value: Far-red vs. White
  misc_feature: MA Experiment 20001450 PARAMETER Experiment Name: At_Far-red-induction_P Parameter: Organism Value: A. thaliana
  misc_feature: MA Experiment 20001450 PARAMETER Experiment Name: At_Far-red-induction_P Parameter: Plant Line Value: Columbia
  misc_feature: MA Experiment 20001450 PARAMETER Experiment Name: At_Far-red-induction_P Parameter: Timepoint (hr) Value: 8
  misc_feature: MA Experiment 20001450 PARAMETER Experiment Name: At_Far-red-induction_P Parameter: Tissue Value: Whole Plant
  misc_feature: MA Experiment ID: 20001905 Result: Down-regulated in Transcription
  misc_feature: MA Experiment 20001905 PARAMETER Experiment Name: At_Drought_Reproduction_P Parameter: Age (day) Value: 40
  misc_feature: MA Experiment 20001905 PARAMETER Experiment Name: At_Drought_Reproduction_P Parameter: Organism Value: A. thaliana
  misc_feature: MA Experiment 20001905 PARAMETER Experiment Name: At_Drought_Reproduction_P Parameter: Plant Line Value: WS
  misc_feature: MA Experiment 20001905 PARAMETER Experiment Name: At_Drought_Reproduction_P Parameter: Timepoint (day) Value: 10
  misc_feature: MA Experiment 20001905 PARAMETER Experiment Name: At_Drought_Reproduction_P Parameter: Tissue Value: Rosettes
  misc_feature: MA Experiment 20001905 PARAMETER Experiment Name: At_Drought_Reproduction_P Parameter: Treatment Value: Drought vs. No Drought
  misc_feature: MA Experiment ID: 20001906 Result: Down-regulated in Transcription
  misc_feature: MA Experiment 20001906 PARAMETER Experiment Name: At_Drought_Reproduction_P Parameter: Age (day) Value: 35
  misc_feature: MA Experiment 20001906 PARAMETER Experiment Name: At_Drought_Reproduction_P Parameter: Organism Value: A. thaliana
  misc_feature: MA Experiment 20001906 PARAMETER Experiment Name: At_Drought_Reproduction_P Parameter: Plant Line Value: WS
  misc_feature: MA Experiment 20001906 PARAMETER Experiment Name: At_Drought_Reproduction_P Parameter: Timepoint (day) Value: 5
  misc_feature: MA Experiment 20001906 PARAMETER Experiment Name: At_Drought_Reproduction_P Parameter: Tissue Value: Siliques
  misc_feature: MA Experiment 20001906 PARAMETER Experiment Name: At_Drought_Reproduction_P Parameter: Treatment Value: Drought vs. No Drought
  misc_feature: MA Experiment ID: 20001908 Result: Down-regulated in Transcription
  misc_feature: MA Experiment 20001908 PARAMETER Experiment Name: At_Drought_Reproduction_P Parameter: Age (day) Value: 40
  misc_feature: MA Experiment 20001908 PARAMETER Experiment Name: At_Drought_Reproduction_P Parameter: Organism Value: A. thaliana
  misc_feature: MA Experiment 20001908 PARAMETER Experiment Name: At_Drought_Reproduction_P Parameter: Plant Line Value: WS
  misc_feature: MA Experiment 20001908 PARAMETER Experiment Name: At_Drought_Reproduction_P Parameter: Timepoint (day) Value: 10
  misc_feature: MA Experiment 20001908 PARAMETER Experiment Name: At_Drought_Reproduction_P Parameter: Tissue Value: Siliques
  misc_feature: MA Experiment 20001908 PARAMETER Experiment Name: At_Drought_Reproduction_P Parameter: Treatment Value: Drought vs. No Drought
  misc_feature: Phenotype: WHOLE PLANT Color-Yellow-Green Viable 1
  misc_feature: Phenotype: WHOLE PLANT Color-Yellow-Green Viable 1
  misc_feature: Phenotype: WHOLE PLANT Color-Yellow-Green Viable 1
  misc_feature: Phenotype: WHOLE PLANT Color-Yellow-Green Viable 1
  misc_feature: Phenotype: WHOLE PLANT Color-Yellow-Green Viable 1

SEQ ID NO: 49329 - protein, 262 aa, Arabidopsis thaliana; identical to SEQ ID NO: 21193
  peptide (1)..(262): Ceres Seq. ID no. 15219523
  misc_feature (1)..(261): Homolog of NCBI NO: 8978078 NR Description: Lil3 protein [Arabidopsis thaliana]
  misc_feature (1)..(261): Homolog of NCBI NO: 30695110 NR Description: Lil3 protein [Arabidopsis thaliana]
  misc_feature (1)..(262): Homolog of NCBI NO: 18414927 NR Description: Lil3 protein [Arabidopsis thaliana]
  misc_feature (1)..(262): Homolog of NCBI NO: 7485188 NR Description: hypothetical protein - Arabidopsis thaliana
  misc_feature (1)..(262): Homolog of NCBI NO: 21555799 NR Description: Lil3 protein [Arabidopsis thaliana]
  misc_feature (1)..(261): Homolog of NCBI NO: 8978078 NR Description: Lil3 protein [Arabidopsis thaliana]
  misc_feature (1)..(261): Homolog of NCBI NO: 30695110 NR Description: Lil3 protein [Arabidopsis thaliana]
  misc_feature (1)..(262): Homolog of NCBI NO: 18414927 NR Description: Lil3 protein [Arabidopsis thaliana]
  misc_feature (1)..(262): Homolog of NCBI NO: 7485188 NR Description: hypothetical protein - Arabidopsis thaliana
  misc_feature (1)..(262): Homolog of NCBI NO: 21555799 NR Description: Lil3 protein [Arabidopsis thaliana]

SEQ ID NO: 49330 - protein, 170 aa, Arabidopsis thaliana; identical to SEQ ID NO: 21194
  peptide (1)..(170): Ceres Seq. ID no. 15219524
  misc_feature (1)..(169): Homolog of NCBI NO: 8978078 NR Description: Lil3 protein [Arabidopsis thaliana]
  misc_feature (1)..(169): Homolog of NCBI NO: 30695110 NR Description: Lil3 protein [Arabidopsis thaliana]
  misc_feature (1)..(170): Homolog of NCBI NO: 18414927 NR Description: Lil3 protein [Arabidopsis thaliana]
  misc_feature (1)..(170): Homolog of NCBI NO: 7485188 NR Description: hypothetical protein - Arabidopsis thaliana
  misc_feature (1)..(170): Homolog of NCBI NO: 21555799 NR Description: Lil3 protein [Arabidopsis thaliana]
  misc_feature (1)..(169): Homolog of NCBI NO: 8978078 NR Description: Lil3 protein [Arabidopsis thaliana]
  misc_feature (1)..(169): Homolog of NCBI NO: 30695110 NR Description: Lil3 protein [Arabidopsis thaliana]
  misc_feature (1)..(170): Homolog of NCBI NO: 18414927 NR Description: Lil3 protein [Arabidopsis thaliana]
  misc_feature (1)..(170): Homolog of NCBI NO: 7485188 NR Description: hypothetical protein - Arabidopsis thaliana
  misc_feature (1)..(170): Homolog of NCBI NO: 21555799 NR Description: Lil3 protein [Arabidopsis thaliana]

SEQ ID NO: 49331 - DNA, 1849 bp, Arabidopsis thaliana
  misc_feature (1)..(1849): Ceres Seq. ID no. 13587980
  misc_feature: MA Experiment ID: 20000169 Result: Up-regulated in Transcription
  misc_feature: MA Experiment 20000169 PARAMETER Experiment Name: At_100uM_ABA_P Parameter: Age (day) Value: 14
  misc_feature: MA Experiment 20000169 PARAMETER Experiment Name: At_100uM_ABA_P Parameter: Organism Value: A. thaliana
  misc_feature: MA Experiment 20000169 PARAMETER Experiment Name: At_100uM_ABA_P Parameter: Plant Line Value: WS
  misc_feature: MA Experiment 20000169 PARAMETER Experiment Name: At_100uM_ABA_P Parameter: Timepoint (hr) Value: 6
  misc_feature: MA Experiment 20000169 PARAMETER Experiment Name: At_100uM_ABA_P Parameter: Tissue Value: Aerial
  misc_feature: MA Experiment 20000169 PARAMETER Experiment Name: At_100uM_ABA_P Parameter: Treatment Value: 100uM ABA vs. No Treatment
  misc_feature: MA Experiment ID: 20000173 Result: Down-regulated in Transcription
  misc_feature: MA Experiment 20000173 PARAMETER Experiment Name: At_42deg_Heat_P Parameter: Age (day) Value: 14
  misc_feature: MA Experiment 20000173 PARAMETER Experiment Name: At_42deg_Heat_P Parameter: Organism Value: A. thaliana
  misc_feature: MA Experiment 20000173 PARAMETER Experiment Name: At_42deg_Heat_P Parameter: Plant Line Value: WS
  misc_feature: MA Experiment 20000173 PARAMETER Experiment Name: At_42deg_Heat_P Parameter: Temperature (deg C) Value: 42 vs. 22
  misc_feature: MA Experiment 20000173 PARAMETER Experiment Name: At_42deg_Heat_P Parameter: Timepoint (hr) Value: 6
  misc_feature: MA Experiment 20000173 PARAMETER Experiment Name: At_42deg_Heat_P Parameter: Tissue Value: Aerial
  misc_feature: MA Experiment ID: 20000180 Result: Up-regulated in Transcription
  misc_feature: MA Experiment 20000180 PARAMETER Experiment Name: At_Germinating_Seeds_P Parameter: Age (hr) Value: 24 vs. 0
  misc_feature: MA Experiment 20000180 PARAMETER Experiment Name: At_Germinating_Seeds_P Parameter: Tissue Value: Germinating Seeds
  misc_feature: MA Experiment ID: 20000185 Result: Down-regulated in Transcription
  misc_feature: MA Experiment 20000185 PARAMETER Experiment Name: At_Roots__P Parameter: Age (day) Value: 7 vs. 21
  misc_feature: MA Experiment 20000185 PARAMETER Experiment Name: At_Roots__P Parameter: Organism Value: A. thaliana
  misc_feature: MA Experiment 20000185 PARAMETER Experiment Name: At_Roots__P Parameter: Tissue Value: Roots vs. Whole Plant
  misc_feature: MA Experiment ID: 20000213 Result: Up-regulated in Transcription
  misc_feature: MA Experiment 20000213 PARAMETER Experiment Name: At_4deg_Cold_P Parameter: Timepoint (hr) Value: 2
  misc_feature: MA Experiment ID: 20000227 Result: Down-regulated in Transcription
  misc_feature: MA Experiment 20000227 PARAMETER Experiment Name: At_Root-Tips-vs-Tops_P Parameter: Tissue Value: Root Tips vs. Root Tops
  misc_feature: MA Experiment ID: 20000234 Result: Down-regulated in Transcription
  misc_feature: MA Experiment 20000234 PARAMETER Experiment Name: At_Siliques_P Parameter: Age (day) Value: 21
  misc_feature: MA Experiment 20000234 PARAMETER Experiment Name: At_Siliques_P Parameter: Organism Value: A. thaliana
  misc_feature: MA Experiment 20000234 PARAMETER Experiment Name: At_Siliques_P Parameter: Plant Line Value: WS
  misc_feature: MA Experiment 20000234 PARAMETER Experiment Name: At_Siliques_P Parameter: Tissue Value: Less Than 5mm Siliques vs. Whole Plant
  misc_feature: MA Experiment ID: 20000439 Result: Down-regulated in Transcription
  misc_feature: MA Experiment 20000439 PARAMETER Experiment Name: At_Roots__P Parameter: Age (day) Value: 14 vs. 21
  misc_feature: MA Experiment 20000439 PARAMETER Experiment Name: At_Roots__P Parameter: Organism Value: A. thaliana
  misc_feature: MA Experiment 20000439 PARAMETER Experiment Name: At_Roots__P Parameter: Tissue Value: Roots vs. Whole Plant
  misc_feature: MA Experiment ID: 20001248 Result: Down-regulated in Transcription
  misc_feature: MA Experiment 20001248 PARAMETER Experiment Name: At_Far-red-induction_P Parameter: Age (day) Value: 7
  misc_feature: MA Experiment 20001248 PARAMETER Experiment Name: At_Far-red-induction_P Parameter: Light Value: Far-red vs. White
  misc_feature: MA Experiment 20001248 PARAMETER Experiment Name: At_Far-red-induction_P Parameter: Organism Value: A. thaliana
  misc_feature: MA Experiment 20001248 PARAMETER Experiment Name: At_Far-red-induction_P Parameter: Plant Line Value: Columbia
  misc_feature: MA Experiment 20001248 PARAMETER Experiment Name: At_Far-red-induction_P Parameter: Timepoint (hr) Value: 4
  misc_feature: MA Experiment 20001248 PARAMETER Experiment Name: At_Far-red-induction_P Parameter: Tissue Value: Whole Plant
  misc_feature: MA Experiment ID: 20001451 Result: Down-regulated in Transcription
  misc_feature: MA Experiment 20001451 PARAMETER Experiment Name: At_Far-red-induction_P Parameter: Age (day) Value: 7
  misc_feature: MA Experiment 20001451 PARAMETER Experiment Name: At_Far-red-induction_P Parameter: Light Value: Far-red vs. White
  misc_feature: MA Experiment 20001451 PARAMETER Experiment Name: At_Far-red-induction_P Parameter: Organism Value: A. thaliana
  misc_feature: MA Experiment 20001451 PARAMETER Experiment Name: At_Far-red-induction_P Parameter: Plant Line Value: Columbia
  misc_feature: MA Experiment 20001451 PARAMETER Experiment Name: At_Far-red-induction_P Parameter: Timepoint (hr) Value: 24
  misc_feature: MA Experiment 20001451 PARAMETER Experiment Name: At_Far-red-induction_P Parameter: Tissue Value: Whole Plant
  misc_feature: MA Experiment ID: 20001558 Result: Up-regulated in Transcription
  misc_feature: MA Experiment 20001558 PARAMETER Experiment Name: At_Drought_Soil_Dry_P Parameter: Age (day) Value: 27
  misc_feature: MA Experiment 20001558 PARAMETER Experiment Name: At_Drought_Soil_Dry_P Parameter: Organism Value: A. thaliana
  misc_feature: MA Experiment 20001558 PARAMETER Experiment Name: At_Drought_Soil_Dry_P Parameter: Plant Line Value: WS
  misc_feature: MA Experiment 20001558 PARAMETER Experiment Name: At_Drought_Soil_Dry_P Parameter: Post Timepoint (hr) Value: 6
  misc_feature: MA Experiment 20001558 PARAMETER Experiment Name: At_Drought_Soil_Dry_P Parameter: Post-Treatment Value: Re-Water vs. No Drought
  misc_feature: MA Experiment 20001558 PARAMETER Experiment Name: At_Drought_Soil_Dry_P Parameter: Timepoint (day) Value: 13
  misc_feature: MA Experiment 20001558 PARAMETER Experiment Name: At_Drought_Soil_Dry_P Parameter: Treatment Value: Drought vs. No Drought
acagacaaacaaaaaaaggtttggttccaaaagctaaaaagcttccatctacattagagtctctctatttagcatttacacacaatcacacacacacacacacacacaccaaaatgatagcttacatagaaccatacttcttggataacgacgccgaggctgcctctgccgccaccgccgccggaaaatctacggatggtgtttctgagtcacttaacatccaaggagaaatcttatgtggtggagctgcggcggatatcgccgggagagattttggcggcatgaactgtgtgaagcctcttgctgtggtgagaccagtgggaccggaagatatcgccggagcggtgaaagcggctctgaggtcagataaactaacggtggcggcgcgtggaaacggccattctatcaacggtcaagccatggcggaaggaggactcgttgtcgatatgagtaccacggcggagaatcatttcgaggttggttatttatccggcggtgatgccacggcgtttgttgatgtctccggaggggcattatgggaagatgtattgaaacggtgcgtttcggagtacggtttggctccgaggtcttggactgattatcttgggttaacggtgggaggtacgttgtcaaatgccggcgttagtggtcaagcgttccgttacggaccacagacgtcaaatgtaacggagttggacgtcgttacgggaaatggtgacgtcgttacttgctcggagattgagaattcagagctattcttctctgttttaggtggtcttggtcagtttggtatcatcaccagagctagggttttgctacagccagctcctgatatggtgagatggataagagtagtatacaccgagttcgatgagttcactcaagacgccgagtggctagtaagtcagaagaacgagtcatcgttcgattacgtggaaggattcgtgtttgtcaacggtgctgacccggttaacggatggccaacagttcccctccacccggaccacgagtttgacccgacccgactaccacaatcttgcgggtcggttctttattgcctcgaactcggtcttcactacagagactccgattccaactcaaccattgacaagagggtggagagattgatcggacggctaagatttaatgaaggattaagattcgaggtagatctgccgtacgttgactttttactacgagtcaaacggtcagaagaaatcgcgaaggagaacggtacgtgggaaacgcctcacccttggctcaacctcttcgtgtcgaagcgagacatcggagatttcaatcggacggtgttcaaagaacttgtcaagaacggagtcaatggtccaatgcttgtgtacccactcttgcgaagcaggtgggatgatcggacgtccgtggttataccggaagaaggagagatattctacattgtggcattgcttcggttcgtgccgccgtgtgcgaaagtctcttcggtagagaaaatggtagctcaaaaccaagagatcgttcattggtgtgtcaaaaacggaattgattacaaattgtatcttcctcattacaagtctcaagaggaatggattcgccattttggaaaccgatggtcgagatttgttgataggaaagctatgtttgatcccatggctatactttcaccgggtcaaaagattttcaataggtctctttgacccctcatatttttactttttttacttttcttatttttacttttgtattcttgagttttgtggtctttatgtaattttttctgtatttttcttttttcccaagaaaaaaatcagctggttttttataaaaggtggcctacgagtcatgtccaattatgaat

SEQ ID NO: 49332 - protein, 561 aa, Arabidopsis thaliana
  peptide (1)..(561): Ceres Seq. ID no. 13587981
  misc_feature (99)..(261): Pfam Name: FAD binding domain Pfam Description: FAD binding domain
  misc_feature (87)..(561): Homolog of NCBI NO: 23267157 NR Description: cytokinin dehydrogenase 2 [Hordeum vulgare]
  misc_feature (87)..(558): Homolog of NCBI NO: 34910002 NR Description: putative cytokinin oxidase
  misc_feature (89)..(561): Homolog of NCBI NO: 38520861 NR Description: cytokinin oxidase 2 [Zea mays var. nobilis]
  misc_feature (70)..(560): Homolog of NCBI NO: 15227374 NR Description: cytokinin oxidase family [Arabidopsis thaliana]
  misc_feature (89)..(561): Homolog of NCBI NO: 38520865 NR Description: cytokinin oxidase 3 [Zea mays]
  misc_feature (66)..(561): Homolog of NCBI NO: 11120516 NR Description: cytokinin oxidase [Arabidopsis thaliana]
  misc_feature (66)..(561): Homolog of NCBI NO: 22330649 NR Description: cytokinin oxidase family [Arabidopsis thaliana]
  misc_feature (89)..(561): Homolog of NCBI NO: 38520863 NR Description: cytokinin oxidase 3 [Zea mays]
  misc_feature (84)..(561): Homolog of NCBI NO: 20161335 NR Description: putative cytokinin oxidase
  misc_feature (38)..(561): Homolog of NCBI NO: 30688201 NR Description: FAD-linked oxidoreductase family [Arabidopsis
RQTKKGLVPKAKKLPSTLESLYLAFTHNHTHTHTHTKMIAYIEPYFLDNDAEAASAATAAGKSTDGVSESLNIQGEILCGGAAADIAGRDFGGMNCVKPLAVVRPVGPEDIAGAVKAALRSDKLTVAARGNGHSINGQAMAEGGLVVDMSTTAENHFEVGYLSGGDATAFVDVSGGALWEDVLKRCVSEYGLAPRSWTDYLGLTVGGTLSNAGVSGQAFRYGPQTSNVTELDVVTGNGDVVTCSEIENSELFFSVLGGLGQFGIITRARVLLQPAPDMVRWIRVVYTEFDEFTQDAEWLVSQKNESSFDYVEGFVFVNGADPVNGWPTVPLHPDHEFDPTRLPQSCGSVLYCLELGLHYRDSDSNSTIDKRVERLIGRLRFNEGLRFEVDLPYVDFLLRVKRSEEIAKENGTWETPHPWLNLFVSKRDIGDFNRTVFKELVKNGVNGPMLVYPLLRSRWDDRTSVVIPEEGEIFYIVALLRFVPPCAKVSSVEKMVAQNQEIVHWCVKNGIDYKLYLPHYKSQEEWIRHFGNRWSRFVDRKAMFDPMAILSPGQKIFNRSL

SEQ ID NO: 49333 - protein, 524 aa, Arabidopsis thaliana
  peptide (1)..(524): Ceres Seq. ID no. 13587982
  misc_feature (62)..(224): Pfam Name: FAD binding domain Pfam Description: FAD binding domain
  misc_feature (50)..(524): Homolog of NCBI NO: 23267157 NR Description: cytokinin dehydrogenase 2 [Hordeum vulgare]
  misc_feature (50)..(521): Homolog of NCBI NO: 34910002 NR Description: putative cytokinin oxidase
  misc_feature (52)..(524): Homolog of NCBI NO: 38520861 NR Description: cytokinin oxidase 2 [Zea mays var. nobilis]
  misc_feature (33)..(523): Homolog of NCBI NO: 15227374 NR Description: cytokinin oxidase family [Arabidopsis thaliana]
  misc_feature (52)..(524): Homolog of NCBI NO: 38520865 NR Description: cytokinin oxidase 3 [Zea mays]
  misc_feature (29)..(524): Homolog of NCBI NO: 11120516 NR Description: cytokinin oxidase [Arabidopsis thaliana]
  misc_feature (29)..(524): Homolog of NCBI NO: 22330649 NR Description: cytokinin oxidase family [Arabidopsis thaliana]
  misc_feature (52)..(524): Homolog of NCBI NO: 38520863 NR Description: cytokinin oxidase 3 [Zea mays]
  misc_feature (47)..(524): Homolog of NCBI NO: 20161335 NR Description: putative cytokinin oxidase
  misc_feature (1)..(524): Homolog of NCBI NO: 30688201 NR Description: FAD-linked oxidoreductase family [Arabidopsis
MIAYIEPYFLDNDAEAASAATAAGKSTDGVSESLNIQGEILCGGAAADIAGRDFGGMNCVKPLAVVRPVGPEDIAGAVKAALRSDKLTVAARGNGHSINGQAMAEGGLVVDMSTTAENHFEVGYLSGGDATAFVDVSGGALWEDVLKRCVSEYGLAPRSWTDYLGLTVGGTLSNAGVSGQAFRYGPQTSNVTELDVVTGNGDVVTCSEIENSELFFSVLGGLGQFGIITRARVLLQPAPDMVRWIRVVYTEFDEFTQDAEWLVSQKNESSFDYVEGFVFVNGADPVNGWPTVPLHPDHEFDPTRLPQSCGSVLYCLELGLHYRDSDSNSTIDKRVERLIGRLRFNEGLRFEVDLPYVDFLLRVKRSEEIAKENGTWETPHPWLNLFVSKRDIGDFNRTVFKELVKNGVNGPMLVYPLLRSRWDDRTSVVIPEEGEIFYIVALLRFVPPCAKVSSVEKMVAQNQEIVHWCVKNGIDYKLYLPHYKSQEEWIRHFGNRWSRFVDRKAMFDPMAILSPGQKIFNRSL

SEQ ID NO: 49334 - protein, 468 aa, Arabidopsis thaliana
  peptide (1)..(468): Ceres Seq. ID no. 13587983
  misc_feature (6)..(168): Pfam Name: FAD binding domain Pfam Description: FAD binding domain
  misc_feature (1)..(468): Homolog of NCBI NO: 23267157 NR Description: cytokinin dehydrogenase 2 [Hordeum vulgare]
  misc_feature (1)..(465): Homolog of NCBI NO: 34910002 NR Description: putative cytokinin oxidase
  misc_feature (1)..(468): Homolog of NCBI NO: 38520861 NR Description: cytokinin oxidase 2 [Zea mays var. nobilis]
  misc_feature (1)..(467): Homolog of NCBI NO: 15227374 NR Description: cytokinin oxidase family [Arabidopsis thaliana]
  misc_feature (1)..(468): Homolog of NCBI NO: 38520865 NR Description: cytokinin oxidase 3 [Zea mays]
  misc_feature (1)..(468): Homolog of NCBI NO: 11120516 NR Description: cytokinin oxidase [Arabidopsis thaliana]
  misc_feature (1)..(468): Homolog of NCBI NO: 22330649 NR Description: cytokinin oxidase family [Arabidopsis thaliana]
  misc_feature (1)..(468): Homolog of NCBI NO: 38520863 NR Description: cytokinin oxidase 3 [Zea mays]
  misc_feature (1)..(468): Homolog of NCBI NO: 20161335 NR Description: putative cytokinin oxidase
  misc_feature (1)..(468): Homolog of NCBI NO: 30688201 NR Description: FAD-linked oxidoreductase family [Arabidopsis
MNCVKPLAVVRPVGPEDIAGAVKAALRSDKLTVAARGNGHSINGQAMAEGGLVVDMSTTAENHFEVGYLSGGDATAFVDVSGGALWEDVLKRCVSEYGLAPRSWTDYLGLTVGGTLSNAGVSGQAFRYGPQTSNVTELDVVTGNGDVVTCSEIENSELFFSVLGGLGQFGIITRARVLLQPAPDMVRWIRVVYTEFDEFTQDAEWLVSQKNESSFDYVEGFVFVNGADPVNGWPTVPLHPDHEFDPTRLPQSCGSVLYCLELGLHYRDSDSNSTIDKRVERLIGRLRFNEGLRFEVDLPYVDFLLRVKRSEEIAKENGTWETPHPWLNLFVSKRDIGDFNRTVFKELVKNGVNGPMLVYPLLRSRWDDRTSVVIPEEGEIFYIVALLRFVPPCAKVSSVEKMVAQNQEIVHWCVKNGIDYKLYLPHYKSQEEWIRHFGNRWSRFVDRKAMFDPMAILSPGQKIFNRSL

SEQ ID NO: 49335 - DNA, 1410 bp, Arabidopsis thaliana
  misc_feature (1)..(1410): Ceres Seq. ID no. 14302939
  misc_feature: MA Experiment ID: 20000166 Result: Up-regulated in Transcription
  misc_feature: MA Experiment 20000166 PARAMETER Experiment Name: At_100uM_ABA_P Parameter: Age (day) Value: 14
  misc_feature: MA Experiment 20000166 PARAMETER Experiment Name: At_100uM_ABA_P Parameter: Organism Value: A. thaliana
  misc_feature: MA Experiment 20000166 PARAMETER Experiment Name: At_100uM_ABA_P Parameter: Plant Line Value: WS
  misc_feature: MA Experiment 20000166 PARAMETER Experiment Name: At_100uM_ABA_P Parameter: Timepoint (hr) Value: 1
  misc_feature: MA Experiment 20000166 PARAMETER Experiment Name: At_100uM_ABA_P Parameter: Tissue Value: Aerial
  misc_feature: MA Experiment 20000166 PARAMETER Experiment Name: At_100uM_ABA_P Parameter: Treatment Value: 100uM ABA vs. No Treatment
  misc_feature: MA Experiment ID: 20000169 Result: Up-regulated in Transcription
  misc_feature: MA Experiment 20000169 PARAMETER Experiment Name: At_100uM_ABA_P Parameter: Age (day) Value: 14
  misc_feature: MA Experiment 20000169 PARAMETER Experiment Name: At_100uM_ABA_P Parameter: Organism Value: A. thaliana
  misc_feature: MA Experiment 20000169 PARAMETER Experiment Name: At_100uM_ABA_P Parameter: Plant Line Value: WS
  misc_feature: MA Experiment 20000169 PARAMETER Experiment Name: At_100uM_ABA_P Parameter: Timepoint (hr) Value: 6
  misc_feature: MA Experiment 20000169 PARAMETER Experiment Name: At_100uM_ABA_P Parameter: Tissue Value: Aerial
  misc_feature: MA Experiment 20000169 PARAMETER Experiment Name: At_100uM_ABA_P Parameter: Treatment Value: 100uM ABA vs. No Treatment
  misc_feature: MA Experiment ID: 20000171 Result: Down-regulated in Transcription
  misc_feature: MA Experiment 20000171 PARAMETER Experiment Name: At_42deg_Heat_P Parameter: Age (day) Value: 14
  misc_feature: MA Experiment 20000171 PARAMETER Experiment Name: At_42deg_Heat_P Parameter: Organism Value: A. thaliana
  misc_feature: MA Experiment 20000171 PARAMETER Experiment Name: At_42deg_Heat_P Parameter: Plant Line Value: WS
  misc_feature: MA Experiment 20000171 PARAMETER Experiment Name: At_42deg_Heat_P Parameter: Temperature (deg C) Value: 42 vs. 22
  misc_feature: MA Experiment 20000171 PARAMETER Experiment Name: At_42deg_Heat_P Parameter: Timepoint (hr) Value: 1
  misc_feature: MA Experiment 20000171 PARAMETER Experiment Name: At_42deg_Heat_P Parameter: Tissue Value: Aerial
  misc_feature: MA Experiment ID: 20000173 Result: Down-regulated in Transcription
  misc_feature: MA Experiment 20000173 PARAMETER Experiment Name: At_42deg_Heat_P Parameter: Age (day) Value: 14
  misc_feature: MA Experiment 20000173 PARAMETER Experiment Name: At_42deg_Heat_P Parameter: Organism Value: A. thaliana
  misc_feature: MA Experiment 20000173 PARAMETER Experiment Name: At_42deg_Heat_P Parameter: Plant Line Value: WS
  misc_feature: MA Experiment 20000173 PARAMETER Experiment Name: At_42deg_Heat_P Parameter: Temperature (deg C) Value: 42 vs. 22
  misc_feature: MA Experiment 20000173 PARAMETER Experiment Name: At_42deg_Heat_P Parameter: Timepoint (hr) Value: 6
  misc_feature: MA Experiment 20000173 PARAMETER Experiment Name: At_42deg_Heat_P Parameter: Tissue Value: Aerial
  misc_feature: MA Experiment ID: 20000184 Result: Down-regulated in Transcription
  misc_feature: MA Experiment 20000184 PARAMETER Experiment Name: At_Shoots__P Parameter: Age (day) Value: 7
  misc_feature: MA Experiment 20000184 PARAMETER Experiment Name: At_Shoots__P Parameter: Tissue Value: Shoots vs. Whole Plant
  misc_feature: MA Experiment ID: 20000185 Result: Down-regulated in Transcription
  misc_feature: MA Experiment 20000185 PARAMETER Experiment Name: At_Roots__P Parameter: Age (day) Value: 7 vs. 21
  misc_feature: MA Experiment 20000185 PARAMETER Experiment Name: At_Roots__P Parameter: Organism Value: A. thaliana
  misc_feature: MA Experiment 20000185 PARAMETER Experiment Name: At_Roots__P Parameter: Tissue Value: Roots vs. Whole Plant
  misc_feature: MA Experiment ID: 20000227 Result: Down-regulated in Transcription
  misc_feature: MA Experiment 20000227 PARAMETER Experiment Name: At_Root-Tips-vs-Tops_P Parameter: Tissue Value: Root Tips vs. Root Tops
  misc_feature: MA Experiment ID: 20000234 Result: Down-regulated in Transcription
  misc_feature: MA Experiment 20000234 PARAMETER Experiment Name: At_Siliques_P Parameter: Age (day) Value: 21
  misc_feature: MA Experiment 20000234 PARAMETER Experiment Name: At_Siliques_P Parameter: Organism Value: A. thaliana
  misc_feature: MA Experiment 20000234 PARAMETER Experiment Name: At_Siliques_P Parameter: Plant Line Value: WS
  misc_feature: MA Experiment 20000234 PARAMETER Experiment Name: At_Siliques_P Parameter: Tissue Value: Less Than 5mm Siliques vs. Whole Plant
  misc_feature: MA Experiment ID: 20000265 Result: Down-regulated in Transcription
  misc_feature: MA Experiment 20000265 PARAMETER Experiment Name: At_Open_Flower_P Parameter: Age (day) Value: 21
  misc_feature: MA Experiment 20000265 PARAMETER Experiment Name: At_Open_Flower_P Parameter: Plant Line Value: WS
  misc_feature: MA Experiment 20000265 PARAMETER Experiment Name: At_Open_Flower_P Parameter: Tissue Value: Closed Flower vs. Whole Plant
  misc_feature: MA Experiment ID: 20000268 Result: Up-regulated in Transcription
  misc_feature: MA Experiment 20000268 PARAMETER Experiment Name: At_100mM_NaCl__P Parameter: Age (day) Value: 14
  misc_feature: MA Experiment 20000268 PARAMETER Experiment Name: At_100mM_NaCl__P Parameter: Organism Value: A. thaliana
  misc_feature: MA Experiment 20000268 PARAMETER Experiment Name: At_100mM_NaCl__P Parameter: Plant Line Value: WS
  misc_feature: MA Experiment 20000268 PARAMETER Experiment Name: At_100mM_NaCl__P Parameter: Timepoint (hr) Value: 6
  misc_feature: MA Experiment 20000268 PARAMETER Experiment Name: At_100mM_NaCl__P Parameter: Tissue Value: Whole Plant
  misc_feature: MA Experiment 20000268 PARAMETER Experiment Name: At_100mM_NaCl__P Parameter: Treatment Value: 100mM NaCl vs. No Treatment
  misc_feature: MA Experiment ID: 20000438 Result: Down-regulated in Transcription
  misc_feature: MA Experiment 20000438 PARAMETER Experiment Name: At_Shoots__P Parameter: Age (day) Value: 14
  misc_feature: MA Experiment 20000438 PARAMETER Experiment Name: At_Shoots__P Parameter: Tissue Value: Shoots vs. Whole Plant
  misc_feature: MA Experiment ID: 20000453 Result: Up-regulated in Transcription
  misc_feature: MA Experiment 20000453 PARAMETER Experiment Name: At_100uM_ABA_P Parameter: Age (day) Value: 15
  misc_feature: MA Experiment 20000453 PARAMETER Experiment Name: At_100uM_ABA_P Parameter: Organism Value: A. thaliana
  misc_feature: MA Experiment 20000453 PARAMETER Experiment Name: At_100uM_ABA_P Parameter: Plant Line Value: WS
  misc_feature: MA Experiment 20000453 PARAMETER Experiment Name: At_100uM_ABA_P Parameter: Timepoint (hr) Value: 24
  misc_feature: MA Experiment 20000453 PARAMETER Experiment Name: At_100uM_ABA_P Parameter: Tissue Value: Aerial
  misc_feature: MA Experiment 20000453 PARAMETER Experiment Name: At_100uM_ABA_P Parameter: Treatment Value: 100uM ABA vs. No Treatment
  misc_feature: MA Experiment ID: 20000496 Result: Up-regulated in Transcription
  misc_feature: MA Experiment 20000496 PARAMETER Experiment Name: At_Guard_Cells_P Parameter: Harvest Date Value: 7/19/2002
  misc_feature: MA Experiment 20000496 PARAMETER Experiment Name: At_Guard_Cells_P Parameter: Organism Value: Canola
  misc_feature: MA Experiment 20000496 PARAMETER Experiment Name: At_Guard_Cells_P Parameter: Tissue Value: Guard Cells vs. Leaves
  misc_feature: MA Experiment ID: 20000527 Result: Down-regulated in Transcription
  misc_feature: MA Experiment 20000527 PARAMETER Experiment Name: At_10percent_PEG_P Parameter: Age (day) Value: 20
  misc_feature: MA Experiment 20000527 PARAMETER Experiment Name: At_10percent_PEG_P Parameter: Organism Value: A. thaliana
  misc_feature: MA Experiment 20000527 PARAMETER Experiment Name: At_10percent_PEG_P Parameter: Plant Line Value: WS
  misc_feature: MA Experiment 20000527 PARAMETER Experiment Name: At_10percent_PEG_P Parameter: Timepoint (day) Value: 20
  misc_feature: MA Experiment 20000527 PARAMETER Experiment Name: At_10percent_PEG_P Parameter: Tissue Value: Whole Plant
  misc_feature: MA Experiment 20000527 PARAMETER Experiment Name: At_10percent_PEG_P Parameter: Treatment Value: 10percent PEG vs. No Treatment
  misc_feature: MA Experiment ID: 20000794 Result: Up-regulated in Transcription
  misc_feature: MA Experiment 20000794 PARAMETER Experiment Name: At_Petals_P Parameter: Age (day) Value: 23-25 days
  misc_feature: MA Experiment 20000794 PARAMETER Experiment Name: At_Petals_P Parameter: Plant Line Value: WS
  misc_feature: MA Experiment 20000794 PARAMETER Experiment Name: At_Petals_P Parameter: Tissue Value: Petals vs. Whole plant
  misc_feature: MA Experiment ID: 20001772 Result: Up-regulated in Transcription
  misc_feature: MA Experiment 20001772 PARAMETER Experiment Name: At_Far-red-enriched-adult_P Parameter: Age (day) Value: 29
  misc_feature: MA Experiment 20001772 PARAMETER Experiment Name: At_Far-red-enriched-adult_P Parameter: Light Value: Far-red enriched vs. White
  misc_feature: MA Experiment 20001772 PARAMETER Experiment Name: At_Far-red-enriched-adult_P Parameter: Organism Value: A. thaliana
  misc_feature: MA Experiment 20001772 PARAMETER Experiment Name: At_Far-red-enriched-adult_P Parameter: Plant Line Value: Columbia
  misc_feature: MA Experiment 20001772 PARAMETER Experiment Name: At_Far-red-enriched-adult_P Parameter: Timepoint (hr) Value: 24
  misc_feature: MA Experiment 20001772 PARAMETER Experiment Name: At_Far-red-enriched-adult_P Parameter: Tissue Value: Aerial
ggttcatatggaaaacgctcatcaacctcaacaatctctctcctctctctctctgtatatagaagaatctccattgtctttaatttctctccatttctctttctctcttccttcaaagttttctcttttcttgatgggtttaagagagtaaagatcatcaagtactatgcattaaattgagaagttattaaaaatttcgattaattaaagattgttgatgatgaagagattaagtagttcagattcagtgggtggtctcatctctttatgtcctacaacttccacagatgagcagagtccgaggagatacggtgggagagagtttcagtcgatgcttgaaggatacgaggaagaagaagaagctatagtagaagaaagaggacacgtgggcttgtcggagaagaagagaaggttaagcattaaccaagttaaagctttggagaagaattttgagttagagaataagcttgagcctgagaggaaagttaagttagctcaagaacttggtcttcaacctcgtcaagttgctgtttggtttcaaaaccgtcgtgctcggtggaagacaaaacagcttgagaaagattatggtgttcttaaaacccagtacgattctctccgtcataactttgattccctccgccgtgacaatgaatctctccttcaagagattagtaaactgaaaacgaagcttgatggaggaggagaagaagaagaagaagaagagaacaacgcggcggtgacaacggagagtgatatttcggtcaaggaggaagaagtttcgttgccggagaagattacagaggcaccgtcgtctcctccacagtttcttgaacattctgatggtcttaattaccggagtttcacagatctacgtgatcttcttccattaaaggcggcggcttcttcattcgccgccgcagctggatcttcagacagtagcgattcaagcgcactgctgaatgaagaaagcagctctaatgtcactgtggcggctccggtgacggttccaggaggtaatttcttccagtttgtgaaaatggagcagacggaggatcatgaggactttctgagtggagaagaagcttgtgaattcttttccgatgaacagccgccgtctctacactggtactccaccgttgatcattggaattgaagctgaaaacaccaccggaagagattttggattggattagatgctcttttcttctctgtggaaaaaacagaggagggcaaaatgggaataaggttaaaaattgaaggtgaaagggcaattaaggaagggttaaatctgggcgggaataatgatttagggtgaatttgtaattatgctttttctctagtggttttcgtgcacttcttgtaattaaggatcatcagatcaaagagaaattgagaaggggttaacatgtc

SEQ ID NO: 49336 - protein, 311 aa, Arabidopsis thaliana
  peptide (1)..(311): Ceres Seq. ID no. 14302940
  misc_feature (62)..(116): Pfam Name: Homeobox domain Pfam Description: Homeobox domain
  misc_feature (48)..(311): Homolog of NCBI NO: 15148916 NR Description: homeodomain leucine zipper protein HDZ1
  misc_feature (2)..(311): Homolog of NCBI NO: 15238405 NR Description: homeobox-leucine zipper protein ATHB-5 (HD-Zip
  misc_feature (2)..(310): Homolog of NCBI NO: 7446295 NR Description: homeotic protein T5J17.230 - Arabidopsis thaliana
  misc_feature (2)..(310): Homolog of NCBI NO: 15450982 NR Description: homeodomain-like protein [Arabidopsis thaliana]
  misc_feature (2)..(310): Homolog of NCBI NO: 15236109 NR Description: homeodomain-leucine zipper protein ATHB-16
  misc_feature (1)..(311): Homolog of NCBI NO: 8133126 NR Description: hb-6-like protein [Brassica rapa subsp.
  misc_feature (1)..(291): Homolog of NCBI NO: 5305602 NR Description: homeobox protein ATHB6 [Arabidopsis thaliana]
  misc_feature (2)..(311): Homolog of NCBI NO: 25386231 NR Description: homeodomain transcription factor (ATHB-6)
  misc_feature (1)..(311): Homolog of NCBI NO: 18399966 NR Description: homeobox-leucine zipper protein ATHB-6 (HD-Zip
MMKRLSSSDSVGGLISLCPTTSTDEQSPRRYGGREFQSMLEGYEEEEEAIVEERGHVGLSEKKRRLSINQVKALEKNFELENKLEPERKVKLAQELGLQPRQVAVWFQNRRARWKTKQLEKDYGVLKTQYDSLRHNFDSLRRDNESLLQEISKLKTKLDGGGEEEEEEENNAAVTTESDISVKEEEVSLPEKITEAPSSPPQFLEHSDGLNYRSFTDLRDLLPLKAAASSFAAAAGSSDSSDSSALLNEESSSNVTVAAPVTVPGGNFFQFVKMEQTEDHEDFLSGEEACEFFSDEQPPSLHWYSTVDHWN

SEQ ID NO: 49337 - protein, 310 aa, Arabidopsis thaliana
  peptide (1)..(310): Ceres Seq. ID no. 14302941
  misc_feature (61)..(115): Pfam Name: Homeobox domain Pfam Description: Homeobox domain
  misc_feature (47)..(310): Homolog of NCBI NO: 15148916 NR Description: homeodomain leucine zipper protein HDZ1
  misc_feature (1)..(310): Homolog of NCBI NO: 15238405 NR Description: homeobox-leucine zipper protein ATHB-5 (HD-Zip
  misc_feature (1)..(309): Homolog of NCBI NO: 7446295 NR Description: homeotic protein T5J17.230 - Arabidopsis thaliana
  misc_feature (1)..(309): Homolog of NCBI NO: 15450982 NR Description: homeodomain-like protein [Arabidopsis thaliana]
  misc_feature (1)..(309): Homolog of NCBI NO: 15236109 NR Description: homeodomain-leucine zipper protein ATHB-16
  misc_feature (1)..(310): Homolog of NCBI NO: 8133126 NR Description: hb-6-like protein [Brassica rapa subsp.
  misc_feature (1)..(290): Homolog of NCBI NO: 5305602 NR Description: homeobox protein ATHB6 [Arabidopsis thaliana]
  misc_feature (1)..(310): Homolog of NCBI NO: 25386231 NR Description: homeodomain transcription factor (ATHB-6)
  misc_feature (1)..(310): Homolog of NCBI NO: 18399966 NR Description: homeobox-leucine zipper protein ATHB-6 (HD-Zip
MKRLSSSDSVGGLISLCPTTSTDEQSPRRYGGREFQSMLEGYEEEEEAIVEERGHVGLSEKKRRLSINQVKALEKNFELENKLEPERKVKLAQELGLQPRQVAVWFQNRRARWKTKQLEKDYGVLKTQYDSLRHNFDSLRRDNESLLQEISKLKTKLDGGGEEEEEEENNAAVTTESDISVKEEEVSLPEKITEAPSSPPQFLEHSDGLNYRSFTDLRDLLPLKAAASSFAAAAGSSDSSDSSALLNEESSSNVTVAAPVTVPGGNFFQFVKMEQTEDHEDFLSGEEACEFFSDEQPPSLHWYSTVDHWN

SEQ ID NO: 49338 - protein, 273 aa, Arabidopsis thaliana
  peptide (1)..(273): Ceres Seq. ID no. 14302942
  misc_feature (24)..(78): Pfam Name: Homeobox domain Pfam Description: Homeobox domain
  misc_feature (10)..(273): Homolog of NCBI NO: 15148916 NR Description: homeodomain leucine zipper protein HDZ1
  misc_feature (1)..(273): Homolog of NCBI NO: 15238405 NR Description: homeobox-leucine zipper protein ATHB-5 (HD-Zip
  misc_feature (1)..(272): Homolog of NCBI NO: 7446295 NR Description: homeotic protein T5J17.230 - Arabidopsis thaliana
  misc_feature (1)..(272): Homolog of NCBI NO: 15450982 NR Description: homeodomain-like protein [Arabidopsis thaliana]
  misc_feature (1)..(272): Homolog of NCBI NO: 15236109 NR Description: homeodomain-leucine zipper protein ATHB-16
  misc_feature (1)..(273): Homolog of NCBI NO: 8133126 NR Description: hb-6-like protein [Brassica rapa subsp.
  misc_feature (1)..(253): Homolog of NCBI NO: 5305602 NR Description: homeobox protein ATHB6 [Arabidopsis thaliana]
  misc_feature (1)..(273): Homolog of NCBI NO: 25386231 NR Description: homeodomain transcription factor (ATHB-6)
  misc_feature (1)..(273): Homolog of NCBI NO: 18399966 NR Description: homeobox-leucine zipper protein ATHB-6 (HD-Zip
MLEGYEEEEEAIVEERGHVGLSEKKRRLSINQVKALEKNFELENKLEPERKVKLAQELGLQPRQVAVWFQNRRARWKTKQLEKDYGVLKTQYDSLRHNFDSLRRDNESLLQEISKLKTKLDGGGEEEEEEENNAAVTTESDISVKEEEVSLPEKITEAPSSPPQFLEHSDGLNYRSFTDLRDLLPLKAAASSFAAAAGSSDSSDSSALLNEESSSNVTVAAPVTVPGGNFFQFVKMEQTEDHEDFLSGEEACEFFSDEQPPSLHWYSTVDHWN

SEQ ID NO: 49339 - DNA, 730 bp, Arabidopsis thaliana
  misc_feature (1)..(730): Ceres Seq. ID no. 13587984
  misc_feature: MA Experiment ID: 20000306 Result: Up-regulated in Transcription
  misc_feature: MA Experiment 20000306 PARAMETER Experiment Name: At_Germinating_Seeds_Sub_P Parameter: Age (hr) Value: 6 vs. 0
  misc_feature: MA Experiment 20000306 PARAMETER Experiment Name: At_Germinating_Seeds_Sub_P Parameter: Organism Value: A. thaliana
  misc_feature: MA Experiment 20000306 PARAMETER Experiment Name: At_Germinating_Seeds_Sub_P Parameter: Plant Line Value: WS
  misc_feature: MA Experiment 20000306 PARAMETER Experiment Name: At_Germinating_Seeds_Sub_P Parameter: Tissue Value: Germinating Seeds
  misc_feature: MA Experiment ID: 20000307 Result: Up-regulated in Transcription
  misc_feature: MA Experiment 20000307 PARAMETER Experiment Name: At_Germinating_Seeds_Sub_P Parameter: Age (hr) Value: 24 vs. 0
  misc_feature: MA Experiment 20000307 PARAMETER Experiment Name: At_Germinating_Seeds_Sub_P Parameter: Organism Value: A. thaliana
  misc_feature: MA Experiment 20000307 PARAMETER Experiment Name: At_Germinating_Seeds_Sub_P Parameter: Plant Line Value: WS
  misc_feature: MA Experiment 20000307 PARAMETER Experiment Name: At_Germinating_Seeds_Sub_P Parameter: Tissue Value: Germinating Seeds
  misc_feature: MA Experiment ID: 20000314 Result: Down-regulated in Transcription
  misc_feature: MA Experiment 20000314 PARAMETER Experiment Name: At_14day_Shoots-Roots_Sub_P Parameter: Age (day) Value: 14
  misc_feature: MA Experiment 20000314 PARAMETER Experiment Name: At_14day_Shoots-Roots_Sub_P Parameter: Organism Value: A. thaliana
  misc_feature: MA Experiment 20000314 PARAMETER Experiment Name: At_14day_Shoots-Roots_Sub_P Parameter: Plant Line Value: WS
  misc_feature: MA Experiment 20000314 PARAMETER Experiment Name: At_14day_Shoots-Roots_Sub_P Parameter: Tissue Value: Roots vs. Whole Plant
  misc_feature: MA Experiment ID: 20000315 Result: Up-regulated in Transcription
  misc_feature: MA Experiment 20000315 PARAMETER Experiment Name: At_14day_Shoots-Roots_Sub_P Parameter: Age (day) Value: 14
  misc_feature: MA Experiment 20000315 PARAMETER Experiment Name: At_14day_Shoots-Roots_Sub_P Parameter: Organism Value: A. thaliana
  misc_feature: MA Experiment 20000315 PARAMETER Experiment Name: At_14day_Shoots-Roots_Sub_P Parameter: Plant Line Value: WS
  misc_feature: MA Experiment 20000315 PARAMETER Experiment Name: At_14day_Shoots-Roots_Sub_P Parameter: Tissue Value: Shoots vs. Whole Plant
  misc_feature: MA Experiment ID: 20000328 Result: Up-regulated in Transcription
  misc_feature: MA Experiment 20000328 PARAMETER Experiment Name: At_42deg_Heat_Sub_P Parameter: Age (day) Value: 14
  misc_feature: MA Experiment 20000328 PARAMETER Experiment Name: At_42deg_Heat_Sub_P Parameter: Organism Value: A. thaliana
  misc_feature: MA Experiment 20000328 PARAMETER Experiment Name: At_42deg_Heat_Sub_P Parameter: Plant Line Value: WS
  misc_feature: MA Experiment 20000328 PARAMETER Experiment Name: At_42deg_Heat_Sub_P Parameter: Temperature (deg C) Value: 42 vs. 22
  misc_feature: MA Experiment 20000328 PARAMETER Experiment Name: At_42deg_Heat_Sub_P Parameter: Timepoint (hr) Value: 6
  misc_feature: MA Experiment 20000328 PARAMETER Experiment Name: At_42deg_Heat_Sub_P Parameter: Tissue Value: Aerial
  misc_feature: MA Experiment ID: 20001807 Result: Up-regulated in Transcription
  misc_feature: MA Experiment 20001807 PARAMETER Experiment Name: At_50mM_NH4NO3_L-to-H_Sub_P Parameter: Timepoint (hr) Value: 6
  misc_feature: MA Experiment 20001807 PARAMETER Experiment Name: At_50mM_NH4NO3_L-to-H_Sub_P Parameter: Tissue Value: Leaf
  misc_feature: MA Experiment 20001807 PARAMETER Experiment Name: At_50mM_NH4NO3_L-to-H_Sub_P Parameter: Treatment Value: 50mM NH4NO3 vs 100mM Mannitol
tcaatctctaattaaatacaccaaaagaagaagaaagactagagannnngcaatggcttcctctatgctctcctccgccgctgtggttacatccccggctcaggccaccatggtcgctccattcaccggcttgaagtcatccgctgcattcccggtcacccgcaagaccaacaaggacatcacttccatcgcaagcaacgggggaagagttagctgcatgaaggtgtggccaccaattggaaagaagaagtttgagactctatcttacctccctgaccttagtgacgtcgaattggctaaggaagttgactaccttctccgcaacaagtggattccttgtgttgaattcgagttagagcacggatttgtgtaccgtgagcacggaaacactcccggatactacgatggacggtactggacaatgtggaagcttccattgttcggatgcaccgactccgctcaagtgttgaaggaagttgaagaatgcaagaaggagtacccgggcgccttcattaggatcatcggattcgacaacacccgtcaagtccaatgcatcagtttcattgcctacaagcccccaagcttcaccgaagcttaatttccctttgcttttgtgtaaacctcaaaactttatcccccatctttgattttatcccttgtttttctgcttttttcttctttcttgggttttaatttccggacttaacgtttttttccggtttgcgagaca

SEQ ID NO: 49340 - protein, 198 aa, Arabidopsis thaliana
  peptide (1)..(198): Ceres Seq. ID no. 15220839
  misc_feature (18)..(196): Homolog of NCBI NO: 15219826 NR Description: ribulose-bisphosphate carboxylase small unit
  misc_feature (18)..(198): Homolog of NCBI NO: 480983 NR Description: ribulose-bisphosphate carboxylase (EC 4.1.1.39)
  misc_feature (18)..(198): Homolog of NCBI NO: 266891 NR Description: Ribulose bisphosphate carboxylase small chain,
  misc_feature (18)..(198): Homolog of NCBI NO: 132091 NR Description: Ribulose bisphosphate carboxylase small chain F1,
  misc_feature (18)..(198): Homolog of NCBI NO: 132154 NR Description: Ribulose bisphosphate carboxylase small chain,
  misc_feature (18)..(198): Homolog of NCBI NO: 15240903 NR Description: ribulose bisphosphate carboxylase small chain 2b
  misc_feature (18)..(198): Homolog of NCBI NO: 15240912 NR Description: ribulose bisphosphate carboxylase small chain 1b
  misc_feature (18)..(198): Homolog of NCBI NO: 68061 NR Description: ribulose-bisphosphate carboxylase (EC 4.1.1.39)
  misc_feature (18)..(198): Homolog of NCBI NO: 68060 NR Description: ribulose-bisphosphate carboxylase (EC 4.1.1.39)
  misc_feature (18)..(198): Homolog of NCBI NO: 15240901 NR Description: ribulose bisphosphate carboxylase small chain 3b
  misc_feature (15)..(15): Xaa is any aa, unknown or other
  misc_feature (16)..(16): Xaa is any aa, unknown or other
QSLIKYTKRRRKTRXXAMASSMLSSAAVVTSPAQATMVAPFTGLKSSAAFPVTRKTNKDITSIASNGGRVSCMKVWPPIGKKKFETLSYLPDLSDVELAKEVDYLLRNKWIPCVEFELEHGFVYREHGNTPGYYDGRYWTMWKLPLFGCTDSAQVLKEVEECKKEYPGAFIRIIGFDNTRQVQCISFIAYKPPSFTEA

SEQ ID NO: 49341 - protein, 181 aa, Arabidopsis thaliana; identical to SEQ ID NO: 36039
  peptide (1)..(181): Ceres Seq. ID no. 15220840
  misc_feature (1)..(179): Homolog of NCBI NO: 15219826 NR Description: ribulose-bisphosphate carboxylase small unit
  misc_feature (1)..(181): Homolog of NCBI NO: 480983 NR Description: ribulose-bisphosphate carboxylase (EC 4.1.1.39)
  misc_feature (1)..(181): Homolog of NCBI NO: 266891 NR Description: Ribulose bisphosphate carboxylase small chain,
  misc_feature (1)..(181): Homolog of NCBI NO: 132091 NR Description: Ribulose bisphosphate carboxylase small chain F1,
  misc_feature (1)..(181): Homolog of NCBI NO: 132154 NR Description: Ribulose bisphosphate carboxylase small chain,
  misc_feature (1)..(181): Homolog of NCBI NO: 15240903 NR Description: ribulose bisphosphate carboxylase small chain 2b
  misc_feature (1)..(181): Homolog of NCBI NO: 15240912 NR Description: ribulose bisphosphate carboxylase small chain 1b
  misc_feature (1)..(181): Homolog of NCBI NO: 68061 NR Description: ribulose-bisphosphate carboxylase (EC 4.1.1.39)
  misc_feature (1)..(181): Homolog of NCBI NO: 68060 NR Description: ribulose-bisphosphate carboxylase (EC 4.1.1.39)
  misc_feature (1)..(181): Homolog of NCBI NO: 15240901 NR Description: ribulose bisphosphate carboxylase small chain 3b

SEQ ID NO: 49342 - protein, 177 aa, Arabidopsis thaliana; identical to SEQ ID NO: 36040
  peptide (1)..(177): Ceres Seq. ID no. 15220841
  misc_feature (1)..(175): Homolog of NCBI NO: 15219826 NR Description: ribulose-bisphosphate carboxylase small unit
  misc_feature (1)..(177): Homolog of NCBI NO: 480983 NR Description: ribulose-bisphosphate carboxylase (EC 4.1.1.39)
  misc_feature (1)..(177): Homolog of NCBI NO: 266891 NR Description: Ribulose bisphosphate carboxylase small chain,
  misc_feature (1)..(177): Homolog of NCBI NO: 132091 NR Description: Ribulose bisphosphate carboxylase small chain F1,
  misc_feature (1)..(177): Homolog of NCBI NO: 132154 NR Description: Ribulose bisphosphate carboxylase small chain,
  misc_feature (1)..(177): Homolog of NCBI NO: 15240903 NR Description: ribulose bisphosphate carboxylase small chain 2b
  misc_feature (1)..(177): Homolog of NCBI NO: 15240912 NR Description: ribulose bisphosphate carboxylase small chain 1b
  misc_feature (1)..(177): Homolog of NCBI NO: 68061 NR Description: ribulose-bisphosphate carboxylase (EC 4.1.1.39)
  misc_feature (1)..(177): Homolog of NCBI NO: 68060 NR Description: ribulose-bisphosphate carboxylase (EC 4.1.1.39)
  misc_feature (1)..(177): Homolog of NCBI NO: 15240901 NR Description: ribulose bisphosphate carboxylase small chain 3b

SEQ ID NO: 49343 - DNA, 1154 bp, Arabidopsis thaliana
  misc_feature (1)..(1154): Ceres Seq. ID no. 13648467
  misc_feature: MA Experiment ID: 20000171 Result: Up-regulated in Transcription
  misc_feature: MA Experiment 20000171 PARAMETER Experiment Name: At_42deg_Heat_P Parameter: Age (day) Value: 14
  misc_feature: MA Experiment 20000171 PARAMETER Experiment Name: At_42deg_Heat_P Parameter: Organism Value: A. thaliana
  misc_feature: MA Experiment 20000171 PARAMETER Experiment Name: At_42deg_Heat_P Parameter: Plant Line Value: WS
  misc_feature: MA Experiment 20000171 PARAMETER Experiment Name: At_42deg_Heat_P Parameter: Temperature (deg C) Value: 42 vs. 22
  misc_feature: MA Experiment 20000171 PARAMETER Experiment Name: At_42deg_Heat_P Parameter: Timepoint (hr) Value: 1
  misc_feature: MA Experiment 20000171 PARAMETER Experiment Name: At_42deg_Heat_P Parameter: Tissue Value: Aerial
  misc_feature: MA Experiment ID: 20001451 Result: Up-regulated in Transcription
  misc_feature: MA Experiment 20001451 PARAMETER Experiment Name: At_Far-red-induction_P Parameter: Age (day) Value: 7
  misc_feature: MA Experiment 20001451 PARAMETER Experiment Name: At_Far-red-induction_P Parameter: Light Value: Far-red vs. White
  misc_feature: MA Experiment 20001451 PARAMETER Experiment Name: At_Far-red-induction_P Parameter: Organism Value: A. thaliana
  misc_feature: MA Experiment 20001451 PARAMETER Experiment Name: At_Far-red-induction_P Parameter: Plant Line Value: Columbia
  misc_feature: MA Experiment 20001451 PARAMETER Experiment Name: At_Far-red-induction_P Parameter: Timepoint (hr) Value: 24
  misc_feature: MA Experiment 20001451 PARAMETER Experiment Name: At_Far-red-induction_P Parameter: Tissue Value: Whole Plant
  misc_feature: MA Experiment ID: 20001773 Result: Up-regulated in Transcription
  misc_feature: MA Experiment 20001773 PARAMETER Experiment Name: At_Far-red-enriched-adult_P Parameter: Age (day) Value: 30
  misc_feature: MA Experiment 20001773 PARAMETER Experiment Name: At_Far-red-enriched-adult_P Parameter: Light Value: Far-red enriched vs. White
  misc_feature: MA Experiment 20001773 PARAMETER Experiment Name: At_Far-red-enriched-adult_P Parameter: Organism Value: A. thaliana
  misc_feature: MA Experiment 20001773 PARAMETER Experiment Name: At_Far-red-enriched-adult_P Parameter: Plant Line Value: Columbia
  misc_feature: MA Experiment 20001773 PARAMETER Experiment Name: At_Far-red-enriched-adult_P Parameter: Timepoint (hr) Value: 48
  misc_feature: MA Experiment 20001773 PARAMETER Experiment Name: At_Far-red-enriched-adult_P Parameter: Tissue Value: Aerial
ggagaaagacaaacaaattgaagagaaataataacaattaactcaaccaaaaatatgaggaagccagaggtagccattgcagctagtactcaccaagtaaagaagatgaagaagggactttggtctcctgaggaagactcaaagctgatgcaatacatgttaagcaatggacaaggatgttggagtgatgttgcgaaaaacgcaggacttcaaagatgtggcaaaagctgccgtcttcgttggatcaactatcttcgtcctgacctcaagcgtggcgctttctctcctcaagaagaggatctcatcattcgctttcattccatcctcggcaacaggtggtctcagattgcagcacgattgcctggtcggaccgataacgagatcaagaatttctggaactcaacaataaagaaaaggctaaagaagatgtccgatacctccaacttaatcaacaactcatcctcatcacccaacacagcaagcgattcctcttctaattccgcatcttctttggatattaaagacattataggaagcttcatgtccttacaagaacaaggcttcgtcaacccttccttgacccacatacaaaccaacaatccatttccaacgggaaacatgatcagccacccgtgcaatgacgattttaccccttatgtagatggtatctatggagtaaacgcaggggtacaaggggaactctacttcccacctttggaatgtgaagaaggtgattggtacaatgcaaatataaacaaccacttagacgagttgaacactaatggatccggaaacgcacctgagggtatgagaccagtggaagaattttgggaccttgaccagttgatgaacactgaggttccttcgttttacttcaacttcaaacaaagcatatgaatatttttacgtcatcttattcttttttctattgcggtttataatcaagattcttagccacaccacacacacataaatgcaaatatatatacattgttagagagtattttgtatttcgaataatcttttcgtactagggcttgagccttgaggtgccatgtaatgattagtcaatgtaaaacatatatcctataataaataaataaaagaaataataagcaaaaaaaaaaaaaaaaaaactcgagggggggcccggt

SEQ ID NO: 49344 - protein, 280 aa, Arabidopsis thaliana
  peptide (1)..(280): Ceres Seq. ID no. 15220531
  misc_feature (20)..(67): Pfam Name: Myb-like DNA-binding domain Pfam Description: Myb-like DNA-binding domain
  misc_feature (16)..(220): Homolog of NCBI NO: 15223612 NR Description: myb family transcription factor [Arabidopsis
  misc_feature (16)..(154): Homolog of NCBI NO: 34902542 NR Description: putative transcription factor (myb)
  misc_feature (16)..(174): Homolog of NCBI NO: 25294104 NR Description: hypothetical protein [imported] - Arabidopsis
  misc_feature (16)..(174): Homolog of NCBI NO: 22329445 NR Description: myb family transcription factor [Arabidopsis
  misc_feature (16)..(186): Homolog of NCBI NO: 11994360 NR Description: transcription factor-like protein [Arabidopsis
  misc_feature (17)..(148): Homolog of NCBI NO: 34147924 NR Description: R2R3-MYB transcription factor [Pinus taeda]
  misc_feature (1)..(191): Homolog of NCBI NO: 15231922 NR Description: myb family transcription factor (MYB83)
  misc_feature (9)..(188): Homolog of NCBI NO: 39725413 NR Description: MYB transcription factor [Eucalyptus gunnii]
  misc_feature (75)..(280): Homolog of NCBI NO: 11358687 NR Description: probable transcription factor MYB46
  misc_feature (1)..(280): Homolog of NCBI NO: 15239934 NR Description: myb family transcription factor [Arabidopsis
MRKPEVAIAASTHQVKKMKKGLWSPEEDSKLMQYMLSNGQGCWSDVAKNAGLQRCGKSCRLRWINYLRPDLKRGAFSPQEEDLIIRFHSILGNRWSQIAARLPGRTDNEIKNFWNSTIKKRLKKMSDTSNLINNSSSSPNTASDSSSNSASSLDIKDIIGSFMSLQEQGFVNPSLTHIQTNNPFPTGNMISHPCNDDFTPYVDGIYGVNAGVQGELYFPPLECEEGDWYNANINNHLDELNTNGSGNAPEGMRPVEEFWDLDQLMNTEVPSFYFNFKQSI

SEQ ID NO: 49345 - protein, 263 aa, Arabidopsis thaliana
  peptide (1)..(263): Ceres Seq. ID no. 15220532
  misc_feature (3)..(50): Pfam Name: Myb-like DNA-binding domain Pfam Description: Myb-like DNA-binding domain
  misc_feature (1)..(203): Homolog of NCBI NO: 15223612 NR Description: myb family transcription factor [Arabidopsis
  misc_feature (1)..(137): Homolog of NCBI NO: 34902542 NR Description: putative transcription factor (myb)
  misc_feature (1)..(157): Homolog of NCBI NO: 25294104 NR Description: hypothetical protein [imported] - Arabidopsis
  misc_feature (1)..(157): Homolog of NCBI NO: 22329445 NR Description: myb family transcription factor [Arabidopsis
  misc_feature (1)..(169): Homolog of NCBI NO: 11994360 NR Description: transcription factor-like protein [Arabidopsis
  misc_feature (1)..(131): Homolog of NCBI NO: 34147924 NR Description: R2R3-MYB transcription factor [Pinus taeda]
  misc_feature (1)..(174): Homolog of NCBI NO: 15231922 NR Description: myb family transcription factor (MYB83)
  misc_feature (1)..(171): Homolog of NCBI NO: 39725413 NR Description: MYB transcription factor [Eucalyptus gunnii]
  misc_feature (58)..(263): Homolog of NCBI NO: 11358687 NR Description: probable transcription factor MYB46
  misc_feature (1)..(263): Homolog of NCBI NO: 15239934 NR Description: myb family transcription factor [Arabidopsis
MKKGLWSPEEDSKLMQYMLSNGQGCWSDVAKNAGLQRCGKSCRLRWINYLRPDLKRGAFSPQEEDLIIRFHSILGNRWSQIAARLPGRTDNEIKNFWNSTIKKRLKKMSDTSNLINNSSSSPNTASDSSSNSASSLDIKDIIGSFMSLQEQGFVNPSLTHIQTNNPFPTGNMISHPCNDDFTPYVDGIYGVNAGVQGELYFPPLECEEGDWYNANINNHLDELNTNGSGNAPEGMRPVEEFWDLDQLMNTEVPSFYFNFKQSI

SEQ ID NO: 49346 - protein, 249 aa, Arabidopsis thaliana
  peptide (1)..(249): Ceres Seq. ID no. 15220533
  misc_feature (1)..(36): Pfam Name: Myb-like DNA-binding domain Pfam Description: Myb-like DNA-binding domain
  misc_feature (1)..(189): Homolog of NCBI NO: 15223612 NR Description: myb family transcription factor [Arabidopsis
  misc_feature (1)..(123): Homolog of NCBI NO: 34902542 NR Description: putative transcription factor (myb)
  misc_feature (1)..(143): Homolog of NCBI NO: 25294104 NR Description: hypothetical protein [imported] - Arabidopsis
  misc_feature (1)..(143): Homolog of NCBI NO: 22329445 NR Description: myb family transcription factor [Arabidopsis
  misc_feature (1)..(155): Homolog of NCBI NO: 11994360 NR Description: transcription factor-like protein [Arabidopsis
  misc_feature (1)..(117): Homolog of NCBI NO: 34147924 NR Description: R2R3-MYB transcription factor [Pinus taeda]
  misc_feature (1)..(160): Homolog of NCBI NO: 15231922 NR Description: myb family transcription factor (MYB83)
  misc_feature (1)..(157): Homolog of NCBI NO: 39725413 NR Description: MYB transcription factor [Eucalyptus gunnii]
  misc_feature (44)..(249): Homolog of NCBI NO: 11358687 NR Description: probable transcription factor MYB46
  misc_feature (1)..(249): Homolog of NCBI NO: 15239934 NR Description: myb family transcription factor [Arabidopsis
MQYMLSNGQGCWSDVAKNAGLQRCGKSCRLRWINYLRPDLKRGAFSPQEEDLIIRFHSILGNRWSQIAARLPGRTDNEIKNFWNSTIKKRLKKMSDTSNLINNSSSSPNTASDSSSNSASSLDIKDIIGSFMSLQEQGFVNPSLTHIQTNNPFPTGNMISHPCNDDFTPYVDGIYGVNAGVQGELYFPPLECEEGDWYNANINNHLDELNTNGSGNAPEGMRPVEEFWDLDQLMNTEVPSFYFNFKQSI

SEQ ID NO: 49347 - DNA, 1447 bp, Arabidopsis thaliana
  misc_feature (1)..(1447): Ceres Seq. ID no. 13592262
  misc_feature: MA Experiment ID: 20000184 Result: Down-regulated in Transcription
  misc_feature: MA Experiment 20000184 PARAMETER Experiment Name: At_Shoots__P Parameter: Age (day) Value: 7
  misc_feature: MA Experiment 20000184 PARAMETER Experiment Name: At_Shoots__P Parameter: Tissue Value: Shoots vs. Whole Plant
  misc_feature: MA Experiment ID: 20000234 Result: Up-regulated in Transcription
  misc_feature: MA Experiment 20000234 PARAMETER Experiment Name: At_Siliques_P Parameter: Age (day) Value: 21
  misc_feature: MA Experiment 20000234 PARAMETER Experiment Name: At_Siliques_P Parameter: Organism Value: A. thaliana
  misc_feature: MA Experiment 20000234 PARAMETER Experiment Name: At_Siliques_P Parameter: Plant Line Value: WS
  misc_feature: MA Experiment 20000234 PARAMETER Experiment Name: At_Siliques_P Parameter: Tissue Value: Less Than 5mm Siliques vs. Whole Plant
  misc_feature: MA Experiment ID: 20000264 Result: Up-regulated in Transcription
  misc_feature: MA Experiment 20000264 PARAMETER Experiment Name: At_Open_Flower_P Parameter: Age (day) Value: 21
  misc_feature: MA Experiment 20000264 PARAMETER Experiment Name: At_Open_Flower_P Parameter: Plant Line Value: WS
  misc_feature: MA Experiment 20000264 PARAMETER Experiment Name: At_Open_Flower_P Parameter: Tissue Value: Open Flower vs. Whole Plant
  misc_feature: MA Experiment ID: 20000265 Result: Up-regulated in Transcription
  misc_feature: MA Experiment 20000265 PARAMETER Experiment Name: At_Open_Flower_P Parameter: Age (day) Value: 21
  misc_feature: MA Experiment 20000265 PARAMETER Experiment Name: At_Open_Flower_P Parameter: Plant Line Value: WS
  misc_feature: MA Experiment 20000265 PARAMETER Experiment Name: At_Open_Flower_P Parameter: Tissue Value: Closed Flower vs. Whole Plant
  misc_feature: MA Experiment ID: 20000286 Result: Up-regulated in Transcription
  misc_feature: MA Experiment 20000286 PARAMETER Experiment Name: At_Open_Flower_P Parameter: Age (day) Value: 21
  misc_feature: MA Experiment 20000286 PARAMETER Experiment Name: At_Open_Flower_P Parameter: Plant Line Value: WS
  misc_feature: MA Experiment 20000286 PARAMETER Experiment Name: At_Open_Flower_P Parameter: Tissue Value: Half Open vs. Whole Plant
  misc_feature: MA Experiment ID: 20000438 Result: Down-regulated in Transcription
  misc_feature: MA Experiment 20000438 PARAMETER Experiment Name: At_Shoots__P Parameter: Age (day) Value: 14
  misc_feature: MA Experiment 20000438 PARAMETER Experiment Name: At_Shoots__P Parameter: Tissue Value: Shoots vs. Whole Plant
  misc_feature: MA Experiment ID: 20001911 Result: Down-regulated in Transcription
  misc_feature: MA Experiment 20001911 PARAMETER Experiment Name: At_Drought_Reproduction_P Parameter: Age (day) Value: 40
  misc_feature: MA Experiment 20001911 PARAMETER Experiment Name: At_Drought_Reproduction_P Parameter: Organism Value: A. thaliana
  misc_feature: MA Experiment 20001911 PARAMETER Experiment Name: At_Drought_Reproduction_P Parameter: Plant Line Value: WS
  misc_feature: MA Experiment 20001911 PARAMETER Experiment Name: At_Drought_Reproduction_P Parameter: Timepoint (day) Value: 10
  misc_feature: MA Experiment 20001911 PARAMETER Experiment Name: At_Drought_Reproduction_P Parameter: Tissue Value: Flowers
  misc_feature: MA Experiment 20001911 PARAMETER Experiment Name: At_Drought_Reproduction_P Parameter: Treatment Value: Drought vs. No Drought
ctaaatgtactgaaaagaaacaccagtttaattaattatacttccctcatatataactatcaaccaagtacaaaacttttgtcaattctcaaaatcaactttcaccacataattatctaacatgtgtatgttccaaaaccagtttaaatagaattacttttcagaaaatacatgtatattaactctatctaataaagaagaaacacatacttatctcatagattccattcataaaactatgctttagtgagtaagaaaaccagtaatcaaacacaaattgacaagacactatatggatgtaaaaagtggggaaaaatggtgataaatagtagagaaaattaaaaagaaaaaaaatattcctttataaatgtatatacccatctcttcaccagcacaaccttaccttccattttctgcaacttctccaaatctcatactttccagaaaatcattttcccaagaaaaataaaactttcccctttgttcttctccccccaacagcaatcacggcgtaccaatcggagctaggaggagattcctctcccttgaggaaatctgggagaggaaagatcgaaatcaaacggatcgagaacacaacgaatcgtcaagtcactttttgcaaacgtagaaatggtttgctcaagaaagcttacgagctctctgttctttgtgatgctgaagtcgcactcatcgtcttctctagccgtggtcgtctctatgagtactctaacaacagtgtaaaagggactattgagaggtacaagaaggcaatatcggacaattctaacaccggatcggtggcagaaattaatgcacagtattatcaacaagaatcagccaaattgcgtcaacaaataatcagcatacaaaactccaacaggcaattgatgggtgagacgatagggtcaatgtctcccaaagagctcaggaacttggaaggcagattagagagaagtattacccgaatccgatccaagaagaatgagctcttattttctgaaatcgactacatgcagaaaagagaagttgatttgcataacgataaccagattcttcgtgcaaagatagctgaaaatgagaggaacaatccgagtataagtctaatgccaggaggatctaactacgagcagcttatgccaccacctcaaacgcaatctcaaccgtttgattcacggaattatttccaagtcgcggcattgcaacctaacaatcaccattactcatccgcgggtcgccaagaccaaaccgctctccagttagtgtaatataggctgaaggaaatggccgggagtgaataaaaaccagaattgggttgagcaagcaatataaagctaatgcatgttatatatatatttatcccatgaatgttgtatcagtgaattttatgcttatgttgatgtgaaattaatatcttaaagacatgtcattaatgtgcttaatttgcttc

SEQ ID NO: 49348 - protein, 125 aa, Arabidopsis thaliana
  peptide (1)..(125): Ceres Seq. ID no. 13592263
  misc_feature (1)..(62): Pfam Name: K-box region Pfam Description: K-box region
  misc_feature (1)..(122): Homolog of NCBI NO: 19743774 NR Description: AP3-like protein [Gossypium hirsutum]
  misc_feature (1)..(125): Homolog of NCBI NO: 16973298 NR Description: C-type MADS box protein [Malus x domestica]
  misc_feature (1)..(125): Homolog of NCBI NO: 3913005 NR Description: AGAMOUS protein (GAG2)
  misc_feature (1)..(124): Homolog of NCBI NO: 602900 NR Description: SLM1 [Silene latifolia]
  misc_feature (1)..(125): Homolog of NCBI NO: 2981131 NR Description: AGAMOUS homolog [Populus balsamifera subsp.
  misc_feature (1)..(125): Homolog of NCBI NO: 399096 NR Description: AGAMOUS protein
  misc_feature (1)..(125): Homolog of NCBI NO: 3915597 NR Description: Floral homeotic protein AGAMOUS
  misc_feature (1)..(125): Homolog of NCBI NO: 7446527 NR Description: floral homeotic protein agamous - Arabidopsis
  misc_feature (1)..(125): Homolog of NCBI NO: 1345505 NR Description: agamous gene product (AA 1-285) [Arabidopsis
  misc_feature (1)..(125): Homolog of NCBI NO: 22328782 NR Description: floral homeotic protein agamous (AGAMOUS)
MGETIGSMSPKELRNLEGRLERSITRIRSKKNELLFSEIDYMQKREVDLHNDNQILRAKIAENERNNPSISLMPGGSNYEQLMPPPQTQSQPFDSRNYFQVAALQPNNHHYSSAGRQDQTALQLV

SEQ ID NO: 49349 - protein, 118 aa, Arabidopsis thaliana
  peptide (1)..(118): Ceres Seq. ID no. 13592264
  misc_feature (1)..(55): Pfam Name: K-box region Pfam Description: K-box region
  misc_feature (1)..(115): Homolog of NCBI NO: 19743774 NR Description: AP3-like protein [Gossypium hirsutum]
  misc_feature (1)..(118): Homolog of NCBI NO: 16973298 NR Description: C-type MADS box protein [Malus x domestica]
  misc_feature (1)..(118): Homolog of NCBI NO: 3913005 NR Description: AGAMOUS protein (GAG2)
  misc_feature (1)..(117): Homolog of NCBI NO: 602900 NR Description: SLM1 [Silene latifolia]
  misc_feature (1)..(118): Homolog of NCBI NO: 2981131 NR Description: AGAMOUS homolog [Populus balsamifera subsp.
  misc_feature (1)..(118): Homolog of NCBI NO: 399096 NR Description: AGAMOUS protein
  misc_feature (1)..(118): Homolog of NCBI NO: 3915597 NR Description: Floral homeotic protein AGAMOUS
  misc_feature (1)..(118): Homolog of NCBI NO: 7446527 NR Description: floral homeotic protein agamous - Arabidopsis
  misc_feature (1)..(118): Homolog of NCBI NO: 1345505 NR Description: agamous gene product (AA 1-285) [Arabidopsis
  misc_feature (1)..(118): Homolog of NCBI NO: 22328782 NR Description: floral homeotic protein agamous (AGAMOUS)
MSPKELRNLEGRLERSITRIRSKKNELLFSEIDYMQKREVDLHNDNQILRAKIAENERNNPSISLMPGGSNYEQLMPPPQTQSQPFDSRNYFQVAALQPNNHHYSSAGRQDQTALQLV

SEQ ID NO: 49350 - protein, 84 aa, Arabidopsis thaliana
  peptide (1)..(84): Ceres Seq. ID no. 13592265
  misc_feature (1)..(81): Homolog of NCBI NO: 19743774 NR Description: AP3-like protein [Gossypium hirsutum]
  misc_feature (1)..(84): Homolog of NCBI NO: 16973298 NR Description: C-type MADS box protein [Malus x domestica]
  misc_feature (1)..(84): Homolog of NCBI NO: 3913005 NR Description: AGAMOUS protein (GAG2)
  misc_feature (1)..(83): Homolog of NCBI NO: 602900 NR Description: SLM1 [Silene latifolia]
  misc_feature (1)..(84): Homolog of NCBI NO: 2981131 NR Description: AGAMOUS homolog [Populus balsamifera subsp.
  misc_feature (1)..(84): Homolog of NCBI NO: 399096 NR Description: AGAMOUS protein
  misc_feature (1)..(84): Homolog of NCBI NO: 3915597 NR Description: Floral homeotic protein AGAMOUS
  misc_feature (1)..(84): Homolog of NCBI NO: 7446527 NR Description: floral homeotic protein agamous - Arabidopsis
  misc_feature (1)..(84): Homolog of NCBI NO: 1345505 NR Description: agamous gene product (AA 1-285) [Arabidopsis
  misc_feature (1)..(84): Homolog of NCBI NO: 22328782 NR Description: floral homeotic protein agamous (AGAMOUS)
MQKREVDLHNDNQILRAKIAENERNNPSISLMPGGSNYEQLMPPPQTQSQPFDSRNYFQVAALQPNNHHYSSAGRQDQTALQLV

SEQ ID NO: 49351 - DNA, 1585 bp, Arabidopsis thaliana
  misc_feature (1)..(1585): Ceres Seq. ID no. 12592066
  misc_feature: MA Experiment ID: 20000173 Result: Down-regulated in Transcription
  misc_feature: MA Experiment 20000173 PARAMETER Experiment Name: At_42deg_Heat_P Parameter: Age (day) Value: 14
  misc_feature: MA Experiment 20000173 PARAMETER Experiment Name: At_42deg_Heat_P Parameter: Organism Value: A. thaliana
  misc_feature: MA Experiment 20000173 PARAMETER Experiment Name: At_42deg_Heat_P Parameter: Plant Line Value: WS
  misc_feature: MA Experiment 20000173 PARAMETER Experiment Name: At_42deg_Heat_P Parameter: Temperature (deg C) Value: 42 vs. 22
  misc_feature: MA Experiment 20000173 PARAMETER Experiment Name: At_42deg_Heat_P Parameter: Timepoint (hr) Value: 6
  misc_feature: MA Experiment 20000173 PARAMETER Experiment Name: At_42deg_Heat_P Parameter: Tissue Value: Aerial
  misc_feature: MA Experiment ID: 20000179 Result: Down-regulated in Transcription
  misc_feature: MA Experiment 20000179 PARAMETER Experiment Name: At_Germinating_Seeds_P Parameter: Age (hr) Value: 6 vs. 0
  misc_feature: MA Experiment 20000179 PARAMETER Experiment Name: At_Germinating_Seeds_P Parameter: Tissue Value: Germinating Seeds
  misc_feature: MA Experiment ID: 20000184 Result: Down-regulated in Transcription
  misc_feature: MA Experiment 20000184 PARAMETER Experiment Name: At_Shoots__P Parameter: Age (day) Value: 7
  misc_feature: MA Experiment 20000184 PARAMETER Experiment Name: At_Shoots__P Parameter: Tissue Value: Shoots vs. Whole Plant
  misc_feature: MA Experiment ID: 20000213 Result: Down-regulated in Transcription
  misc_feature: MA Experiment 20000213 PARAMETER Experiment Name: At_4deg_Cold_P Parameter: Timepoint (hr) Value: 2
  misc_feature: MA Experiment ID: 20000234 Result: Down-regulated in Transcription
  misc_feature: MA Experiment 20000234 PARAMETER Experiment Name: At_Siliques_P Parameter: Age (day) Value: 21
  misc_feature: MA Experiment 20000234 PARAMETER Experiment Name: At_Siliques_P Parameter: Organism Value: A. thaliana
  misc_feature: MA Experiment 20000234 PARAMETER Experiment Name: At_Siliques_P Parameter: Plant Line Value: WS
  misc_feature: MA Experiment 20000234 PARAMETER Experiment Name: At_Siliques_P Parameter: Tissue Value: Less Than 5mm Siliques vs. Whole Plant
  misc_feature: MA Experiment ID: 20000235 Result: Down-regulated in Transcription
  misc_feature: MA Experiment 20000235 PARAMETER Experiment Name: At_Siliques_P Parameter: Age (day) Value: 21
  misc_feature: MA Experiment 20000235 PARAMETER Experiment Name: At_Siliques_P Parameter: Organism Value: A. thaliana
  misc_feature: MA Experiment 20000235 PARAMETER Experiment Name: At_Siliques_P Parameter: Plant Line Value: WS
  misc_feature: MA Experiment 20000235 PARAMETER Experiment Name: At_Siliques_P Parameter: Tissue Value: 5-10mm Siliques vs. Whole Plant
  misc_feature: MA Experiment ID: 20000264 Result: Down-regulated in Transcription
  misc_feature: MA Experiment 20000264 PARAMETER Experiment Name: At_Open_Flower_P Parameter: Age (day) Value: 21
  misc_feature: MA Experiment 20000264 PARAMETER Experiment Name: At_Open_Flower_P Parameter: Plant Line Value: WS
  misc_feature: MA Experiment 20000264 PARAMETER Experiment Name: At_Open_Flower_P Parameter: Tissue Value: Open Flower vs. Whole Plant
  misc_feature: MA Experiment ID: 20000265 Result: Down-regulated in Transcription
  misc_feature: MA Experiment 20000265 PARAMETER Experiment Name: At_Open_Flower_P Parameter: Age (day) Value: 21
  misc_feature: MA Experiment 20000265 PARAMETER Experiment Name: At_Open_Flower_P Parameter: Plant Line Value: WS
  misc_feature: MA Experiment 20000265 PARAMETER Experiment Name: At_Open_Flower_P Parameter: Tissue Value: Closed Flower vs. Whole Plant
  misc_feature: MA Experiment ID: 20000286 Result: Down-regulated in Transcription
  misc_feature: MA Experiment 20000286 PARAMETER Experiment Name: At_Open_Flower_P Parameter: Age (day) Value: 21
  misc_feature: MA Experiment 20000286 PARAMETER Experiment Name: At_Open_Flower_P Parameter: Plant Line Value: WS
  misc_feature: MA Experiment 20000286 PARAMETER Experiment Name: At_Open_Flower_P Parameter: Tissue Value: Half Open vs. Whole Plant
  misc_feature: MA Experiment ID: 20000794 Result: Down-regulated in Transcription
  misc_feature: MA Experiment 20000794 PARAMETER Experiment Name: At_Petals_P Parameter: Age (day) Value: 23-25 days
  misc_feature: MA Experiment 20000794 PARAMETER Experiment Name: At_Petals_P Parameter: Plant Line Value: WS
  misc_feature: MA Experiment 20000794 PARAMETER Experiment Name: At_Petals_P Parameter: Tissue Value: Petals vs. Whole plant
  misc_feature: MA Experiment ID: 20001247 Result: Up-regulated in Transcription
  misc_feature: MA Experiment 20001247 PARAMETER Experiment Name: At_Far-red-induction_P Parameter: Age (day) Value: 7
  misc_feature: MA Experiment 20001247 PARAMETER Experiment Name: At_Far-red-induction_P Parameter: Light Value: Far-red vs. White
  misc_feature: MA Experiment 20001247 PARAMETER Experiment Name: At_Far-red-induction_P Parameter: Organism Value: A. thaliana
  misc_feature: MA Experiment 20001247 PARAMETER Experiment Name: At_Far-red-induction_P Parameter: Plant Line Value: Columbia
  misc_feature: MA Experiment 20001247 PARAMETER Experiment Name: At_Far-red-induction_P Parameter: Timepoint (hr) Value: 1
  misc_feature: MA Experiment 20001247 PARAMETER Experiment Name: At_Far-red-induction_P Parameter: Tissue Value: Whole Plant
  misc_feature: MA Experiment ID: 20001248 Result: Up-regulated in Transcription
  misc_feature: MA Experiment 20001248 PARAMETER Experiment Name: At_Far-red-induction_P Parameter: Age (day) Value: 7
  misc_feature: MA Experiment 20001248 PARAMETER Experiment Name: At_Far-red-induction_P Parameter: Light Value: Far-red vs. White
  misc_feature: MA Experiment 20001248 PARAMETER Experiment Name: At_Far-red-induction_P Parameter: Organism Value: A. thaliana
  misc_feature: MA Experiment 20001248 PARAMETER Experiment Name: At_Far-red-induction_P Parameter: Plant Line Value: Columbia
  misc_feature: MA Experiment 20001248 PARAMETER Experiment Name: At_Far-red-induction_P Parameter: Timepoint (hr) Value: 4
  misc_feature: MA Experiment 20001248 PARAMETER Experiment Name: At_Far-red-induction_P Parameter: Tissue Value: Whole Plant
  misc_feature: MA Experiment ID: 20001450 Result: Up-regulated in Transcription
  misc_feature: MA Experiment 20001450 PARAMETER Experiment Name: At_Far-red-induction_P Parameter: Age (day) Value: 7
  misc_feature: MA Experiment 20001450 PARAMETER Experiment Name: At_Far-red-induction_P Parameter: Light Value: Far-red vs. White
  misc_feature: MA Experiment 20001450 PARAMETER Experiment Name: At_Far-red-induction_P Parameter: Organism Value: A. thaliana
  misc_feature: MA Experiment 20001450 PARAMETER Experiment Name: At_Far-red-induction_P Parameter: Plant Line Value: Columbia
  misc_feature: MA Experiment 20001450 PARAMETER Experiment Name: At_Far-red-induction_P Parameter: Timepoint (hr) Value: 8
  misc_feature: MA Experiment 20001450 PARAMETER Experiment Name: At_Far-red-induction_P Parameter: Tissue Value: Whole Plant
  misc_feature: MA Experiment ID: 20001451 Result: Up-regulated in Transcription
  misc_feature: MA Experiment 20001451 PARAMETER Experiment Name: At_Far-red-induction_P Parameter: Age (day) Value: 7
  misc_feature: MA Experiment 20001451 PARAMETER Experiment Name: At_Far-red-induction_P Parameter: Light Value: Far-red vs. White
  misc_feature: MA Experiment 20001451 PARAMETER Experiment Name: At_Far-red-induction_P Parameter: Organism Value: A. thaliana
  misc_feature: MA Experiment 20001451 PARAMETER Experiment Name: At_Far-red-induction_P Parameter: Plant Line Value: Columbia
  misc_feature: MA Experiment 20001451 PARAMETER Experiment Name: At_Far-red-induction_P Parameter: Timepoint (hr) Value: 24
  misc_feature: MA Experiment 20001451 PARAMETER Experiment Name: At_Far-red-induction_P Parameter: Tissue Value: Whole Plant
  misc_feature: MA Experiment ID: 20001558 Result: Down-regulated in Transcription
  misc_feature: MA Experiment 20001558 PARAMETER Experiment Name: At_Drought_Soil_Dry_P Parameter: Age (day) Value: 27
  misc_feature: MA Experiment 20001558 PARAMETER Experiment Name: At_Drought_Soil_Dry_P Parameter: Organism Value: A. thaliana
  misc_feature: MA Experiment 20001558 PARAMETER Experiment Name: At_Drought_Soil_Dry_P Parameter: Plant Line Value: WS
  misc_feature: MA Experiment 20001558 PARAMETER Experiment Name: At_Drought_Soil_Dry_P Parameter: Post Timepoint (hr) Value: 6
  misc_feature: MA Experiment 20001558 PARAMETER Experiment Name: At_Drought_Soil_Dry_P Parameter: Post-Treatment Value: Re-Water vs. No Drought
  misc_feature: MA Experiment 20001558 PARAMETER Experiment Name: At_Drought_Soil_Dry_P Parameter: Timepoint (day) Value: 13
  misc_feature: MA Experiment 20001558 PARAMETER Experiment Name: At_Drought_Soil_Dry_P Parameter: Treatment Value: Drought vs. No Drought
  misc_feature: MA Experiment ID: 20001560 Result: Down-regulated in Transcription
  misc_feature: MA Experiment 20001560 PARAMETER Experiment Name: At_Drought_Soil_Dry_P Parameter: Age (day) Value: 28
  misc_feature: MA Experiment 20001560 PARAMETER Experiment Name: At_Drought_Soil_Dry_P Parameter: Organism Value: A. thaliana
  misc_feature: MA Experiment 20001560 PARAMETER Experiment Name: At_Drought_Soil_Dry_P Parameter: Plant Line Value: WS
  misc_feature: MA Experiment 20001560 PARAMETER Experiment Name: At_Drought_Soil_Dry_P Parameter: Post Timepoint (hr) Value: None
  misc_feature: MA Experiment 20001560 PARAMETER Experiment Name: At_Drought_Soil_Dry_P Parameter: Post-Treatment Value: None
  misc_feature: MA Experiment 20001560 PARAMETER Experiment Name: At_Drought_Soil_Dry_P Parameter: Timepoint (day) Value: 14
  misc_feature: MA Experiment 20001560 PARAMETER Experiment Name: At_Drought_Soil_Dry_P Parameter: Treatment Value: Drought vs. No Drought
  misc_feature: MA Experiment ID: 20001757 Result: Up-regulated in Transcription
  misc_feature: MA Experiment 20001757 PARAMETER Experiment Name: At_50mM_NH4NO3_L-to-H_P Parameter: Timepoint (hr) Value: 6
  misc_feature: MA Experiment 20001757 PARAMETER Experiment Name: At_50mM_NH4NO3_L-to-H_P Parameter: Tissue Value: Leaf
  misc_feature: MA Experiment 20001757 PARAMETER Experiment Name: At_50mM_NH4NO3_L-to-H_P Parameter: Treatment Value: 50mM NH4NO3 vs 100mM Mannitol
  misc_feature: MA Experiment ID: 20001904 Result: Down-regulated in Transcription
  misc_feature: MA Experiment 20001904 PARAMETER Experiment Name: At_Drought_Reproduction_P Parameter: Age (day) Value: 37
  misc_feature: MA Experiment 20001904 PARAMETER Experiment Name: At_Drought_Reproduction_P Parameter: Organism Value: A. thaliana
  misc_feature: MA Experiment 20001904 PARAMETER Experiment Name: At_Drought_Reproduction_P Parameter: Plant Line Value: WS
  misc_feature: MA Experiment 20001904 PARAMETER Experiment Name: At_Drought_Reproduction_P Parameter: Timepoint (day) Value: 7
  misc_feature: MA Experiment 20001904 PARAMETER Experiment Name: At_Drought_Reproduction_P Parameter: Tissue Value: Rosettes
  misc_feature: MA Experiment 20001904 PARAMETER Experiment Name: At_Drought_Reproduction_P Parameter: Treatment Value: Drought vs. No Drought
  misc_feature: MA Experiment ID: 20001905 Result: Down-regulated in Transcription
  misc_feature: MA Experiment 20001905 PARAMETER Experiment Name: At_Drought_Reproduction_P Parameter: Age (day) Value: 40
  misc_feature: MA Experiment 20001905 PARAMETER Experiment Name: At_Drought_Reproduction_P Parameter: Organism Value: A. thaliana
  misc_feature: MA Experiment 20001905 PARAMETER Experiment Name: At_Drought_Reproduction_P Parameter: Plant Line Value: WS
  misc_feature: MA Experiment 20001905 PARAMETER Experiment Name: At_Drought_Reproduction_P Parameter: Timepoint (day) Value: 10
  misc_feature: MA Experiment 20001905 PARAMETER Experiment Name: At_Drought_Reproduction_P Parameter: Tissue Value: Rosettes
  misc_feature: MA Experiment 20001905 PARAMETER Experiment Name: At_Drought_Reproduction_P Parameter: Treatment Value: Drought vs. No Drought
agactgacaccaatcttcctctttaacagtcgttttattacagcgttctgatcaaaactccagtgaaagttcaaagtacacagagagaaacaaaaaaagaagaagaagaagttgaagaagaagaagccatgaatgctttagcagcaacaaacagaaacttcaagttagctgctaggcttcttggtctggattctaagctcgagaaaagtcttctcatccccttccgagaaatcaaggtggaatgtaccataccgaaagacgatggtacactagcatcattcgttgggttcagagttcaacacgacaatgcaagaggtcccatgaaaggtggaatcagatatcatcctgaggttgatccggatgaagtgaacgcattggctcagctcatgacatggaaaacagcagtggctaagattccttacggaggagctaaaggagggattggttgtgatcctagcaagctcagtatctccgagctcgagcggttgactcgagttttcactcagaagattcatgatctcattgggattcatactgatgttccagctccagatatgggcactggtcctcagacaatggcttggattcttgatgaatactctaagtttcatggatactcgcctgcagttgtgactggaaaacccattgatcttggtggatcgctagggagagacgcggctactggaagaggagtgatgtttggtaccgaagctttgcttaacgagcacggaaagaccatatcagggcagcgttttgtcatccagggatttggtaatgtgggttcttgggcggcaaagctgataagtgaaaagggtgggaagattgttgccgtgagtgacattaccggagcaatcaagaacaaggatggtatcgatatcccggccttgctcaagcatactaaagaacacagaggtgtcaaagggtttgatggtgcagatccgatcgatccaaactccatactggttgaggattgtgatatcctcgtccctgcagcacttggtggtgtcatcaacagggagaatgcgaatgagattaaagcaaagttcatcatagaagcagctaatcatccaactgatccggacgcggatgagatcctaagtaagaaaggtgtggttattctcccggacatatatgcaaactctggaggagtcactgtaagttacttcgaatgggttcagaacattcaaggctttatgtgggaggaagagaaggtgaacgatgagctaaagacttacatgactcgctctttcaaggacttgaaagagatgtgcaaaactcactcttgcgatctccggatgggagctttcacactcggtgttaatcgtgtggctcaagctaccattctcagaggctggggagcttaaagattatctaatctcttatgcaatctctttagcagctcctgaataagaattgagccaaactttaatctactttttgttttatcctcctactttggcttagaggtcatcctgagttaacagatatgtgtttacaagtactagaagacgcttctgtatgtaataaaaccttggactctaatagttaatgagcttttttactctcttgttaataaaaccaaggt

SEQ ID NO: 49352 - protein, 411 aa, Arabidopsis thaliana
  peptide (1)..(411): Ceres Seq. ID no. 12592067
  misc_feature (176)..(408): Pfam Name: Glutamate/Leucine/Phenylalanine/Valine dehydrogenase Pfam Description: Glutamate/Leucine/Phenylalanine/Valine
  misc_feature (1)..(411): Homolog of NCBI NO: 4150965 NR Description: glutamate dehydrogenase [Asparagus officinalis]
  misc_feature (1)..(411): Homolog of NCBI NO: 7431775 NR Description: glutamate dehydrogenase (EC 1.4.1.2) - maize
  misc_feature (1)..(411): Homolog of NCBI NO: 28269441 NR Description: glutamate dehydrogenase [Oryza sativa (japonica
  misc_feature (1)..(411): Homolog of NCBI NO: 7431768 NR Description: glutamate dehydrogenase (EC 1.4.1.-) B -
  misc_feature (1)..(411): Homolog of NCBI NO: 12229803 NR Description: Glutamate dehydrogenase (GDH) (Legdh1)
  misc_feature (1)..(411): Homolog of NCBI NO: 12643806 NR Description: Glutamate dehydrogenase B (GDH B)
  misc_feature (1)..(411): Homolog of NCBI NO: 20873461 NR Description: glutamate dehydrogenase [Nicotiana tabacum]
  misc_feature (1)..(411): Homolog of NCBI NO: 21314959 NR Description: NADH-glutamate dehydrogenase [Lycopersicon
  misc_feature (1)..(411): Homolog of NCBI NO: 15228667 NR Description: putative glutamate dehydrogenase; protein id:
  misc_feature (1)..(411): Homolog of NCBI NO: 15238762 NR Description: glutamate dehydrogenase (EC 1.4.1.-) 1
MNALAATNRNFKLAARLLGLDSKLEKSLLIPFREIKVECTIPKDDGTLASFVGFRVQHDNARGPMKGGIRYHPEVDPDEVNALAQLMTWKTAVAKIPYGGAKGGIGCDPSKLSISELERLTRVFTQKIHDLIGIHTDVPAPDMGTGPQTMAWILDEYSKFHGYSPAVVTGKPIDLGGSLGRDAATGRGVMFGTEALLNEHGKTISGQRFVIQGFGNVGSWAAKLISEKGGKIVAVSDITGAIKNKDGIDIPALLKHTKEHRGVKGFDGADPIDPNSILVEDCDILVPAALGGVINRENANEIKAKFIIEAANHPTDPDADEILSKKGVVILPDIYANSGGVTVSYFEWVQNIQGFMWEEEKVNDELKTYMTRSFKDLKEMCKTHSCDLRMGAFTLGVNRVAQATILRGWGA

SEQ ID NO: 49353 - protein, 347 aa, Arabidopsis thaliana
  peptide (1)..(347): Ceres Seq. ID no. 12592068
  misc_feature (112)..(344): Pfam Name: Glutamate/Leucine/Phenylalanine/Valine dehydrogenase Pfam Description: Glutamate/Leucine/Phenylalanine/Valine
  misc_feature (1)..(347): Homolog of NCBI NO: 4150965 NR Description: glutamate dehydrogenase [Asparagus officinalis]
  misc_feature (1)..(347): Homolog of NCBI NO: 7431775 NR Description: glutamate dehydrogenase (EC 1.4.1.2) - maize
  misc_feature (1)..(347): Homolog of NCBI NO: 28269441 NR Description: glutamate dehydrogenase [Oryza sativa (japonica
  misc_feature (1)..(347): Homolog of NCBI NO: 7431768 NR Description: glutamate dehydrogenase (EC 1.4.1.-) B -
  misc_feature (1)..(347): Homolog of NCBI NO: 12229803 NR Description: Glutamate dehydrogenase (GDH) (Legdh1)
  misc_feature (1)..(347): Homolog of NCBI NO: 12643806 NR Description: Glutamate dehydrogenase B (GDH B)
  misc_feature (1)..(347): Homolog of NCBI NO: 20873461 NR Description: glutamate dehydrogenase [Nicotiana tabacum]
  misc_feature (1)..(347): Homolog of NCBI NO: 21314959 NR Description: NADH-glutamate dehydrogenase [Lycopersicon
  misc_feature (1)..(347): Homolog of NCBI NO: 15228667 NR Description: putative glutamate dehydrogenase; protein id:
  misc_feature (1)..(347): Homolog of NCBI NO: 15238762 NR Description: glutamate dehydrogenase (EC 1.4.1.-) 1
MKGGIRYHPEVDPDEVNALAQLMTWKTAVAKIPYGGAKGGIGCDPSKLSISELERLTRVFTQKIHDLIGIHTDVPAPDMGTGPQTMAWILDEYSKFHGYSPAVVTGKPIDLGGSLGRDAATGRGVMFGTEALLNEHGKTISGQRFVIQGFGNVGSWAAKLISEKGGKIVAVSDITGAIKNKDGIDIPALLKHTKEHRGVKGFDGADPIDPNSILVEDCDILVPAALGGVINRENANEIKAKFIIEAANHPTDPDADEILSKKGVVILPDIYANSGGVTVSYFEWVQNIQGFMWEEEKVNDELKTYMTRSFKDLKEMCKTHSCDLRMGAFTLGVNRVAQATILRGWGA

SEQ ID NO: 49354 - protein, 325 aa, Arabidopsis thaliana
  peptide (1)..(325): Ceres Seq. ID no. 12592069
  misc_feature (90)..(322): Pfam Name: Glutamate/Leucine/Phenylalanine/Valine dehydrogenase Pfam Description: Glutamate/Leucine/Phenylalanine/Valine
  misc_feature (1)..(325): Homolog of NCBI NO: 4150965 NR Description: glutamate dehydrogenase [Asparagus officinalis]
  misc_feature (1)..(325): Homolog of NCBI NO: 7431775 NR Description: glutamate dehydrogenase (EC 1.4.1.2) - maize
  misc_feature (1)..(325): Homolog of NCBI NO: 28269441 NR Description: glutamate dehydrogenase [Oryza sativa (japonica
  misc_feature (1)..(325): Homolog of NCBI NO: 7431768 NR Description: glutamate dehydrogenase (EC 1.4.1.-) B -
  misc_feature (1)..(325): Homolog of NCBI NO: 12229803 NR Description: Glutamate dehydrogenase (GDH) (Legdh1)
  misc_feature (1)..(325): Homolog of NCBI NO: 12643806 NR Description: Glutamate dehydrogenase B (GDH B)
  misc_feature (1)..(325): Homolog of NCBI NO: 20873461 NR Description: glutamate dehydrogenase [Nicotiana tabacum]
  misc_feature (1)..(325): Homolog of NCBI NO: 21314959 NR Description: NADH-glutamate dehydrogenase [Lycopersicon
  misc_feature (1)..(325): Homolog of NCBI NO: 15228667 NR Description: putative glutamate dehydrogenase; protein id:
  misc_feature (1)..(325): Homolog of NCBI NO: 15238762 NR Description: glutamate dehydrogenase (EC 1.4.1.-) 1
MTWKTAVAKIPYGGAKGGIGCDPSKLSISELERLTRVFTQKIHDLIGIHTDVPAPDMGTGPQTMAWILDEYSKFHGYSPAVVTGKPIDLGGSLGRDAATGRGVMFGTEALLNEHGKTISGQRFVIQGFGNVGSWAAKLISEKGGKIVAVSDITGAIKNKDGIDIPALLKHTKEHRGVKGFDGADPIDPNSILVEDCDILVPAALGGVINRENANEIKAKFIIEAANHPTDPDADEILSKKGVVILPDIYANSGGVTVSYFEWVQNIQGFMWEEEKVNDELKTYMTRSFKDLKEMCKTHSCDLRMGAFTLGVNRVAQATILRGWGA

SEQ ID NO: 49355 - DNA, 3317 bp, Arabidopsis thaliana
  misc_feature (1)..(3317): Ceres Seq. ID no. 12601928
  misc_feature: MA Experiment ID: 20000264 Result: Down-regulated in Transcription
  misc_feature: MA Experiment 20000264 PARAMETER Experiment Name: At_Open_Flower_P Parameter: Age (day) Value: 21
  misc_feature: MA Experiment 20000264 PARAMETER Experiment Name: At_Open_Flower_P Parameter: Plant Line Value: WS
  misc_feature: MA Experiment 20000264 PARAMETER Experiment Name: At_Open_Flower_P Parameter: Tissue Value: Open Flower vs. Whole Plant
  misc_feature: MA Experiment ID: 20000265 Result: Down-regulated in Transcription
  misc_feature: MA Experiment 20000265 PARAMETER Experiment Name: At_Open_Flower_P Parameter: Age (day) Value: 21
  misc_feature: MA Experiment 20000265 PARAMETER Experiment Name: At_Open_Flower_P Parameter: Plant Line Value: WS
  misc_feature: MA Experiment 20000265 PARAMETER Experiment Name: At_Open_Flower_P Parameter: Tissue Value: Closed Flower vs. Whole Plant
  misc_feature: MA Experiment ID: 20001248 Result: Up-regulated in Transcription
  misc_feature: MA Experiment 20001248 PARAMETER Experiment Name: At_Far-red-induction_P Parameter: Age (day) Value: 7
  misc_feature: MA Experiment 20001248 PARAMETER Experiment Name: At_Far-red-induction_P Parameter: Light Value: Far-red vs. White
  misc_feature: MA Experiment 20001248 PARAMETER Experiment Name: At_Far-red-induction_P Parameter: Organism Value: A. thaliana
  misc_feature: MA Experiment 20001248 PARAMETER Experiment Name: At_Far-red-induction_P Parameter: Plant Line Value: Columbia
  misc_feature: MA Experiment 20001248 PARAMETER Experiment Name: At_Far-red-induction_P Parameter: Timepoint (hr) Value: 4
  misc_feature: MA Experiment 20001248 PARAMETER Experiment Name: At_Far-red-induction_P Parameter: Tissue Value: Whole Plant
  misc_feature: MA Experiment ID: 20001557 Result: Up-regulated in Transcription
  misc_feature: MA Experiment 20001557 PARAMETER Experiment Name: At_Drought_Soil_Dry_P Parameter: Age (day) Value: 27
  misc_feature: MA Experiment 20001557 PARAMETER Experiment Name: At_Drought_Soil_Dry_P Parameter: Organism Value: A. thaliana
  misc_feature: MA Experiment 20001557 PARAMETER Experiment Name: At_Drought_Soil_Dry_P Parameter: Plant Line Value: WS
  misc_feature: MA Experiment 20001557 PARAMETER Experiment Name: At_Drought_Soil_Dry_P Parameter: Post Timepoint (hr) Value: 3
  misc_feature: MA Experiment 20001557 PARAMETER Experiment Name: At_Drought_Soil_Dry_P Parameter: Post-Treatment Value: Re-Water vs. No Drought
  misc_feature: MA Experiment 20001557 PARAMETER Experiment Name: At_Drought_Soil_Dry_P Parameter: Timepoint (day) Value: 13
  misc_feature: MA Experiment 20001557 PARAMETER Experiment Name: At_Drought_Soil_Dry_P Parameter: Treatment Value: Drought vs. No Drought
ggctgctgttttcctctctctctctctctaaactcgagaatttttgtagagagaggaggcaaagtgcgaaagctaaacgcagatccacgatcaatctcctccaccttcaaaagccttcaaaagtgtttcttcttcgtcttcttccttttattatctgtgccttgacagatccacgatccgattctggtcaaattttacatttctgcagataagctgctcatactagttatacaacagactccatagaaggtgacatttgtttaagatactcttgttcctggaacacatacgaagatgaagaaagtcttcggacaaactgttagagaccttaagagagaggtcaacaagaaagtgctcaaagttcctggagtagaacagaaggttctagatgctactagtaatgagccatggggtccacatggatcacttcttgctgatcttgcgcaagcttccagaaattatcatgaatatcagctgatcatggtggtcatatggaaacgccttagcgacaccggaaaaaactggcggcatgtctataaggctttgacagttttggagtacatggtaggccatggatcagaacgtgttatagacgagattagagaacgtgcatatcaaatttcgacattgtccgattttcagtatattgattccggtggtagagatcaaggaagcaatgttaggaagaaatcacagagcctggtggctttggtgaatgacaaggaaagaatagctgaagtcagacagaaggctgctgctaatagagataagtatcgcagctcagcaccaggtgggatgtataagccttcaggcggatatggggataaatatgattacggaagccgggatgaagagcgaagtagttatggaagagaaagagaatatggttacagagatgatgatagaaatagtcgtgatggagatcgtcattccagggactctgaagaccggtatgggagagatggtaatagggatgatgattacaggggaaggagcagaagtgttgataactatgggtcacgaggtaggagttcggaaagagagcgggaggatgatggccattcttcatcacggggcagtggtgctcgagctgatgataattctcaggatgggagaggggggctccagaggaagttttctgaacaaaatattggcgctccacccagttatgaagaagctgtcagtgattcacgcagccctgtatatagtgaaagggatggtggggagaccccacaagttaccgctccaggagctgcttctcctcctcccccacaagttgctgctccagaggctgcttctcctccaactggaaccaacacagccaatacaactgctacttttgttaatgaatcaccttctcagaaagttgagactttcgatgaatttgatccacgcagtgcgttttcagctggccctccagcatatgcatctacagatggtgttacagctcctccaactgtgacttctatgtctgcccctaccacctcaaacagtgttgagatggacttgcttggttcccttgcagacgtattttcatcaaacgcattggccattgtaccagctgattctatctatgttgaaaccaatggacaagcaaacgctggtccagctccatcgttttctacatctcagccatcaactcagtcatttgatgacccatttggtgactctcctttcaaggccttcacttctactgacaccgactcaaccccacagcagaattttggagcttctttccagccaccacctccagccttcacttcagaggtctcacatcctgatactgctcataactttggctttggggactcattttccgccgttgccaatcctgatcctgcttctcagaatgtgcaacctccatcgaactcaccaggttttcctcaagagcaatttgctacatctcagagtggtattgatatcctcgctggcattctcccaccatctggacctccagtacaatcgggtccctcaataccaacatctcaatttcctcccagtggaaacaacatgtacgagggatttcattctcagccgccggtatctacagctccaaacctgcctggacaaactccatttggacaagctgttcaaccatataacatggttcctcattctcaaaatatgactggagccatgccatttaatagtggaggcttcatgcaccagccgggctcacaaactccttactctaccccaagtggaccagctggtcagttcatggcacaccaaggtcatggaatgccgccatcccatggtccacaacgaactcaatccggacctgttactctgcaagggaacaacaatgtcatgggagacatgttctcgcaagctacgcccaactccttgacgtcatcatcatctcatccagatctcacacctttaacaggagcaattgagattgttcctccgcctcagaaaaagtttgagccaaaatcatcagtctgggcagacacgttgagcagggggcttgttaactttaacatatctggatctaaaacaaatccattggcagacataggagttgacttcgaggcgatcaacaggagagagaaacggctggagaaacaaacaaacacaccagcaacatcgactatcaatatgggtaaagccatgggatcaggcactggcttagggcgttctggtgcaactgctatgagacctccacctaatccaatgacaggctctggcatgcccatgggcggaggaatgggtgttggtagctacggaggtatgaaccagaaccaacccatgggtatgggtatgggggccggaatgaaccaaaaccaaccgatgggtatgggaatgggacccggcatgaacatgaacatgaacatgggaggatatggccaaggctatccgatgcaaccacaaaacccagggatggtacctagcccaaacatgcctggcaataactacaatccgatgatgggtcaaggtggttacaaccctcaacaatcctatggtggtggataccggtaagatcaagccaaacatgatgcacttgacttcattcgtgtaatcaagaatacgctcgcctgtgctttttctttactctgggatatgtaatatcagtcgataaaagtactcaggttacattattcatccaggcaacacggctccacgaattttcttctctgtttgttcttgccttactcgtcactcatcattcatttttatttttttctggtttggaccaaattgagagcttgttgtgaaatttgtaccagtgtgagagtggcaaaccttgctcgggtctgccctttttttgttatatgcatataatttgatatatacacattcacttctatttcttt

SEQ ID NO: 49356 - protein, 895 aa, Arabidopsis thaliana
  peptide (1)..(895): Ceres Seq. ID no. 12601929
  misc_feature (23)..(146): Pfam Name: ENTH domain Pfam Description: ENTH domain
  misc_feature (708)..(784): Homolog of NCBI NO: 11357227 NR Description: clathrin binding protein-like - Arabidopsis
  misc_feature (3)..(456): Homolog of NCBI NO: 11357227 NR Description: clathrin binding protein-like - Arabidopsis
  misc_feature (79)..(893): Homolog of NCBI NO: 15451572 NR Description: Putative epsin [Oryza sativa]
  misc_feature (282)..(888): Homolog of NCBI NO: 18411135 NR Description: epsin-like protein
  misc_feature (282)..(888): Homolog of NCBI NO: 11357285 NR Description: epsin-like protein - Arabidopsis thaliana
  misc_feature (1)..(891): Homolog of NCBI NO: 15451572 NR Description: Putative epsin [Oryza sativa]
  misc_feature (1)..(260): Homolog of NCBI NO: 25408841 NR Description: probable clathrin binding protein (epsin)
  misc_feature (1)..(646): Homolog of NCBI NO: 18411135 NR Description: epsin-like protein
  misc_feature (1)..(646): Homolog of NCBI NO: 11357285 NR Description: epsin-like protein - Arabidopsis thaliana
  misc_feature (392)..(895): Homolog of NCBI NO: 25408842 NR Description: hypothetical protein At2g43170 [imported] -
MKKVFGQTVRDLKREVNKKVLKVPGVEQKVLDATSNEPWGPHGSLLADLAQASRNYHEYQLIMVVIWKRLSDTGKNWRHVYKALTVLEYMVGHGSERVIDEIRERAYQISTLSDFQYIDSGGRDQGSNVRKKSQSLVALVNDKERIAEVRQKAAANRDKYRSSAPGGMYKPSGGYGDKYDYGSRDEERSSYGREREYGYRDDDRNSRDGDRHSRDSEDRYGRDGNRDDDYRGRSRSVDNYGSRGRSSEREREDDGHSSSRGSGARADDNSQDGRGGLQRKFSEQNIGAPPSYEEAVSDSRSPVYSERDGGETPQVTAPGAASPPPPQVAAPEAASPPTGTNTANTTATFVNESPSQKVETFDEFDPRSAFSAGPPAYASTDGVTAPPTVTSMSAPTTSNSVEMDLLGSLADVFSSNALAIVPADSIYVETNGQANAGPAPSFSTSQPSTQSFDDPFGDSPFKAFTSTDTDSTPQQNFGASFQPPPPAFTSEVSHPDTAHNFGFGDSFSAVANPDPASQNVQPPSNSPGFPQEQFATSQSGIDILAGILPPSGPPVQSGPSIPTSQFPPSGNNMYEGFHSQPPVSTAPNLPGQTPFGQAVQPYNMVPHSQNMTGAMPFNSGGFMHQPGSQTPYSTPSGPAGQFMAHQGHGMPPSHGPQRTQSGPVTLQGNNNVMGDMFSQATPNSLTSSSSHPDLTPLTGAIEIVPPPQKKFEPKSSVWADTLSRGLVNFNISGSKTNPLADIGVDFEAINRREKRLEKQTNTPATSTINMGKAMGSGTGLGRSGATAMRPPPNPMTGSGMPMGGGMGVGSYGGMNQNQPMGMGMGAGMNQNQPMGMGMGPGMNMNMNMGGYGQGYPMQPQNPGMVPSPNMPGNNYNPMMGQGGYNPQQSYGGGYR

SEQ ID NO: 49357 - protein, 833 aa, Arabidopsis thaliana
  peptide (1)..(833): Ceres Seq. ID no. 12601930
  misc_feature (1)..(84): Pfam Name: ENTH domain Pfam Description: ENTH domain
  misc_feature (646)..(722): Homolog of NCBI NO: 11357227 NR Description: clathrin binding protein-like - Arabidopsis
  misc_feature (1)..(394): Homolog of NCBI NO: 11357227 NR Description: clathrin binding protein-like - Arabidopsis
  misc_feature (17)..(831): Homolog of NCBI NO: 15451572 NR Description: Putative epsin [Oryza sativa]
  misc_feature (220)..(826): Homolog of NCBI NO: 18411135 NR Description: epsin-like protein
  misc_feature (220)..(826): Homolog of NCBI NO: 11357285 NR Description: epsin-like protein - Arabidopsis thaliana
  misc_feature (1)..(829): Homolog of NCBI NO: 15451572 NR Description: Putative epsin [Oryza sativa]
  misc_feature (1)..(198): Homolog of NCBI NO: 25408841 NR Description: probable clathrin binding protein (epsin)
  misc_feature (1)..(584): Homolog of NCBI NO: 18411135 NR Description: epsin-like protein
  misc_feature (1)..(584): Homolog of NCBI NO: 11357285 NR Description: epsin-like protein - Arabidopsis thaliana
  misc_feature (330)..(833): Homolog of NCBI NO: 25408842 NR Description: hypothetical protein At2g43170 [imported] -
MVVIWKRLSDTGKNWRHVYKALTVLEYMVGHGSERVIDEIRERAYQISTLSDFQYIDSGGRDQGSNVRKKSQSLVALVNDKERIAEVRQKAAANRDKYRSSAPGGMYKPSGGYGDKYDYGSRDEERSSYGREREYGYRDDDRNSRDGDRHSRDSEDRYGRDGNRDDDYRGRSRSVDNYGSRGRSSEREREDDGHSSSRGSGARADDNSQDGRGGLQRKFSEQNIGAPPSYEEAVSDSRSPVYSERDGGETPQVTAPGAASPPPPQVAAPEAASPPTGTNTANTTATFVNESPSQKVETFDEFDPRSAFSAGPPAYASTDGVTAPPTVTSMSAPTTSNSVEMDLLGSLADVFSSNALAIVPADSIYVETNGQANAGPAPSFSTSQPSTQSFDDPFGDSPFKAFTSTDTDSTPQQNFGASFQPPPPAFTSEVSHPDTAHNFGFGDSFSAVANPDPASQNVQPPSNSPGFPQEQFATSQSGIDILAGILPPSGPPVQSGPSIPTSQFPPSGNNMYEGFHSQPPVSTAPNLPGQTPFGQAVQPYNMVPHSQNMTGAMPFNSGGFMHQPGSQTPYSTPSGPAGQFMAHQGHGMPPSHGPQRTQSGPVTLQGNNNVMGDMFSQATPNSLTSSSSHPDLTPLTGAIEIVPPPQKKFEPKSSVWADTLSRGLVNFNISGSKTNPLADIGVDFEAINRREKRLEKQTNTPATSTINMGKAMGSGTGLGRSGATAMRPPPNPMTGSGMPMGGGMGVGSYGGMNQNQPMGMGMGAGMNQNQPMGMGMGPGMNMNMNMGGYGQGYPMQPQNPGMVPSPNMPGNNYNPMMGQGGYNPQQSYGGGYR

SEQ ID NO: 49358 - protein, 806 aa, Arabidopsis thaliana
  peptide (1)..(806): Ceres Seq. ID no. 12601931
  misc_feature (1)..(57): Pfam Name: ENTH domain Pfam Description: ENTH domain
  misc_feature (619)..(695): Homolog of NCBI NO: 11357227 NR Description: clathrin binding protein-like - Arabidopsis
  misc_feature (1)..(367): Homolog of NCBI NO: 11357227 NR Description: clathrin binding protein-like - Arabidopsis
  misc_feature (1)..(804): Homolog of NCBI NO: 15451572 NR Description: Putative epsin [Oryza sativa]
  misc_feature (193)..(799): Homolog of NCBI NO: 18411135 NR Description: epsin-like protein
  misc_feature (193)..(799): Homolog of NCBI NO: 11357285 NR Description: epsin-like protein - Arabidopsis thaliana
  misc_feature (1)..(802): Homolog of NCBI NO: 15451572 NR Description: Putative epsin [Oryza sativa]
  misc_feature (1)..(171): Homolog of NCBI NO: 25408841 NR Description: probable clathrin binding protein (epsin)
  misc_feature (1)..(557): Homolog of NCBI NO: 18411135 NR Description: epsin-like protein
  misc_feature (1)..(557): Homolog of NCBI NO: 11357285 NR Description: epsin-like protein - Arabidopsis thaliana
  misc_feature (303)..(806): Homolog of NCBI NO: 25408842 NR Description: hypothetical protein At2g43170 [imported] -
MVGHGSERVIDEIRERAYQISTLSDFQYIDSGGRDQGSNVRKKSQSLVALVNDKERIAEVRQKAAANRDKYRSSAPGGMYKPSGGYGDKYDYGSRDEERSSYGREREYGYRDDDRNSRDGDRHSRDSEDRYGRDGNRDDDYRGRSRSVDNYGSRGRSSEREREDDGHSSSRGSGARADDNSQDGRGGLQRKFSEQNIGAPPSYEEAVSDSRSPVYSERDGGETPQVTAPGAASPPPPQVAAPEAASPPTGTNTANTTATFVNESPSQKVETFDEFDPRSAFSAGPPAYASTDGVTAPPTVTSMSAPTTSNSVEMDLLGSLADVFSSNALAIVPADSIYVETNGQANAGPAPSFSTSQPSTQSFDDPFGDSPFKAFTSTDTDSTPQQNFGASFQPPPPAFTSEVSHPDTAHNFGFGDSFSAVANPDPASQNVQPPSNSPGFPQEQFATSQSGIDILAGILPPSGPPVQSGPSIPTSQFPPSGNNMYEGFHSQPPVSTAPNLPGQTPFGQAVQPYNMVPHSQNMTGAMPFNSGGFMHQPGSQTPYSTPSGPAGQFMAHQGHGMPPSHGPQRTQSGPVTLQGNNNVMGDMFSQATPNSLTSSSSHPDLTPLTGAIEIVPPPQKKFEPKSSVWADTLSRGLVNFNISGSKTNPLADIGVDFEAINRREKRLEKQTNTPATSTINMGKAMGSGTGLGRSGATAMRPPPNPMTGSGMPMGGGMGVGSYGGMNQNQPMGMGMGAGMNQNQPMGMGMGPGMNMNMNMGGYGQGYPMQPQNPGMVPSPNMPGNNYNPMMGQGGYNPQQSYGGGYR

SEQ ID NO: 49359 - DNA, 2456 bp, Arabidopsis thaliana; identical to SEQ ID NO: 45655
  misc_feature (1)..(2456): Ceres Seq. ID no. 13592201
  misc_feature: MA Experiment ID: 20000166 Result: Down-regulated in Transcription
  misc_feature: MA Experiment 20000166 PARAMETER Experiment Name: At_100uM_ABA_P Parameter: Age (day) Value: 14
  misc_feature: MA Experiment 20000166 PARAMETER Experiment Name: At_100uM_ABA_P Parameter: Organism Value: A. thaliana
  misc_feature: MA Experiment 20000166 PARAMETER Experiment Name: At_100uM_ABA_P Parameter: Plant Line Value: WS
  misc_feature: MA Experiment 20000166 PARAMETER Experiment Name: At_100uM_ABA_P Parameter: Timepoint (hr) Value: 1
  misc_feature: MA Experiment 20000166 PARAMETER Experiment Name: At_100uM_ABA_P Parameter: Tissue Value: Aerial
  misc_feature: MA Experiment 20000166 PARAMETER Experiment Name: At_100uM_ABA_P Parameter: Treatment Value: 100uM ABA vs. No Treatment
  misc_feature: MA Experiment ID: 20000169 Result: Up-regulated in Transcription
  misc_feature: MA Experiment 20000169 PARAMETER Experiment Name: At_100uM_ABA_P Parameter: Age (day) Value: 14
  misc_feature: MA Experiment 20000169 PARAMETER Experiment Name: At_100uM_ABA_P Parameter: Organism Value: A. thaliana
  misc_feature: MA Experiment 20000169 PARAMETER Experiment Name: At_100uM_ABA_P Parameter: Plant Line Value: WS
  misc_feature: MA Experiment 20000169 PARAMETER Experiment Name: At_100uM_ABA_P Parameter: Timepoint (hr) Value: 6
  misc_feature: MA Experiment 20000169 PARAMETER Experiment Name: At_100uM_ABA_P Parameter: Tissue Value: Aerial
  misc_feature: MA Experiment 20000169 PARAMETER Experiment Name: At_100uM_ABA_P Parameter: Treatment Value: 100uM ABA vs. No Treatment
  misc_feature: MA Experiment ID: 20000171 Result: Down-regulated in Transcription
  misc_feature: MA Experiment 20000171 PARAMETER Experiment Name: At_42deg_Heat_P Parameter: Age (day) Value: 14
  misc_feature: MA Experiment 20000171 PARAMETER Experiment Name: At_42deg_Heat_P Parameter: Organism Value: A. thaliana
  misc_feature: MA Experiment 20000171 PARAMETER Experiment Name: At_42deg_Heat_P Parameter: Plant Line Value: WS
  misc_feature: MA Experiment 20000171 PARAMETER Experiment Name: At_42deg_Heat_P Parameter: Temperature (deg C) Value: 42 vs. 22
  misc_feature: MA Experiment 20000171 PARAMETER Experiment Name: At_42deg_Heat_P Parameter: Timepoint (hr) Value: 1
  misc_feature: MA Experiment 20000171 PARAMETER Experiment Name: At_42deg_Heat_P Parameter: Tissue Value: Aerial
  misc_feature: MA Experiment ID: 20000173 Result: Down-regulated in Transcription
  misc_feature: MA Experiment 20000173 PARAMETER Experiment Name: At_42deg_Heat_P Parameter: Age (day) Value: 14
  misc_feature: MA Experiment 20000173 PARAMETER Experiment Name: At_42deg_Heat_P Parameter: Organism Value: A. thaliana
  misc_feature: MA Experiment 20000173 PARAMETER Experiment Name: At_42deg_Heat_P Parameter: Plant Line Value: WS
  misc_feature: MA Experiment 20000173 PARAMETER Experiment Name: At_42deg_Heat_P Parameter: Temperature (deg C) Value: 42 vs. 22
  misc_feature: MA Experiment 20000173 PARAMETER Experiment Name: At_42deg_Heat_P Parameter: Timepoint (hr) Value: 6
  misc_feature: MA Experiment 20000173 PARAMETER Experiment Name: At_42deg_Heat_P Parameter: Tissue Value: Aerial
  misc_feature: MA Experiment ID: 20000179 Result: Down-regulated in Transcription
  misc_feature: MA Experiment 20000179 PARAMETER Experiment Name: At_Germinating_Seeds_P Parameter: Age (hr) Value: 6 vs. 0
  misc_feature: MA Experiment 20000179 PARAMETER Experiment Name: At_Germinating_Seeds_P Parameter: Tissue Value: Germinating Seeds
  misc_feature: MA Experiment ID: 20000184 Result: Down-regulated in Transcription
  misc_feature: MA Experiment 20000184 PARAMETER Experiment Name: At_Shoots__P Parameter: Age (day) Value: 7
  misc_feature: MA Experiment 20000184 PARAMETER Experiment Name: At_Shoots__P Parameter: Tissue Value: Shoots vs. Whole Plant
  misc_feature: MA Experiment ID: 20000227 Result: Up-regulated in Transcription
  misc_feature: MA Experiment 20000227 PARAMETER Experiment Name: At_Root-Tips-vs-Tops_P Parameter: Tissue Value: Root Tips vs. Root Tops
  misc_feature: MA Experiment ID: 20000264 Result: Up-regulated in Transcription
  misc_feature: MA Experiment 20000264 PARAMETER Experiment Name: At_Open_Flower_P Parameter: Age (day) Value: 21
  misc_feature: MA Experiment 20000264 PARAMETER Experiment Name: At_Open_Flower_P Parameter: Plant Line Value: WS
  misc_feature: MA Experiment 20000264 PARAMETER Experiment Name: At_Open_Flower_P Parameter: Tissue Value: Open Flower vs. Whole Plant
  misc_feature: MA Experiment ID: 20000269 Result: Down-regulated in Transcription
  misc_feature: MA Experiment 20000269 PARAMETER Experiment Name: At_1mM_KNO3_L-vs-H_Roots_P Parameter: Age (day) Value: 7,10,12
  misc_feature: MA Experiment 20000269 PARAMETER Experiment Name: At_1mM_KNO3_L-vs-H_Roots_P Parameter: Organism Value: A. thaliana
  misc_feature: MA Experiment 20000269 PARAMETER Experiment Name: At_1mM_KNO3_L-vs-H_Roots_P Parameter: Plant Line Value: WS
  misc_feature: MA Experiment 20000269 PARAMETER Experiment Name: At_1mM_KNO3_L-vs-H_Roots_P Parameter: Timepoint (day) Value: 7,10,12
  misc_feature: MA Experiment 20000269 PARAMETER Experiment Name: At_1mM_KNO3_L-vs-H_Roots_P Parameter: Tissue Value: Roots
  misc_feature: MA Experiment 20000269 PARAMETER Experiment Name: At_1mM_KNO3_L-vs-H_Roots_P Parameter: Treatment Value: 1mM KNO3 vs. 50mM KNO3
  misc_feature: MA Experiment ID: 20000436 Result: Up-regulated in Transcription
  misc_feature: MA Experiment 20000436 PARAMETER Experiment Name: At_Drought_P Parameter: Age (day) Value: 7
  misc_feature: MA Experiment 20000436 PARAMETER Experiment Name: At_Drought_P Parameter: Organism Value: A. thaliana
  misc_feature: MA Experiment 20000436 PARAMETER Experiment Name: At_Drought_P Parameter: Plant Line Value: WS
  misc_feature: MA Experiment 20000436 PARAMETER Experiment Name: At_Drought_P Parameter: Timepoint (hr) Value: 12
  misc_feature: MA Experiment 20000436 PARAMETER Experiment Name: At_Drought_P Parameter: Tissue Value: Whole Plant
  misc_feature: MA Experiment 20000436 PARAMETER Experiment Name: At_Drought_P Parameter: Treatment Value: Drought vs. No Drought
  misc_feature: MA Experiment ID: 20000438 Result: Down-regulated in Transcription
  misc_feature: MA Experiment 20000438 PARAMETER Experiment Name: At_Shoots__P Parameter: Age (day) Value: 14
  misc_feature: MA Experiment 20000438 PARAMETER Experiment Name: At_Shoots__P Parameter: Tissue Value: Shoots vs. Whole Plant
  misc_feature: MA Experiment ID: 20000439 Result: Down-regulated in Transcription
  misc_feature: MA Experiment 20000439 PARAMETER Experiment Name: At_Roots__P Parameter: Age (day) Value: 14 vs. 21
  misc_feature: MA Experiment 20000439 PARAMETER Experiment Name: At_Roots__P Parameter: Organism Value: A. thaliana
  misc_feature: MA Experiment 20000439 PARAMETER Experiment Name: At_Roots__P Parameter: Tissue Value: Roots vs. Whole Plant
  misc_feature: MA Experiment ID: 20000441 Result: Up-regulated in Transcription
  misc_feature: MA Experiment 20000441 PARAMETER Experiment Name: At_1uM_BR-BRZ__P Parameter: Tissue Value: Shoot Apices
  misc_feature: MA Experiment 20000441 PARAMETER Experiment Name: At_1uM_BR-BRZ__P Parameter: Treatment Value: 1uM BR vs. No Treatment
  misc_feature: MA Experiment ID: 20000443 Result: Up-regulated in Transcription
  misc_feature: MA Experiment 20000443 PARAMETER Experiment Name: At_1uM_BR-BRZ__P Parameter: Tissue Value: Shoot Apices
  misc_feature: MA Experiment 20000443 PARAMETER Experiment Name: At_1uM_BR-BRZ__P Parameter: Treatment Value: 1uM BRZ vs. No Treatment
  misc_feature: MA Experiment ID: 20000453 Result: Up-regulated in Transcription
  misc_feature: MA Experiment 20000453 PARAMETER Experiment Name: At_100uM_ABA_P Parameter: Age (day) Value: 15
  misc_feature: MA Experiment 20000453 PARAMETER Experiment Name: At_100uM_ABA_P Parameter: Organism Value: A. thaliana
  misc_feature: MA Experiment 20000453 PARAMETER Experiment Name: At_100uM_ABA_P Parameter: Plant Line Value: WS
  misc_feature: MA Experiment 20000453 PARAMETER Experiment Name: At_100uM_ABA_P Parameter: Timepoint (hr) Value: 24
  misc_feature: MA Experiment 20000453 PARAMETER Experiment Name: At_100uM_ABA_P Parameter: Tissue Value: Aerial
  misc_feature: MA Experiment 20000453 PARAMETER Experiment Name: At_100uM_ABA_P Parameter: Treatment Value: 100uM ABA vs. No Treatment
  misc_feature: MA Experiment ID: 20000495 Result: Up-regulated in Transcription
  misc_feature: MA Experiment 20000495 PARAMETER Experiment Name: At_Guard_Cells_P Parameter: Harvest Date Value: 8/2/2002
  misc_feature: MA Experiment 20000495 PARAMETER Experiment Name: At_Guard_Cells_P Parameter: Organism Value: A. thaliana
  misc_feature: MA Experiment 20000495 PARAMETER Experiment Name: At_Guard_Cells_P Parameter: Tissue Value: Guard Cells vs. Leaves
  misc_feature: MA Experiment ID: 20000496 Result: Up-regulated in Transcription
  misc_feature: MA Experiment 20000496 PARAMETER Experiment Name: At_Guard_Cells_P Parameter: Harvest Date Value: 7/19/2002
  misc_feature: MA Experiment 20000496 PARAMETER Experiment Name: At_Guard_Cells_P Parameter: Organism Value: Canola
  misc_feature: MA Experiment 20000496 PARAMETER Experiment Name: At_Guard_Cells_P Parameter: Tissue Value: Guard Cells vs. Leaves
  misc_feature: MA Experiment ID: 20000573 Result: Up-regulated in Transcription
  misc_feature: MA Experiment 20000573 PARAMETER Experiment Name: At_100uM_ABA_Mutants__P Parameter: Organism Value: A. thaliana
  misc_feature: MA Experiment 20000573 PARAMETER Experiment Name: At_100uM_ABA_Mutants__P Parameter: Plant Line Value: CS22 vs. Ler wt
  misc_feature: MA Experiment 20000573 PARAMETER Experiment Name: At_100uM_ABA_Mutants__P Parameter: Timepoint (hr) Value: N/A
  misc_feature: MA Experiment 20000573 PARAMETER Experiment Name: At_100uM_ABA_Mutants__P Parameter: Tissue Value: Whole Plant
  misc_feature: MA Experiment 20000573 PARAMETER Experiment Name: At_100uM_ABA_Mutants__P Parameter: Treatment Value: None
  misc_feature: MA Experiment ID: 20000606 Result: Up-regulated in Transcription
  misc_feature: MA Experiment 20000606 PARAMETER Experiment Name: At_CS8548_Mutant_P Parameter: Age (day) Value: 14
  misc_feature: MA Experiment 20000606 PARAMETER Experiment Name: At_CS8548_Mutant_P Parameter: Plant Line Value: CS8548 vs. wt
  misc_feature: MA Experiment 20000606 PARAMETER Experiment Name: At_CS8548_Mutant_P Parameter: Tissue Value: Whole Plant
  misc_feature: MA Experiment ID: 20000794 Result: Up-regulated in Transcription
  misc_feature: MA Experiment 20000794 PARAMETER Experiment Name: At_Petals_P Parameter: Age (day) Value: 23-25 days
  misc_feature: MA Experiment 20000794 PARAMETER Experiment Name: At_Petals_P Parameter: Plant Line Value: WS
  misc_feature: MA Experiment 20000794 PARAMETER Experiment Name: At_Petals_P Parameter: Tissue Value: Petals vs. Whole plant
  misc_feature: MA Experiment ID: 20001247 Result: Up-regulated in Transcription
  misc_feature: MA Experiment 20001247 PARAMETER Experiment Name: At_Far-red-induction_P Parameter: Age (day) Value: 7
  misc_feature: MA Experiment 20001247 PARAMETER Experiment Name: At_Far-red-induction_P Parameter: Light Value: Far-red vs. White
  misc_feature: MA Experiment 20001247 PARAMETER Experiment Name: At_Far-red-induction_P Parameter: Organism Value: A. thaliana
  misc_feature: MA Experiment 20001247 PARAMETER Experiment Name: At_Far-red-induction_P Parameter: Plant Line Value: Columbia
  misc_feature: MA Experiment 20001247 PARAMETER Experiment Name: At_Far-red-induction_P Parameter: Timepoint (hr) Value: 1
  misc_feature: MA Experiment 20001247 PARAMETER Experiment Name: At_Far-red-induction_P Parameter: Tissue Value: Whole Plant
  misc_feature: MA Experiment ID: 20001248 Result: Up-regulated in Transcription
  misc_feature: MA Experiment 20001248 PARAMETER Experiment Name: At_Far-red-induction_P Parameter: Age (day) Value: 7
  misc_feature: MA Experiment 20001248 PARAMETER Experiment Name: At_Far-red-induction_P Parameter: Light Value: Far-red vs. White
  misc_feature: MA Experiment 20001248 PARAMETER Experiment Name: At_Far-red-induction_P Parameter: Organism Value: A. thaliana
  misc_feature: MA Experiment 20001248 PARAMETER Experiment Name: At_Far-red-induction_P Parameter: Plant Line Value: Columbia
  misc_feature: MA Experiment 20001248 PARAMETER Experiment Name: At_Far-red-induction_P Parameter: Timepoint (hr) Value: 4
  misc_feature: MA Experiment 20001248 PARAMETER Experiment Name: At_Far-red-induction_P Parameter: Tissue Value: Whole Plant
  misc_feature: MA Experiment ID: 20001450 Result: Up-regulated in Transcription
  misc_feature: MA Experiment 20001450 PARAMETER Experiment Name: At_Far-red-induction_P Parameter: Age (day) Value: 7
  misc_feature: MA Experiment 20001450 PARAMETER Experiment Name: At_Far-red-induction_P Parameter: Light Value: Far-red vs. White
  misc_feature: MA Experiment 20001450 PARAMETER Experiment Name: At_Far-red-induction_P Parameter: Organism Value: A. thaliana
  misc_feature: MA Experiment 20001450 PARAMETER Experiment Name: At_Far-red-induction_P Parameter: Plant Line Value: Columbia
  misc_feature: MA Experiment 20001450 PARAMETER Experiment Name: At_Far-red-induction_P Parameter: Timepoint (hr) Value: 8
  misc_feature: MA Experiment 20001450 PARAMETER Experiment Name: At_Far-red-induction_P Parameter: Tissue Value: Whole Plant
  misc_feature: MA Experiment ID: 20001451 Result: Up-regulated in Transcription
  misc_feature: MA Experiment 20001451 PARAMETER Experiment Name: At_Far-red-induction_P Parameter: Age (day) Value: 7
  misc_feature: MA Experiment 20001451 PARAMETER Experiment Name: At_Far-red-induction_P Parameter: Light Value: Far-red vs. White
  misc_feature: MA Experiment 20001451 PARAMETER Experiment Name: At_Far-red-induction_P Parameter: Organism Value: A. thaliana
  misc_feature: MA Experiment 20001451 PARAMETER Experiment Name: At_Far-red-induction_P Parameter: Plant Line Value: Columbia
  misc_feature: MA Experiment 20001451 PARAMETER Experiment Name: At_Far-red-induction_P Parameter: Timepoint (hr) Value: 24
  misc_feature: MA Experiment 20001451 PARAMETER Experiment Name: At_Far-red-induction_P Parameter: Tissue Value: Whole Plant
  misc_feature: MA Experiment ID: 20001554 Result: Up-regulated in Transcription
  misc_feature: MA Experiment 20001554 PARAMETER Experiment Name: At_Drought_Soil_Dry_P Parameter: Age (day) Value: 21
  misc_feature: MA Experiment 20001554 PARAMETER Experiment Name: At_Drought_Soil_Dry_P Parameter: Organism Value: A. thaliana
  misc_feature: MA Experiment 20001554 PARAMETER Experiment Name: At_Drought_Soil_Dry_P Parameter: Plant Line Value: WS
  misc_feature: MA Experiment 20001554 PARAMETER Experiment Name: At_Drought_Soil_Dry_P Parameter: Post Timepoint (hr) Value: None
  misc_feature: MA Experiment 20001554 PARAMETER Experiment Name: At_Drought_Soil_Dry_P Parameter: Post-Treatment Value: None
  misc_feature: MA Experiment 20001554 PARAMETER Experiment Name: At_Drought_Soil_Dry_P Parameter: Timepoint (day) Value: 7
  misc_feature: MA Experiment 20001554 PARAMETER Experiment Name: At_Drought_Soil_Dry_P Parameter: Treatment Value: Drought vs. No Drought

SEQ ID NO: 49360 - protein, 793 aa, Arabidopsis thaliana; identical to SEQ ID NO: 45656
  peptide (1)..(793): Ceres Seq. ID no. 13592202
  misc_feature (423)..(653): Pfam Name: Glycosyl hydrolase family 3 C terminal domain Pfam Description: Glycosyl hydrolase family 3 C terminal domain
  misc_feature (423)..(653): Pfam Name: Glycosyl hydrolase family 3 C terminal domain Pfam Description: Glycosyl hydrolase family 3 C terminal domain
  misc_feature (423)..(653): Pfam Name: Glycosyl hydrolase family 3 C terminal domain Pfam Description: Glycosyl hydrolase family 3 C terminal domain
  misc_feature (32)..(218): Homolog of NCBI NO: 15238197 NR Description: glycosyl hydrolase family 3 [Arabidopsis
  misc_feature (193)..(791): Homolog of NCBI NO: 15238197 NR Description: glycosyl hydrolase family 3 [Arabidopsis
  misc_feature (49)..(790): Homolog of NCBI NO: 18025342 NR Description: beta-D-xylosidase [Hordeum vulgare]
  misc_feature (32)..(792): Homolog of NCBI NO: 25518461 NR Description: hypothetical protein T14P4.8 - Arabidopsis
  misc_feature (32)..(792): Homolog of NCBI NO: 18378991 NR Description: glycosyl hydrolase family 3 [Arabidopsis
  misc_feature (32)..(218): Homolog of NCBI NO: 15238197 NR Description: glycosyl hydrolase family 3 [Arabidopsis
  misc_feature (49)..(790): Homolog of NCBI NO: 18025342 NR Description: beta-D-xylosidase [Hordeum vulgare]
  misc_feature (32)..(792): Homolog of NCBI NO: 18378991 NR Description: glycosyl hydrolase family 3 [Arabidopsis
  misc_feature (32)..(792): Homolog of NCBI NO: 25518461 NR Description: hypothetical protein T14P4.8 - Arabidopsis
  misc_feature (49)..(790): Homolog of NCBI NO: 18025342 NR Description: beta-D-xylosidase [Hordeum vulgare]
  misc_feature (193)..(791): Homolog of NCBI NO: 15238197 NR Description: glycosyl hydrolase family 3 [Arabidopsis
  misc_feature (32)..(218): Homolog of NCBI NO: 15238197 NR Description: glycosyl hydrolase family 3 [Arabidopsis
  misc_feature (45)..(793): Homolog of NCBI NO: 18025340 NR Description: alpha-L-arabinofuranosidase/beta-D-xylosidase
  misc_feature (32)..(792): Homolog of NCBI NO: 15239867 NR Description: glycosyl hydrolase family 3 [Arabidopsis
  misc_feature (34)..(793): Homolog of NCBI NO: 32481073 NR Description: auxin-induced beta-glucosidase [Chenopodium
  misc_feature (35)..(793): Homolog of NCBI NO: 15230897 NR Description: glycosyl hydrolase family 3 [Arabidopsis thaliana]
  misc_feature (35)..(793): Homolog of NCBI NO: 25453520 NR Description: beta-1,4-xylosidase [imported] - Arabidopsis
  misc_feature (45)..(793): Homolog of NCBI NO: 18025340 NR Description: alpha-L-arabinofuranosidase/beta-D-xylosidase
  misc_feature (32)..(792): Homolog of NCBI NO: 15239867 NR Description: glycosyl hydrolase family 3 [Arabidopsis
  misc_feature (34)..(793): Homolog of NCBI NO: 32481073 NR Description: auxin-induced beta-glucosidase [Chenopodium
  misc_feature (35)..(793): Homolog of NCBI NO: 15230897 NR Description: glycosyl hydrolase family 3 [Arabidopsis thaliana]
  misc_feature (35)..(793): Homolog of NCBI NO: 25453520 NR Description: beta-1,4-xylosidase [imported] - Arabidopsis
  misc_feature (32)..(792): Homolog of NCBI NO: 18378991 NR Description: glycosyl hydrolase family 3 [Arabidopsis
  misc_feature (32)..(792): Homolog of NCBI NO: 25518461 NR Description: hypothetical protein T14P4.8 - Arabidopsis
  misc_feature (193)..(791): Homolog of NCBI NO: 15238197 NR Description: glycosyl hydrolase family 3 [Arabidopsis
  misc_feature (35)..(793): Homolog of NCBI NO: 25453520 NR Description: beta-1,4-xylosidase [imported] - Arabidopsis
  misc_feature (35)..(793): Homolog of NCBI NO: 15230897 NR Description: glycosyl hydrolase family 3 [Arabidopsis thaliana]
  misc_feature (34)..(793): Homolog of NCBI NO: 32481073 NR Description: auxin-induced beta-glucosidase [Chenopodium
  misc_feature (32)..(792): Homolog of NCBI NO: 15239867 NR Description: glycosyl hydrolase family 3 [Arabidopsis
  misc_feature (45)..(793): Homolog of NCBI NO: 18025340 NR Description: alpha-L-arabinofuranosidase/beta-D-xylosidase

SEQ ID NO: 49361 - protein, 784 aa, Arabidopsis thaliana; identical to SEQ ID NO: 45657
  peptide (1)..(784): Ceres Seq. ID no. 13592203
  misc_feature (414)..(644): Pfam Name: Glycosyl hydrolase family 3 C terminal domain Pfam Description: Glycosyl hydrolase family 3 C terminal domain
  misc_feature (414)..(644): Pfam Name: Glycosyl hydrolase family 3 C terminal domain Pfam Description: Glycosyl hydrolase family 3 C terminal domain
  misc_feature (414)..(644): Pfam Name: Glycosyl hydrolase family 3 C terminal domain Pfam Description: Glycosyl hydrolase family 3 C terminal domain
  misc_feature (23)..(209): Homolog of NCBI NO: 15238197 NR Description: glycosyl hydrolase family 3 [Arabidopsis
  misc_feature (184)..(782): Homolog of NCBI NO: 15238197 NR Description: glycosyl hydrolase family 3 [Arabidopsis
  misc_feature (40)..(781): Homolog of NCBI NO: 18025342 NR Description: beta-D-xylosidase [Hordeum vulgare]
  misc_feature (23)..(783): Homolog of NCBI NO: 25518461 NR Description: hypothetical protein T14P4.8 - Arabidopsis
  misc_feature (23)..(783): Homolog of NCBI NO: 18378991 NR Description: glycosyl hydrolase family 3 [Arabidopsis
  misc_feature (23)..(209): Homolog of NCBI NO: 15238197 NR Description: glycosyl hydrolase family 3 [Arabidopsis
  misc_feature (40)..(781): Homolog of NCBI NO: 18025342 NR Description: beta-D-xylosidase [Hordeum vulgare]
  misc_feature (23)..(783): Homolog of NCBI NO: 18378991 NR Description: glycosyl hydrolase family 3 [Arabidopsis
  misc_feature (23)..(783): Homolog of NCBI NO: 25518461 NR Description: hypothetical protein T14P4.8 - Arabidopsis
  misc_feature (40)..(781): Homolog of NCBI NO: 18025342 NR Description: beta-D-xylosidase [Hordeum vulgare]
  misc_feature (184)..(782): Homolog of NCBI NO: 15238197 NR Description: glycosyl hydrolase family 3 [Arabidopsis
  misc_feature (23)..(209): Homolog of NCBI NO: 15238197 NR Description: glycosyl hydrolase family 3 [Arabidopsis
  misc_feature (36)..(784): Homolog of NCBI NO: 18025340 NR Description: alpha-L-arabinofuranosidase/beta-D-xylosidase
  misc_feature (23)..(783): Homolog of NCBI NO: 15239867 NR Description: glycosyl hydrolase family 3 [Arabidopsis
  misc_feature (25)..(784): Homolog of NCBI NO: 32481073 NR Description: auxin-induced beta-glucosidase [Chenopodium
  misc_feature (26)..(784): Homolog of NCBI NO: 15230897 NR Description: glycosyl hydrolase family 3 [Arabidopsis thaliana]
  misc_feature (26)..(784): Homolog of NCBI NO: 25453520 NR Description: beta-1,4-xylosidase [imported] - Arabidopsis
  misc_feature (36)..(784): Homolog of NCBI NO: 18025340 NR Description: alpha-L-arabinofuranosidase/beta-D-xylosidase
  misc_feature (23)..(783): Homolog of NCBI NO: 15239867 NR Description: glycosyl hydrolase family 3 [Arabidopsis
  misc_feature (25)..(784): Homolog of NCBI NO: 32481073 NR Description: auxin-induced beta-glucosidase [Chenopodium
  misc_feature (26)..(784): Homolog of NCBI NO: 15230897 NR Description: glycosyl hydrolase family 3 [Arabidopsis thaliana]
  misc_feature (26)..(784): Homolog of NCBI NO: 25453520 NR Description: beta-1,4-xylosidase [imported] - Arabidopsis
  misc_feature (23)..(783): Homolog of NCBI NO: 18378991 NR Description: glycosyl hydrolase family 3 [Arabidopsis
  misc_feature (23)..(783): Homolog of NCBI NO: 25518461 NR Description: hypothetical protein T14P4.8 - Arabidopsis
  misc_feature (184)..(782): Homolog of NCBI NO: 15238197 NR Description: glycosyl hydrolase family 3 [Arabidopsis
  misc_feature (26)..(784): Homolog of NCBI NO: 25453520 NR Description: beta-1,4-xylosidase [imported] - Arabidopsis
  misc_feature (26)..(784): Homolog of NCBI NO: 15230897 NR Description: glycosyl hydrolase family 3 [Arabidopsis thaliana]
  misc_feature (25)..(784): Homolog of NCBI NO: 32481073 NR Description: auxin-induced beta-glucosidase [Chenopodium
  misc_feature (23)..(783): Homolog of NCBI NO: 15239867 NR Description: glycosyl hydrolase family 3 [Arabidopsis
  misc_feature (36)..(784): Homolog of NCBI NO: 18025340 NR Description: alpha-L-arabinofuranosidase/beta-D-xylosidase

SEQ ID NO: 49362 - protein, 626 aa, Arabidopsis thaliana; identical to SEQ ID NO: 45658
  peptide (1)..(626): Ceres Seq. ID no. 13592204
  misc_feature (256)..(486): Pfam Name: Glycosyl hydrolase family 3 C terminal domain Pfam Description: Glycosyl hydrolase family 3 C terminal domain
  misc_feature (256)..(486): Pfam Name: Glycosyl hydrolase family 3 C terminal domain Pfam Description: Glycosyl hydrolase family 3 C terminal domain
  misc_feature (256)..(486): Pfam Name: Glycosyl hydrolase family 3 C terminal domain Pfam Description: Glycosyl hydrolase family 3 C terminal domain
  misc_feature (1)..(51): Homolog of NCBI NO: 15238197 NR Description: glycosyl hydrolase family 3 [Arabidopsis
  misc_feature (26)..(624): Homolog of NCBI NO: 15238197 NR Description: glycosyl hydrolase family 3 [Arabidopsis
  misc_feature (1)..(623): Homolog of NCBI NO: 18025342 NR Description: beta-D-xylosidase [Hordeum vulgare]
  misc_feature (1)..(625): Homolog of NCBI NO: 25518461 NR Description: hypothetical protein T14P4.8 - Arabidopsis
  misc_feature (1)..(625): Homolog of NCBI NO: 18378991 NR Description: glycosyl hydrolase family 3 [Arabidopsis
  misc_feature (1)..(51): Homolog of NCBI NO: 15238197 NR Description: glycosyl hydrolase family 3 [Arabidopsis
  misc_feature (1)..(623): Homolog of NCBI NO: 18025342 NR Description: beta-D-xylosidase [Hordeum vulgare]
  misc_feature (1)..(625): Homolog of NCBI NO: 18378991 NR Description: glycosyl hydrolase family 3 [Arabidopsis
  misc_feature (1)..(625): Homolog of NCBI NO: 25518461 NR Description: hypothetical protein T14P4.8 - Arabidopsis
  misc_feature (1)..(623): Homolog of NCBI NO: 18025342 NR Description: beta-D-xylosidase [Hordeum vulgare]
  misc_feature (26)..(624): Homolog of NCBI NO: 15238197 NR Description: glycosyl hydrolase family 3 [Arabidopsis
  misc_feature (1)..(51): Homolog of NCBI NO: 15238197 NR Description: glycosyl hydrolase family 3 [Arabidopsis
  misc_feature (1)..(626): Homolog of NCBI NO: 18025340 NR Description: alpha-L-arabinofuranosidase/beta-D-xylosidase
  misc_feature (1)..(625): Homolog of NCBI NO: 15239867 NR Description: glycosyl hydrolase family 3 [Arabidopsis
  misc_feature (1)..(626): Homolog of NCBI NO: 32481073 NR Description: auxin-induced beta-glucosidase [Chenopodium
  misc_feature (1)..(626): Homolog of NCBI NO: 15230897 NR Description: glycosyl hydrolase family 3 [Arabidopsis thaliana]
  misc_feature (1)..(626): Homolog of NCBI NO: 25453520 NR Description: beta-1,4-xylosidase [imported] - Arabidopsis
  misc_feature (1)..(626): Homolog of NCBI NO: 18025340 NR Description: alpha-L-arabinofuranosidase/beta-D-xylosidase
  misc_feature (1)..(625): Homolog of NCBI NO: 15239867 NR Description: glycosyl hydrolase family 3 [Arabidopsis
  misc_feature (1)..(626): Homolog of NCBI NO: 32481073 NR Description: auxin-induced beta-glucosidase [Chenopodium
  misc_feature (1)..(626): Homolog of NCBI NO: 15230897 NR Description: glycosyl hydrolase family 3 [Arabidopsis thaliana]
  misc_feature (1)..(626): Homolog of NCBI NO: 25453520 NR Description: beta-1,4-xylosidase [imported] - Arabidopsis
  misc_feature (1)..(625): Homolog of NCBI NO: 18378991 NR Description: glycosyl hydrolase family 3 [Arabidopsis
  misc_feature (1)..(625): Homolog of NCBI NO: 25518461 NR Description: hypothetical protein T14P4.8 - Arabidopsis
  misc_feature (26)..(624): Homolog of NCBI NO: 15238197 NR Description: glycosyl hydrolase family 3 [Arabidopsis
  misc_feature (1)..(626): Homolog of NCBI NO: 25453520 NR Description: beta-1,4-xylosidase [imported] - Arabidopsis
  misc_feature (1)..(626): Homolog of NCBI NO: 15230897 NR Description: glycosyl hydrolase family 3 [Arabidopsis thaliana]
  misc_feature (1)..(626): Homolog of NCBI NO: 32481073 NR Description: auxin-induced beta-glucosidase [Chenopodium
  misc_feature (1)..(625): Homolog of NCBI NO: 15239867 NR Description: glycosyl hydrolase family 3 [Arabidopsis
  misc_feature (1)..(626): Homolog of NCBI NO: 18025340 NR Description: alpha-L-arabinofuranosidase/beta-D-xylosidase

SEQ ID NO: 49363 - DNA, 1279 bp, Arabidopsis thaliana
  misc_feature (1)..(1279): Ceres Seq. ID no. 13648459
  misc_feature: MA Experiment ID: 20000307 Result: Up-regulated in Transcription
  misc_feature: MA Experiment 20000307 PARAMETER Experiment Name: At_Germinating_Seeds_Sub_P Parameter: Age (hr) Value: 24 vs. 0
  misc_feature: MA Experiment 20000307 PARAMETER Experiment Name: At_Germinating_Seeds_Sub_P Parameter: Organism Value: A. thaliana
  misc_feature: MA Experiment 20000307 PARAMETER Experiment Name: At_Germinating_Seeds_Sub_P Parameter: Plant Line Value: WS
  misc_feature: MA Experiment 20000307 PARAMETER Experiment Name: At_Germinating_Seeds_Sub_P Parameter: Tissue Value: Germinating Seeds
ccccccactccccgtcctacaggtcgactcagtctccggctagttcgactcggtaaaatcacgattactttctccttccatttatcacgatcgtggatccagaaactctgaaagatggcgtctgagctgacaaaccggcgacacgagatagagcaaccagaagcggaatcttattatccaaagccgataaagccatggttcgtagcgattcgtccgatccgttacatgctcagagaacagagactcgtcttcgtcctcgtcggcattgtcatcgccacattaggattcacaatcttctccaaatcatccaaccaccaaccaattccttacgacgtggatccgctttccggatacggaatgcgatcggagtcatcgtatctgccagcgacgattcataagaagccaagcatcgagtacatgagccggatcggatcggcaggcggcaaaatccctctaagcttgaaacggaaagtgctaagggttgttgtgacaggtggagcagggttcgtcgggtcacacctggtggaccggttgatggctcgaggagacaacgtgatcgtggtcgacaatttcttcacgggaaggaaagagaacgtgatgcaccatttcaataaccctaatttcgagatgatccgtcacgatgtagtggagccgatccttctagaggttgatcagatctaccatttggcatgccctgcttctcctgttcactacaaattcaatcccgtcaagactatcaagacgaatgtggtgggaacattgaacatgttgggactagcgaagagagtgggagcaagattcttgctgacgagtacgagtgaggtctatggagatcctcttcaacatcctcaggttgagacttactggggcaacgttaatcccatcggtgttcggagttgttacgacgaaggcaaacgtacggctgagactttgaccatggactatcacagaggcgctaatgttgaggttaggattgctaggatattcaacacttatggcccaaggatgtgtatcgatgacggtcgtgtggttagcaacttcgttgcccaggcattaagaaaagagcctttgactgtttatggtgatggtaagcagactaggagtttccagtttgtctctgatctggtggaaggtctgatgaggttgatggagggagaacatgtcggtccatttaaccttggtaaccccggtgaattcaccatgctcgagctcgctaaggtggttcaagagacaattgacccgaacgcaaagatagagttagctcgagggggggcccggt

SEQ ID NO: 49364 - protein, 388 aa, Arabidopsis thaliana
  peptide (1)..(388): Ceres Seq. ID no. 13648460
  misc_feature (123)..(381): Pfam Name: NAD dependent epimerase/dehydratase family Pfam Description: NAD dependent epimerase/dehydratase family
  misc_feature (121)..(381): Homolog of NCBI NO: 22298207 NR Description: dTDP-glucose 4,6-dehydratase [Thermosynechococcus
  misc_feature (121)..(382): Homolog of NCBI NO: 13591616 NR Description: UDP-D-glucuronate carboxy-lyase [Pisum sativum]
  misc_feature (1)..(338): Homolog of NCBI NO: 30693844 NR Description: NAD-dependent epimerase/dehydratase family
  misc_feature (1)..(381): Homolog of NCBI NO: 30693847 NR Description: NAD-dependent epimerase/dehydratase family
  misc_feature (84)..(381): Homolog of NCBI NO: 25396402 NR Description: UDP-glucuronic acid decarboxylase
  misc_feature (1)..(381): Homolog of NCBI NO: 11270116 NR Description: dTDP-glucose 4-6-dehydratase-like protein -
  misc_feature (1)..(381): Homolog of NCBI NO: 17473549 NR Description: dTDP-glucose 4-6-dehydratase-like protein
  misc_feature (1)..(381): Homolog of NCBI NO: 2129578 NR Description: dTDP-glucose 4-6-dehydratase homolog D18 -
  misc_feature (1)..(381): Homolog of NCBI NO: 15229334 NR Description: NAD-dependent epimerase/dehydratase family
  misc_feature (1)..(381): Homolog of NCBI NO: 15227109 NR Description: NAD-dependent epimerase/dehydratase family
MASELTNRRHEIEQPEAESYYPKPIKPWFVAIRPIRYMLREQRLVFVLVGIVIATLGFTIFSKSSNHQPIPYDVDPLSGYGMRSESSYLPATIHKKPSIEYMSRIGSAGGKIPLSLKRKVLRVVVTGGAGFVGSHLVDRLMARGDNVIVVDNFFTGRKENVMHHFNNPNFEMIRHDVVEPILLEVDQIYHLACPASPVHYKFNPVKTIKTNVVGTLNMLGLAKRVGARFLLTSTSEVYGDPLQHPQVETYWGNVNPIGVRSCYDEGKRTAETLTMDYHRGANVEVRIARIFNTYGPRMCIDDGRVVSNFVAQALRKEPLTVYGDGKQTRSFQFVSDLVEGLMRLMEGEHVGPFNLGNPGEFTMLELAKVVQETIDPNAKIELARGGAR

SEQ ID NO: 49365 - protein, 351 aa, Arabidopsis thaliana
  peptide (1)..(351): Ceres Seq. ID no. 13648461
  misc_feature (86)..(344): Pfam Name: NAD dependent epimerase/dehydratase family Pfam Description: NAD dependent epimerase/dehydratase family
  misc_feature (84)..(344): Homolog of NCBI NO: 22298207 NR Description: dTDP-glucose 4,6-dehydratase [Thermosynechococcus
  misc_feature (84)..(345): Homolog of NCBI NO: 13591616 NR Description: UDP-D-glucuronate carboxy-lyase [Pisum sativum]
  misc_feature (1)..(301): Homolog of NCBI NO: 30693844 NR Description: NAD-dependent epimerase/dehydratase family
  misc_feature (1)..(344): Homolog of NCBI NO: 30693847 NR Description: NAD-dependent epimerase/dehydratase family
  misc_feature (47)..(344): Homolog of NCBI NO: 25396402 NR Description: UDP-glucuronic acid decarboxylase
  misc_feature (1)..(344): Homolog of NCBI NO: 11270116 NR Description: dTDP-glucose 4-6-dehydratase-like protein -
  misc_feature (1)..(344): Homolog of NCBI NO: 17473549 NR Description: dTDP-glucose 4-6-dehydratase-like protein
  misc_feature (1)..(344): Homolog of NCBI NO: 2129578 NR Description: dTDP-glucose 4-6-dehydratase homolog D18 -
  misc_feature (1)..(344): Homolog of NCBI NO: 15229334 NR Description: NAD-dependent epimerase/dehydratase family
  misc_feature (1)..(344): Homolog of NCBI NO: 15227109 NR Description: NAD-dependent epimerase/dehydratase family
MLREQRLVFVLVGIVIATLGFTIFSKSSNHQPIPYDVDPLSGYGMRSESSYLPATIHKKPSIEYMSRIGSAGGKIPLSLKRKVLRVVVTGGAGFVGSHLVDRLMARGDNVIVVDNFFTGRKENVMHHFNNPNFEMIRHDVVEPILLEVDQIYHLACPASPVHYKFNPVKTIKTNVVGTLNMLGLAKRVGARFLLTSTSEVYGDPLQHPQVETYWGNVNPIGVRSCYDEGKRTAETLTMDYHRGANVEVRIARIFNTYGPRMCIDDGRVVSNFVAQALRKEPLTVYGDGKQTRSFQFVSDLVEGLMRLMEGEHVGPFNLGNPGEFTMLELAKVVQETIDPNAKIELARGGAR

SEQ ID NO: 49366 - protein, 307 aa, Arabidopsis thaliana
  peptide (1)..(307): Ceres Seq. ID no. 13648462
  misc_feature (42)..(300): Pfam Name: NAD dependent epimerase/dehydratase family Pfam Description: NAD dependent epimerase/dehydratase family
  misc_feature (40)..(300): Homolog of NCBI NO: 22298207 NR Description: dTDP-glucose 4,6-dehydratase [Thermosynechococcus
  misc_feature (40)..(301): Homolog of NCBI NO: 13591616 NR Description: UDP-D-glucuronate carboxy-lyase [Pisum sativum]
  misc_feature (1)..(257): Homolog of NCBI NO: 30693844 NR Description: NAD-dependent epimerase/dehydratase family
  misc_feature (1)..(300): Homolog of NCBI NO: 30693847 NR Description: NAD-dependent epimerase/dehydratase family
  misc_feature (3)..(300): Homolog of NCBI NO: 25396402 NR Description: UDP-glucuronic acid decarboxylase
  misc_feature (1)..(300): Homolog of NCBI NO: 11270116 NR Description: dTDP-glucose 4-6-dehydratase-like protein -
  misc_feature (1)..(300): Homolog of NCBI NO: 17473549 NR Description: dTDP-glucose 4-6-dehydratase-like protein
  misc_feature (1)..(300): Homolog of NCBI NO: 2129578 NR Description: dTDP-glucose 4-6-dehydratase homolog D18 -
  misc_feature (1)..(300): Homolog of NCBI NO: 15229334 NR Description: NAD-dependent epimerase/dehydratase family
  misc_feature (1)..(300): Homolog of NCBI NO: 15227109 NR Description: NAD-dependent epimerase/dehydratase family
MRSESSYLPATIHKKPSIEYMSRIGSAGGKIPLSLKRKVLRVVVTGGAGFVGSHLVDRLMARGDNVIVVDNFFTGRKENVMHHFNNPNFEMIRHDVVEPILLEVDQIYHLACPASPVHYKFNPVKTIKTNVVGTLNMLGLAKRVGARFLLTSTSEVYGDPLQHPQVETYWGNVNPIGVRSCYDEGKRTAETLTMDYHRGANVEVRIARIFNTYGPRMCIDDGRVVSNFVAQALRKEPLTVYGDGKQTRSFQFVSDLVEGLMRLMEGEHVGPFNLGNPGEFTMLELAKVVQETIDPNAKIELARGGAR

SEQ ID NO: 49367 - DNA, 1656 bp, Arabidopsis thaliana
  misc_feature (1)..(1656): Ceres Seq. ID no. 13648463
  misc_feature: MA Experiment ID: 20000184 Result: Down-regulated in Transcription
  misc_feature: MA Experiment 20000184 PARAMETER Experiment Name: At_Shoots__P Parameter: Age (day) Value: 7
  misc_feature: MA Experiment 20000184 PARAMETER Experiment Name: At_Shoots__P Parameter: Tissue Value: Shoots vs. Whole Plant
  misc_feature: MA Experiment ID: 20001451 Result: Down-regulated in Transcription
  misc_feature: MA Experiment 20001451 PARAMETER Experiment Name: At_Far-red-induction_P Parameter: Age (day) Value: 7
  misc_feature: MA Experiment 20001451 PARAMETER Experiment Name: At_Far-red-induction_P Parameter: Light Value: Far-red vs. White
  misc_feature: MA Experiment 20001451 PARAMETER Experiment Name: At_Far-red-induction_P Parameter: Organism Value: A. thaliana
  misc_feature: MA Experiment 20001451 PARAMETER Experiment Name: At_Far-red-induction_P Parameter: Plant Line Value: Columbia
  misc_feature: MA Experiment 20001451 PARAMETER Experiment Name: At_Far-red-induction_P Parameter: Timepoint (hr) Value: 24
  misc_feature: MA Experiment 20001451 PARAMETER Experiment Name: At_Far-red-induction_P Parameter: Tissue Value: Whole Plant
atctttccgtttctcgcttctttttctccgccggcgtccttccatttcgccggctgctatcgaaccctaacccgcgacgactccaccgtctccggcgtcttcttcttccggcgaaaccggtaaccgtatcttttgtttctatagaattagcttcatgatggcggatactgaaatgcaagagcaagatgtgccgtctggtaccaaaggtgttgtagaggagccttcagaactagagaaagacctaaactctattgaaagacctaagtcccctgttccagaggatacgactcatactttggatagtgatgttcatttatctgatgctcccattgctaatcaaattgaggctaatgaagaggttggtggacagaacagtgttgatgggaggaatggtgatgttgatcagtctgaaaagaagattactagtgatggcggtcaagaggagacaacacttggggaatcaaatcctttgaagggggatccgtcgagtcctcatgttcctgaagaaagtgttaagaagtggaagacatggttgttgagtgatgctgaggccagggaagttgatgaagcaggggcaccacaggatcaagaggcgtttattaaagaagtggaggccttcaacaaggagaatttcctggaatttaaagccccaaagttttacggacagcccttaaattgtctcaagctttggagagccgttatcaagttaggtggctacgatgtggtcaccacatctaagctatggcggcaagttggagaatcgttccatcctccaaaaacatgcactacagtctcctggacattccgcattttctatgaaaaggcacttttggagtatgagaagcatttaaggcaaaatggtgagcttaaccttcctggttcagcttctcttccgtcttcaggcattgaaaaggaggcaagtagccatcaagcttcagggtcaggcagaacaagaagagatgctgcagctcgtgctatgcaaggttggcattctcagcgccttcttggatctggggaggttactgagcctattgttaaggagaaaggcttgaattcaaccccaaagcaaaagaacctcaaaaacattggtgtgcagaaacaaaaaacaacaaccggcatggaccttgttttttcacacgaatcagaaaaacagtcaactgccgaggttatagatgttggaccccctgcagactgggtgaagatcaatgtcagagaaactaaagactgctttgagatatttgccctggtacctggacttcttcgcgaagaggtccgtgttcagtcagaccctgcagggcggctagttatagcaggccaacctgagcaacttgacaatccttggggaatcacacccttcaaaaaggttgtgaactttcccgcaagaatcgatccgctgcacacgtcagcggttgtgagcctgcatggtcgactgtttgtgcgagtcccatttgagcagtgaccggtctcatcccaagtgagctagttctttatttgtctctttgttttcttttaggaattcgtttgtatcagaactaaaaacaaacgatagcaaatgtgatagtttgactgtgacttgagttctgaatattaaagtagagaaatgaatattgatgttccataaaaaaaaaaaaaaaaactcgagggggggcccggtac

SEQ ID NO: 49368 - protein, 434 aa, Arabidopsis thaliana
  peptide (1)..(434): Ceres Seq. ID no. 13648464
  misc_feature (139)..(249): Pfam Name: ARID/BRIGHT DNA binding domain Pfam Description: ARID/BRIGHT DNA binding domain
  misc_feature (327)..(434): Homolog of NCBI NO: 28393488 NR Description: unknown protein [Arabidopsis thaliana]
  misc_feature (216)..(434): Homolog of NCBI NO: 25411792 NR Description: hypothetical protein At2g17410 [imported] -
  misc_feature (17)..(434): Homolog of NCBI NO: 30679972 NR Description: expressed protein [Arabidopsis thaliana]
  misc_feature (112)..(177): Homolog of NCBI NO: 25518704 NR Description: hypothetical protein F9H16.11 - Arabidopsis
  misc_feature (356)..(434): Homolog of NCBI NO: 25518704 NR Description: hypothetical protein F9H16.11 - Arabidopsis
  misc_feature (224)..(359): Homolog of NCBI NO: 25518704 NR Description: hypothetical protein F9H16.11 - Arabidopsis
  misc_feature (112)..(434): Homolog of NCBI NO: 30687082 NR Description: expressed protein [Arabidopsis thaliana]
  misc_feature (334)..(434): Homolog of NCBI NO: 25406449 NR Description: probable DNA-binding protein, 48797-45229
  misc_feature (2)..(312): Homolog of NCBI NO: 25406449 NR Description: probable DNA-binding protein, 48797-45229
  misc_feature (1)..(434): Homolog of NCBI NO: 30699177 NR Description: DNA-binding protein -related [Arabidopsis
MMADTEMQEQDVPSGTKGVVEEPSELEKDLNSIERPKSPVPEDTTHTLDSDVHLSDAPIANQIEANEEVGGQNSVDGRNGDVDQSEKKITSDGGQEETTLGESNPLKGDPSSPHVPEESVKKWKTWLLSDAEAREVDEAGAPQDQEAFIKEVEAFNKENFLEFKAPKFYGQPLNCLKLWRAVIKLGGYDVVTTSKLWRQVGESFHPPKTCTTVSWTFRIFYEKALLEYEKHLRQNGELNLPGSASLPSSGIEKEASSHQASGSGRTRRDAAARAMQGWHSQRLLGSGEVTEPIVKEKGLNSTPKQKNLKNIGVQKQKTTTGMDLVFSHESEKQSTAEVIDVGPPADWVKINVRETKDCFEIFALVPGLLREEVRVQSDPAGRLVIAGQPEQLDNPWGITPFKKVVNFPARIDPLHTSAVVSLHGRLFVRVPFEQ

SEQ ID NO: 49369 - protein, 433 aa, Arabidopsis thaliana
  peptide (1)..(433): Ceres Seq. ID no. 13648465
  misc_feature (138)..(248): Pfam Name: ARID/BRIGHT DNA binding domain Pfam Description: ARID/BRIGHT DNA binding domain
  misc_feature (326)..(433): Homolog of NCBI NO: 28393488 NR Description: unknown protein [Arabidopsis thaliana]
  misc_feature (215)..(433): Homolog of NCBI NO: 25411792 NR Description: hypothetical protein At2g17410 [imported] -
  misc_feature (16)..(433): Homolog of NCBI NO: 30679972 NR Description: expressed protein [Arabidopsis thaliana]
  misc_feature (111)..(176): Homolog of NCBI NO: 25518704 NR Description: hypothetical protein F9H16.11 - Arabidopsis
  misc_feature (355)..(433): Homolog of NCBI NO: 25518704 NR Description: hypothetical protein F9H16.11 - Arabidopsis
  misc_feature (223)..(358): Homolog of NCBI NO: 25518704 NR Description: hypothetical protein F9H16.11 - Arabidopsis
  misc_feature (111)..(433): Homolog of NCBI NO: 30687082 NR Description: expressed protein [Arabidopsis thaliana]
  misc_feature (333)..(433): Homolog of NCBI NO: 25406449 NR Description: probable DNA-binding protein, 48797-45229
  misc_feature (1)..(311): Homolog of NCBI NO: 25406449 NR Description: probable DNA-binding protein, 48797-45229
  misc_feature (1)..(433): Homolog of NCBI NO: 30699177 NR Description: DNA-binding protein -related [Arabidopsis
MADTEMQEQDVPSGTKGVVEEPSELEKDLNSIERPKSPVPEDTTHTLDSDVHLSDAPIANQIEANEEVGGQNSVDGRNGDVDQSEKKITSDGGQEETTLGESNPLKGDPSSPHVPEESVKKWKTWLLSDAEAREVDEAGAPQDQEAFIKEVEAFNKENFLEFKAPKFYGQPLNCLKLWRAVIKLGGYDVVTTSKLWRQVGESFHPPKTCTTVSWTFRIFYEKALLEYEKHLRQNGELNLPGSASLPSSGIEKEASSHQASGSGRTRRDAAARAMQGWHSQRLLGSGEVTEPIVKEKGLNSTPKQKNLKNIGVQKQKTTTGMDLVFSHESEKQSTAEVIDVGPPADWVKINVRETKDCFEIFALVPGLLREEVRVQSDPAGRLVIAGQPEQLDNPWGITPFKKVVNFPARIDPLHTSAVVSLHGRLFVRVPFEQ

SEQ ID NO: 49370 - protein, 428 aa, Arabidopsis thaliana
  peptide (1)..(428): Ceres Seq. ID no. 13648466
  misc_feature (133)..(243): Pfam Name: ARID/BRIGHT DNA binding domain Pfam Description: ARID/BRIGHT DNA binding domain
  misc_feature (321)..(428): Homolog of NCBI NO: 28393488 NR Description: unknown protein [Arabidopsis thaliana]
  misc_feature (210)..(428): Homolog of NCBI NO: 25411792 NR Description: hypothetical protein At2g17410 [imported] -
  misc_feature (11)..(428): Homolog of NCBI NO: 30679972 NR Description: expressed protein [Arabidopsis thaliana]
  misc_feature (106)..(171): Homolog of NCBI NO: 25518704 NR Description: hypothetical protein F9H16.11 - Arabidopsis
  misc_feature (350)..(428): Homolog of NCBI NO: 25518704 NR Description: hypothetical protein F9H16.11 - Arabidopsis
  misc_feature (218)..(353): Homolog of NCBI NO: 25518704 NR Description: hypothetical protein F9H16.11 - Arabidopsis
  misc_feature (106)..(428): Homolog of NCBI NO: 30687082 NR Description: expressed protein [Arabidopsis thaliana]
  misc_feature (328)..(428): Homolog of NCBI NO: 25406449 NR Description: probable DNA-binding protein, 48797-45229
  misc_feature (1)..(306): Homolog of NCBI NO: 25406449 NR Description: probable DNA-binding protein, 48797-45229
  misc_feature (1)..(428): Homolog of NCBI NO: 30699177 NR Description: DNA-binding protein -related [Arabidopsis
MQEQDVPSGTKGVVEEPSELEKDLNSIERPKSPVPEDTTHTLDSDVHLSDAPIANQIEANEEVGGQNSVDGRNGDVDQSEKKITSDGGQEETTLGESNPLKGDPSSPHVPEESVKKWKTWLLSDAEAREVDEAGAPQDQEAFIKEVEAFNKENFLEFKAPKFYGQPLNCLKLWRAVIKLGGYDVVTTSKLWRQVGESFHPPKTCTTVSWTFRIFYEKALLEYEKHLRQNGELNLPGSASLPSSGIEKEASSHQASGSGRTRRDAAARAMQGWHSQRLLGSGEVTEPIVKEKGLNSTPKQKNLKNIGVQKQKTTTGMDLVFSHESEKQSTAEVIDVGPPADWVKINVRETKDCFEIFALVPGLLREEVRVQSDPAGRLVIAGQPEQLDNPWGITPFKKVVNFPARIDPLHTSAVVSLHGRLFVRVPFEQ

SEQ ID NO: 49371 - DNA, 1229 bp, Arabidopsis thaliana
  misc_feature (1)..(1229): Ceres Seq. ID no. 12601816
  misc_feature: MA Experiment ID: 20000314 Result: Down-regulated in Transcription
  misc_feature: MA Experiment 20000314 PARAMETER Experiment Name: At_14day_Shoots-Roots_Sub_P Parameter: Age (day) Value: 14
  misc_feature: MA Experiment 20000314 PARAMETER Experiment Name: At_14day_Shoots-Roots_Sub_P Parameter: Organism Value: A. thaliana
  misc_feature: MA Experiment 20000314 PARAMETER Experiment Name: At_14day_Shoots-Roots_Sub_P Parameter: Plant Line Value: WS
  misc_feature: MA Experiment 20000314 PARAMETER Experiment Name: At_14day_Shoots-Roots_Sub_P Parameter: Tissue Value: Roots vs. Whole Plant
  misc_feature: MA Experiment ID: 20000315 Result: Down-regulated in Transcription
  misc_feature: MA Experiment 20000315 PARAMETER Experiment Name: At_14day_Shoots-Roots_Sub_P Parameter: Age (day) Value: 14
  misc_feature: MA Experiment 20000315 PARAMETER Experiment Name: At_14day_Shoots-Roots_Sub_P Parameter: Organism Value: A. thaliana
  misc_feature: MA Experiment 20000315 PARAMETER Experiment Name: At_14day_Shoots-Roots_Sub_P Parameter: Plant Line Value: WS
  misc_feature: MA Experiment 20000315 PARAMETER Experiment Name: At_14day_Shoots-Roots_Sub_P Parameter: Tissue Value: Shoots vs. Whole Plant
  misc_feature: MA Experiment ID: 20000352 Result: Down-regulated in Transcription
  misc_feature: MA Experiment 20000352 PARAMETER Experiment Name: At_Drought_Sub_P Parameter: Age (day) Value: 7
  misc_feature: MA Experiment 20000352 PARAMETER Experiment Name: At_Drought_Sub_P Parameter: Organism Value: A. thaliana
  misc_feature: MA Experiment 20000352 PARAMETER Experiment Name: At_Drought_Sub_P Parameter: Plant Line Value: WS
  misc_feature: MA Experiment 20000352 PARAMETER Experiment Name: At_Drought_Sub_P Parameter: Timepoint (hr) Value: 6
  misc_feature: MA Experiment 20000352 PARAMETER Experiment Name: At_Drought_Sub_P Parameter: Tissue Value: Whole Plant
  misc_feature: MA Experiment 20000352 PARAMETER Experiment Name: At_Drought_Sub_P Parameter: Treatment Value: Drought vs. No Drought
  misc_feature: MA Experiment ID: 20001807 Result: Down-regulated in Transcription
  misc_feature: MA Experiment 20001807 PARAMETER Experiment Name: At_50mM_NH4NO3_L-to-H_Sub_P Parameter: Timepoint (hr) Value: 6
  misc_feature: MA Experiment 20001807 PARAMETER Experiment Name: At_50mM_NH4NO3_L-to-H_Sub_P Parameter: Tissue Value: Leaf
  misc_feature: MA Experiment 20001807 PARAMETER Experiment Name: At_50mM_NH4NO3_L-to-H_Sub_P Parameter: Treatment Value: 50mM NH4NO3 vs 100mM Mannitol
aattcgtcaataaggacttagcttttctccaaatattaaggaggggaattgtctcataatccttatccaccactattaataccgtaactcctaattaaactcgtaaagtcttcatcgcagaagtatatataatcaaaaagcaaatcgagttattttctctctcaattcatcccaaaccgtcgtaaccattctctttcgtttcgtttcgtttcttctcttttaaaaacctttcttcgaaaagatgacgatctctgttgagaagccgatttttgaagaagaggtttctgcattcgagaagagtggggacaatatcggagagttgaaattggacggaggattttcgatgccgaaaatggacaccaatgacgacgaagcttttttggctcctgagatgaatgcatttggccgccaattcagggactacgatgttgagagtgagaggcaaaagggcgtcgaagagttttacagattacaacacatcaaccaaactgtcgactttgtgaaaaagatgagggctgaatatggaaaattagataaaatggtgatgagcatttgggaatgttgtgagcttctcaatgaggttgtggatgagagtgatccagatcttgacgagccccagattcagcatttgcttcaatctgccgaagccatccgcaaagattaccctaatgaagattggcttcatctgaccgctcttatccatgatcttgggaaagttattactcttccacaattcggaggacttcctcaatgggctgttgttggtgacacattccctgttggatgtgcatttgatgaatctaacgtacatcacaagtactttgtggaaaacccagattttcacaacgaaacctacaacactaaaaatgggatttactctgaagggtgtggattaaacaatgtcatgatgtcttggggccatgacgactacatgtacctggtggctaaagaaaacggaagtaccttgccgtcggctggacagtttatcataagataccattccttttaccctttgcacacggctggagaatacacccatcttatgaacgaggaagacaaggagaatctgaagtggctacacgttttcaacaagtacgacttgtacagtaagagcaaagttcacgttgatgtggagaaggtcaagccttactacatgtctcttatcaagaaatatttcccggaaaacttgaggtggtgaattcggtggagtaaaaaagtgcccatggagg

SEQ ID NO: 49372 - protein, 318 aa, Arabidopsis thaliana
  peptide (1)..(318): Ceres Seq. ID no. 12601817
  misc_feature (62)..(318): Pfam Name: Family of unknown function (DUF706) Pfam Description: Family of unknown function (DUF706)
  misc_feature (62)..(318): Pfam Name: Family of unknown function (DUF706) Pfam Description: Family of unknown function (DUF706)
  misc_feature (77)..(318): Homolog of NCBI NO: 13877657 NR Description: Unknown protein [Arabidopsis thaliana]
  misc_feature (18)..(310): Homolog of NCBI NO: 7262695 NR Description: Strong similarity to an unknown protein from
  misc_feature (20)..(318): Homolog of NCBI NO: 26451656 NR Description: unknown protein [Arabidopsis thaliana]
  misc_feature (20)..(318): Homolog of NCBI NO: 30683840 NR Description: expressed protein [Arabidopsis thaliana]
  misc_feature (1)..(318): Homolog of NCBI NO: 21554393 NR Description: unknown [Arabidopsis thaliana]
  misc_feature (77)..(318): Homolog of NCBI NO: 13877657 NR Description: Unknown protein [Arabidopsis thaliana]
  misc_feature (20)..(318): Homolog of NCBI NO: 26451656 NR Description: unknown protein [Arabidopsis thaliana]
  misc_feature (1)..(318): Homolog of NCBI NO: 21554393 NR Description: unknown [Arabidopsis thaliana]
  misc_feature (1)..(318): Homolog of NCBI NO: 7487428 NR Description: hypothetical protein T25K17.70 - Arabidopsis
  misc_feature (1)..(318): Homolog of NCBI NO: 30687167 NR Description: expressed protein [Arabidopsis thaliana]
  misc_feature (1)..(318): Homolog of NCBI NO: 21536858 NR Description: unknown [Arabidopsis thaliana]
  misc_feature (1)..(318): Homolog of NCBI NO: 15241891 NR Description: putative protein
  misc_feature (1)..(318): Homolog of NCBI NO: 18399158 NR Description: expressed protein
  misc_feature (20)..(318): Homolog of NCBI NO: 30683840 NR Description: expressed protein [Arabidopsis thaliana]
  misc_feature (18)..(310): Homolog of NCBI NO: 7262695 NR Description: Strong similarity to an unknown protein from
  misc_feature (1)..(318): Homolog of NCBI NO: 18399158 NR Description: expressed protein
  misc_feature (1)..(318): Homolog of NCBI NO: 15241891 NR Description: putative protein
  misc_feature (1)..(318): Homolog of NCBI NO: 21536858 NR Description: unknown [Arabidopsis thaliana]
  misc_feature (1)..(318): Homolog of NCBI NO: 30687167 NR Description: expressed protein [Arabidopsis thaliana]
  misc_feature (1)..(318): Homolog of NCBI NO: 7487428 NR Description: hypothetical protein T25K17.70 - Arabidopsis
MTISVEKPIFEEEVSAFEKSGDNIGELKLDGGFSMPKMDTNDDEAFLAPEMNAFGRQFRDYDVESERQKGVEEFYRLQHINQTVDFVKKMRAEYGKLDKMVMSIWECCELLNEVVDESDPDLDEPQIQHLLQSAEAIRKDYPNEDWLHLTALIHDLGKVITLPQFGGLPQWAVVGDTFPVGCAFDESNVHHKYFVENPDFHNETYNTKNGIYSEGCGLNNVMMSWGHDDYMYLVAKENGSTLPSAGQFIIRYHSFYPLHTAGEYTHLMNEEDKENLKWLHVFNKYDLYSKSKVHVDVEKVKPYYMSLIKKYFPENLRW

SEQ ID NO: 49373 - protein, 284 aa, Arabidopsis thaliana
  peptide (1)..(284): Ceres Seq. ID no. 12601818
  misc_feature (28)..(284): Pfam Name: Family of unknown function (DUF706) Pfam Description: Family of unknown function (DUF706)
  misc_feature (28)..(284): Pfam Name: Family of unknown function (DUF706) Pfam Description: Family of unknown function (DUF706)
  misc_feature (43)..(284): Homolog of NCBI NO: 13877657 NR Description: Unknown protein [Arabidopsis thaliana]
  misc_feature (1)..(276): Homolog of NCBI NO: 7262695 NR Description: Strong similarity to an unknown protein from
  misc_feature (1)..(284): Homolog of NCBI NO: 26451656 NR Description: unknown protein [Arabidopsis thaliana]
  misc_feature (1)..(284): Homolog of NCBI NO: 30683840 NR Description: expressed protein [Arabidopsis thaliana]
  misc_feature (1)..(284): Homolog of NCBI NO: 21554393 NR Description: unknown [Arabidopsis thaliana]
  misc_feature (43)..(284): Homolog of NCBI NO: 13877657 NR Description: Unknown protein [Arabidopsis thaliana]
  misc_feature (1)..(284): Homolog of NCBI NO: 26451656 NR Description: unknown protein [Arabidopsis thaliana]
  misc_feature (1)..(284): Homolog of NCBI NO: 21554393 NR Description: unknown [Arabidopsis thaliana]
  misc_feature (1)..(284): Homolog of NCBI NO: 7487428 NR Description: hypothetical protein T25K17.70 - Arabidopsis
  misc_feature (1)..(284): Homolog of NCBI NO: 30687167 NR Description: expressed protein [Arabidopsis thaliana]
  misc_feature (1)..(284): Homolog of NCBI NO: 21536858 NR Description: unknown [Arabidopsis thaliana]
  misc_feature (1)..(284): Homolog of NCBI NO: 15241891 NR Description: putative protein
  misc_feature (1)..(284): Homolog of NCBI NO: 18399158 NR Description: expressed protein
  misc_feature (1)..(284): Homolog of NCBI NO: 30683840 NR Description: expressed protein [Arabidopsis thaliana]
  misc_feature (1)..(276): Homolog of NCBI NO: 7262695 NR Description: Strong similarity to an unknown protein from
  misc_feature (1)..(284): Homolog of NCBI NO: 18399158 NR Description: expressed protein
  misc_feature (1)..(284): Homolog of NCBI NO: 15241891 NR Description: putative protein
  misc_feature (1)..(284): Homolog of NCBI NO: 21536858 NR Description: unknown [Arabidopsis thaliana]
  misc_feature (1)..(284): Homolog of NCBI NO: 30687167 NR Description: expressed protein [Arabidopsis thaliana]
  misc_feature (1)..(284): Homolog of NCBI NO: 7487428 NR Description: hypothetical protein T25K17.70 - Arabidopsis
MPKMDTNDDEAFLAPEMNAFGRQFRDYDVESERQKGVEEFYRLQHINQTVDFVKKMRAEYGKLDKMVMSIWECCELLNEVVDESDPDLDEPQIQHLLQSAEAIRKDYPNEDWLHLTALIHDLGKVITLPQFGGLPQWAVVGDTFPVGCAFDESNVHHKYFVENPDFHNETYNTKNGIYSEGCGLNNVMMSWGHDDYMYLVAKENGSTLPSAGQFIIRYHSFYPLHTAGEYTHLMNEEDKENLKWLHVFNKYDLYSKSKVHVDVEKVKPYYMSLIKKYFPENLRW

SEQ ID NO: 49374 - protein, 281 aa, Arabidopsis thaliana
  peptide (1)..(281): Ceres Seq. ID no. 12601819
  misc_feature (25)..(281): Pfam Name: Family of unknown function (DUF706) Pfam Description: Family of unknown function (DUF706)
  misc_feature (25)..(281): Pfam Name: Family of unknown function (DUF706) Pfam Description: Family of unknown function (DUF706)
  misc_feature (40)..(281): Homolog of NCBI NO: 13877657 NR Description: Unknown protein [Arabidopsis thaliana]
  misc_feature (1)..(273): Homolog of NCBI NO: 7262695 NR Description: Strong similarity to an unknown protein from
  misc_feature (1)..(281): Homolog of NCBI NO: 26451656 NR Description: unknown protein [Arabidopsis thaliana]
  misc_feature (1)..(281): Homolog of NCBI NO: 30683840 NR Description: expressed protein [Arabidopsis thaliana]
  misc_feature (1)..(281): Homolog of NCBI NO: 21554393 NR Description: unknown [Arabidopsis thaliana]
  misc_feature (40)..(281): Homolog of NCBI NO: 13877657 NR Description: Unknown protein [Arabidopsis thaliana]
  misc_feature (1)..(281): Homolog of NCBI NO: 26451656 NR Description: unknown protein [Arabidopsis thaliana]
  misc_feature (1)..(281): Homolog of NCBI NO: 21554393 NR Description: unknown [Arabidopsis thaliana]
  misc_feature (1)..(281): Homolog of NCBI NO: 7487428 NR Description: hypothetical protein T25K17.70 - Arabidopsis
  misc_feature (1)..(281): Homolog of NCBI NO: 30687167 NR Description: expressed protein [Arabidopsis thaliana]
  misc_feature (1)..(281): Homolog of NCBI NO: 21536858 NR Description: unknown [Arabidopsis thaliana]
  misc_feature (1)..(281): Homolog of NCBI NO: 15241891 NR Description: putative protein
  misc_feature (1)..(281): Homolog of NCBI NO: 18399158 NR Description: expressed protein
  misc_feature (1)..(281): Homolog of NCBI NO: 30683840 NR Description: expressed protein [Arabidopsis thaliana]
  misc_feature (1)..(273): Homolog of NCBI NO: 7262695 NR Description: Strong similarity to an unknown protein from
  misc_feature (1)..(281): Homolog of NCBI NO: 18399158 NR Description: expressed protein
  misc_feature (1)..(281): Homolog of NCBI NO: 15241891 NR Description: putative protein
  misc_feature (1)..(281): Homolog of NCBI NO: 21536858 NR Description: unknown [Arabidopsis thaliana]
  misc_feature (1)..(281): Homolog of NCBI NO: 30687167 NR Description: expressed protein [Arabidopsis thaliana]
  misc_feature (1)..(281): Homolog of NCBI NO: 7487428 NR Description: hypothetical protein T25K17.70 - Arabidopsis
MDTNDDEAFLAPEMNAFGRQFRDYDVESERQKGVEEFYRLQHINQTVDFVKKMRAEYGKLDKMVMSIWECCELLNEVVDESDPDLDEPQIQHLLQSAEAIRKDYPNEDWLHLTALIHDLGKVITLPQFGGLPQWAVVGDTFPVGCAFDESNVHHKYFVENPDFHNETYNTKNGIYSEGCGLNNVMMSWGHDDYMYLVAKENGSTLPSAGQFIIRYHSFYPLHTAGEYTHLMNEEDKENLKWLHVFNKYDLYSKSKVHVDVEKVKPYYMSLIKKYFPENLRW

SEQ ID NO: 49375 - DNA, 1192 bp, Arabidopsis thaliana
  misc_feature (1)..(1192): Ceres Seq. ID no. 15179684
  misc_feature: MA Experiment ID: 20000307 Result: Up-regulated in Transcription
  misc_feature: MA Experiment 20000307 PARAMETER Experiment Name: At_Germinating_Seeds_Sub_P Parameter: Age (hr) Value: 24 vs. 0
  misc_feature: MA Experiment 20000307 PARAMETER Experiment Name: At_Germinating_Seeds_Sub_P Parameter: Organism Value: A. thaliana
  misc_feature: MA Experiment 20000307 PARAMETER Experiment Name: At_Germinating_Seeds_Sub_P Parameter: Plant Line Value: WS
  misc_feature: MA Experiment 20000307 PARAMETER Experiment Name: At_Germinating_Seeds_Sub_P Parameter: Tissue Value: Germinating Seeds
  misc_feature: MA Experiment ID: 20000315 Result: Up-regulated in Transcription
  misc_feature: MA Experiment 20000315 PARAMETER Experiment Name: At_14day_Shoots-Roots_Sub_P Parameter: Age (day) Value: 14
  misc_feature: MA Experiment 20000315 PARAMETER Experiment Name: At_14day_Shoots-Roots_Sub_P Parameter: Organism Value: A. thaliana
  misc_feature: MA Experiment 20000315 PARAMETER Experiment Name: At_14day_Shoots-Roots_Sub_P Parameter: Plant Line Value: WS
  misc_feature: MA Experiment 20000315 PARAMETER Experiment Name: At_14day_Shoots-Roots_Sub_P Parameter: Tissue Value: Shoots vs. Whole Plant
  misc_feature: MA Experiment ID: 20000355 Result: Up-regulated in Transcription
  misc_feature: MA Experiment 20000355 PARAMETER Experiment Name: At_Siliques_Sub_P Parameter: Age (day) Value: 21
  misc_feature: MA Experiment 20000355 PARAMETER Experiment Name: At_Siliques_Sub_P Parameter: Organism Value: A. thaliana
  misc_feature: MA Experiment 20000355 PARAMETER Experiment Name: At_Siliques_Sub_P Parameter: Plant Line Value: WS
  misc_feature: MA Experiment 20000355 PARAMETER Experiment Name: At_Siliques_Sub_P Parameter: Tissue Value: Less Than 5mm Siliques vs. Whole Plant
ttctttctcctctactagttacatatcttcaacaaagtgaatctcatgaggatattaccgaaaagcggaggaggtgctctttgcctcctctttgtgtttgctctttgttcggtggctcattcccttagccgtgacgtcaaggttgttggcgatgtcgaagtcattggctactcagaaatcagcaaaatcaagatccccaatgcattctcaggacttcgagttacgatagaatgcaaggcggccgattcaaaaggccattttgtaacgaggggaagcggagaagtggacgaaacaggaaagtttcatcttaatattcctcatgacattgtcggtgatgacggaactctaaaagaagcttgctatgctcatcttcaaagtgccttcggcaacccttgtccggcccacgatggccttgaggcctccaagatcgtgtttctatcgaaatccggccaaaaccacgttttgggtctcaaaaaaagtcttaaattctcaccagaagtttgcatctcaaagttcttttggcatatgcctaagttccctttacctcctccgcttaatctcccaccgttaacgtttcctaagatcaagaagccttgtcccccaatttacaaaccaccggtggtgatccctaagaagccgtgtccaccaaagattgcacataaacccatctacaagccgccggttcccatctacaagcctccagtgcctatctacaagccaccagttgttatccccaagaaaccgtgtccaccaaagatacacaagcccatctacaagccacccgtgcctatctacaagcctccagtggtgatcccaaagaagacatttcctccacttcacaagccgatctacaagcacccggttcctatctacaaaccaatcttcaagccgccagtggtggtgattccaaagaaaccatgtccaccacttcccaagtttccacacttcccacctaaatacattccacaccctaagttcggaaaatggcctcctttcccttctcatccttgataaagatgcaaaatcctctgtctttcttaatttaagaaaagtgatcgagtgatgccacaaaagaatgttcctttgttgctttgttgaattctacgtagatgtttcatgtttatgtatcgtaaattccagccaatcatatttgtaattttttaccgttaaataaatctgtaatctcgtttct

SEQ ID NO: 49376 - protein, 321 aa, Arabidopsis thaliana
  peptide (1)..(321): Ceres Seq. ID no. 15179685
  misc_feature (160)..(321): Pfam Name: Extensin-like region Pfam Description: Extensin-like region
  misc_feature (162)..(321): Homolog of NCBI NO: 7620015 NR Description: proline-rich protein 4 [Arabidopsis thaliana]
  misc_feature (162)..(321): Homolog of NCBI NO: 6782442 NR Description: proline-rich protein [Arabidopsis thaliana]
  misc_feature (161)..(321): Homolog of NCBI NO: 15234785 NR Description: proline-rich protein family [Arabidopsis
  misc_feature (14)..(272): Homolog of NCBI NO: 6782440 NR Description: proline-rich protein [Nicotiana glauca]
  misc_feature (12)..(310): Homolog of NCBI NO: 7489265 NR Description: proline-rich protein GPP1 - potato
  misc_feature (1)..(309): Homolog of NCBI NO: 15234785 NR Description: proline-rich protein family [Arabidopsis
  misc_feature (1)..(316): Homolog of NCBI NO: 6782442 NR Description: proline-rich protein [Arabidopsis thaliana]
  misc_feature (1)..(320): Homolog of NCBI NO: 7620015 NR Description: proline-rich protein 4 [Arabidopsis thaliana]
  misc_feature (1)..(321): Homolog of NCBI NO: 7620011 NR Description: proline-rich protein 2 [Arabidopsis thaliana]
  misc_feature (1)..(321): Homolog of NCBI NO: 15226468 NR Description: proline-rich protein family [Arabidopsis
MRILPKSGGGALCLLFVFALCSVAHSLSRDVKVVGDVEVIGYSEISKIKIPNAFSGLRVTIECKAADSKGHFVTRGSGEVDETGKFHLNIPHDIVGDDGTLKEACYAHLQSAFGNPCPAHDGLEASKIVFLSKSGQNHVLGLKKSLKFSPEVCISKFFWHMPKFPLPPPLNLPPLTFPKIKKPCPPIYKPPVVIPKKPCPPKIAHKPIYKPPVPIYKPPVPIYKPPVVIPKKPCPPKIHKPIYKPPVPIYKPPVVIPKKTFPPLHKPIYKHPVPIYKPIFKPPVVVIPKKPCPPLPKFPHFPPKYIPHPKFGKWPPFPSHP

SEQ ID NO: 49377 - protein, 161 aa, Arabidopsis thaliana
  peptide (1)..(161): Ceres Seq. ID no. 15179686
  misc_feature (1)..(161): Pfam Name: Extensin-like region Pfam Description: Extensin-like region
  misc_feature (2)..(161): Homolog of NCBI NO: 7620015 NR Description: proline-rich protein 4 [Arabidopsis thaliana]
  misc_feature (2)..(161): Homolog of NCBI NO: 6782442 NR Description: proline-rich protein [Arabidopsis thaliana]
  misc_feature (1)..(161): Homolog of NCBI NO: 15234785 NR Description: proline-rich protein family [Arabidopsis
  misc_feature (1)..(112): Homolog of NCBI NO: 6782440 NR Description: proline-rich protein [Nicotiana glauca]
  misc_feature (1)..(150): Homolog of NCBI NO: 7489265 NR Description: proline-rich protein GPP1 - potato
  misc_feature (1)..(149): Homolog of NCBI NO: 15234785 NR Description: proline-rich protein family [Arabidopsis
  misc_feature (1)..(156): Homolog of NCBI NO: 6782442 NR Description: proline-rich protein [Arabidopsis thaliana]
  misc_feature (1)..(160): Homolog of NCBI NO: 7620015 NR Description: proline-rich protein 4 [Arabidopsis thaliana]
  misc_feature (1)..(161): Homolog of NCBI NO: 7620011 NR Description: proline-rich protein 2 [Arabidopsis thaliana]
  misc_feature (1)..(161): Homolog of NCBI NO: 15226468 NR Description: proline-rich protein family [Arabidopsis
MPKFPLPPPLNLPPLTFPKIKKPCPPIYKPPVVIPKKPCPPKIAHKPIYKPPVPIYKPPVPIYKPPVVIPKKPCPPKIHKPIYKPPVPIYKPPVVIPKKTFPPLHKPIYKHPVPIYKPIFKPPVVVIPKKPCPPLPKFPHFPPKYIPHPKFGKWPPFPSHP

SEQ ID NO: 49378 - DNA, 1372 bp, Arabidopsis thaliana
  misc_feature (1)..(1372): Ceres Seq. ID no. 13648032
  misc_feature: MA Experiment ID: 20000171 Result: Down-regulated in Transcription
  misc_feature: MA Experiment 20000171 PARAMETER Experiment Name: At_42deg_Heat_P Parameter: Age (day) Value: 14
  misc_feature: MA Experiment 20000171 PARAMETER Experiment Name: At_42deg_Heat_P Parameter: Organism Value: A. thaliana
  misc_feature: MA Experiment 20000171 PARAMETER Experiment Name: At_42deg_Heat_P Parameter: Plant Line Value: WS
  misc_feature: MA Experiment 20000171 PARAMETER Experiment Name: At_42deg_Heat_P Parameter: Temperature (deg C) Value: 42 vs. 22
  misc_feature: MA Experiment 20000171 PARAMETER Experiment Name: At_42deg_Heat_P Parameter: Timepoint (hr) Value: 1
  misc_feature: MA Experiment 20000171 PARAMETER Experiment Name: At_42deg_Heat_P Parameter: Tissue Value: Aerial
  misc_feature: MA Experiment ID: 20000184 Result: Down-regulated in Transcription
  misc_feature: MA Experiment 20000184 PARAMETER Experiment Name: At_Shoots__P Parameter: Age (day) Value: 7
  misc_feature: MA Experiment 20000184 PARAMETER Experiment Name: At_Shoots__P Parameter: Tissue Value: Shoots vs. Whole Plant
  misc_feature: MA Experiment ID: 20000185 Result: Up-regulated in Transcription
  misc_feature: MA Experiment 20000185 PARAMETER Experiment Name: At_Roots__P Parameter: Age (day) Value: 7 vs. 21
  misc_feature: MA Experiment 20000185 PARAMETER Experiment Name: At_Roots__P Parameter: Organism Value: A. thaliana
  misc_feature: MA Experiment 20000185 PARAMETER Experiment Name: At_Roots__P Parameter: Tissue Value: Roots vs. Whole Plant
  misc_feature: MA Experiment ID: 20000227 Result: Up-regulated in Transcription
  misc_feature: MA Experiment 20000227 PARAMETER Experiment Name: At_Root-Tips-vs-Tops_P Parameter: Tissue Value: Root Tips vs. Root Tops
  misc_feature: MA Experiment ID: 20001770 Result: Down-regulated in Transcription
  misc_feature: MA Experiment 20001770 PARAMETER Experiment Name: At_Far-red-enriched-adult_P Parameter: Age (day) Value: 28
  misc_feature: MA Experiment 20001770 PARAMETER Experiment Name: At_Far-red-enriched-adult_P Parameter: Light Value: Far-red enriched vs. White
  misc_feature: MA Experiment 20001770 PARAMETER Experiment Name: At_Far-red-enriched-adult_P Parameter: Organism Value: A. thaliana
  misc_feature: MA Experiment 20001770 PARAMETER Experiment Name: At_Far-red-enriched-adult_P Parameter: Plant Line Value: Columbia
  misc_feature: MA Experiment 20001770 PARAMETER Experiment Name: At_Far-red-enriched-adult_P Parameter: Timepoint (hr) Value: 8
  misc_feature: MA Experiment 20001770 PARAMETER Experiment Name: At_Far-red-enriched-adult_P Parameter: Tissue Value: Aerial
  misc_feature: MA Experiment ID: 20001771 Result: Up-regulated in Transcription
  misc_feature: MA Experiment 20001771 PARAMETER Experiment Name: At_Far-red-enriched-adult_P Parameter: Age (day) Value: 28
  misc_feature: MA Experiment 20001771 PARAMETER Experiment Name: At_Far-red-enriched-adult_P Parameter: Light Value: Far-red enriched vs. White
  misc_feature: MA Experiment 20001771 PARAMETER Experiment Name: At_Far-red-enriched-adult_P Parameter: Organism Value: A. thaliana
  misc_feature: MA Experiment 20001771 PARAMETER Experiment Name: At_Far-red-enriched-adult_P Parameter: Plant Line Value: Columbia
  misc_feature: MA Experiment 20001771 PARAMETER Experiment Name: At_Far-red-enriched-adult_P Parameter: Timepoint (hr) Value: 16
  misc_feature: MA Experiment 20001771 PARAMETER Experiment Name: At_Far-red-enriched-adult_P Parameter: Tissue Value: Aerial
gaagcacactacacagagattctggatgaagaacaaatccacatgaaattcgattctcacatttcttctatttaattcgaatttcaaattgccatttctcagattccggggaaagaaaaaaaaacctagaaaagtgttttctccgttttccaatcatccatgagtccggacaataaactgcttccgaagcggatcatccttgtacggcacggtgaatcggaagggaatctcgacacggcggcgtatacaacgacgccggatcataagatccagttaacggattccggtttgcttcaggcgcaggaagccggagctcgtctccacgctttgatctcttctaatccttcttcaccggagtggcgtgtgtacttctacgtttcgccgtacgatcggactcgatctacgctccgggagatcggacggtcgttctcgcgtcgccgtgtgattggtgttcgcgaagaatgtcggattagggaacaggattttgggaattttcaggttaaagagcgaatgagagcaacgaaaaaggtcagagagagatttggccgctttttttaccggttcccggagggagaatccgccgccgatgtcttcgatcgcgtctccagttttctcgagtctctatggagagacattgacatgaacagactgcacatcaacccgtctcatgagctaaattttgtgattgtctcacatggcttaacatcgcgtgtgtttctgatgaaatggtttaagtggtcagtggaacagttcgagggactaaacaatccagggaacagtgagatcagagtgatggaattaggacaaggcggtgattacagcttggcgattcatcacacagaggaagagttagccacatggggactgtcaccagagatgattgcagatcaaaagtggcgggctaacgcgcataaaggcgaatggaaagaagattgtaagtggtattttggtgatttcttcgaccatatggcagattccgataaagagtgcgagactgaggccactgaagaaagagaagaagaagaagaagaagaagaagaagaggggaaaagggtaaatctgctaacgagttcagaatatagcaatgagccagagttatacaatggacaatgctgctgatactattttacagaacaaaagcatacatgagaagaaacgtttaactaaagaattcagaagatttgattttgataaaaacttgtaccaatttactgattaagctttctggtgtcttagtttgtagcttttggtttgtggaaaagtgttgtacacatcgttataacaccaggaaacattacaggaaatttgaaagattcattttattgtgacaaagcaaaaaaaaaaaaaaaaaaaactcgagggggggcccggt

SEQ ID NO: 49379 - protein, 319 aa, Arabidopsis thaliana
  peptide (1)..(319): Ceres Seq. ID no. 13648033
  misc_feature (10)..(224): Pfam Name: Phosphoglycerate mutase family Pfam Description: Phosphoglycerate mutase family
  misc_feature (98)..(216): Homolog of NCBI NO: 6320256 NR Description: Hypothetical ORF; Ydr051cp [Saccharomyces
  misc_feature (12)..(234): Homolog of NCBI NO: 40741871 NR Description: hypothetical protein AN4983.2 [Aspergillus
  misc_feature (1)..(119): Homolog of NCBI NO: 38454096 NR Description: At1g08940 [Arabidopsis thaliana]
  misc_feature (9)..(244): Homolog of NCBI NO: 32415611 NR Description: hypothetical protein [Neurospora crassa]
  misc_feature (9)..(222): Homolog of NCBI NO: 29829000 NR Description: hypothetical protein [Streptomyces avermitilis
  misc_feature (9)..(222): Homolog of NCBI NO: 21224153 NR Description: conserved hypothetical protein SC4H2.29
  misc_feature (9)..(222): Homolog of NCBI NO: 29469213 NR Description: unknown [Streptomyces murayamaensis]
  misc_feature (9)..(269): Homolog of NCBI NO: 34897810 NR Description: P0514G12.25 [Oryza sativa (japonica
  misc_feature (1)..(276): Homolog of NCBI NO: 15223983 NR Description: expressed protein [Arabidopsis thaliana]
  misc_feature (1)..(319): Homolog of NCBI NO: 15229917 NR Description: expressed protein [Arabidopsis thaliana]
MSPDNKLLPKRIILVRHGESEGNLDTAAYTTTPDHKIQLTDSGLLQAQEAGARLHALISSNPSSPEWRVYFYVSPYDRTRSTLREIGRSFSRRRVIGVREECRIREQDFGNFQVKERMRATKKVRERFGRFFYRFPEGESAADVFDRVSSFLESLWRDIDMNRLHINPSHELNFVIVSHGLTSRVFLMKWFKWSVEQFEGLNNPGNSEIRVMELGQGGDYSLAIHHTEEELATWGLSPEMIADQKWRANAHKGEWKEDCKWYFGDFFDHMADSDKECETEATEEREEEEEEEEEEGKRVNLLTSSEYSNEPELYNGQCC

SEQ ID NO: 49380 - protein, 202 aa, Arabidopsis thaliana
  peptide (1)..(202): Ceres Seq. ID no. 13648034
  misc_feature (1)..(107): Pfam Name: Phosphoglycerate mutase family Pfam Description: Phosphoglycerate mutase family
  misc_feature (71)..(129): Homolog of NCBI NO: 37532206 NR Description: hypothetical protein [Oryza sativa (japonica
  misc_feature (1)..(99): Homolog of NCBI NO: 6320256 NR Description: Hypothetical ORF; Ydr051cp [Saccharomyces
  misc_feature (1)..(117): Homolog of NCBI NO: 40741871 NR Description: hypothetical protein AN4983.2 [Aspergillus
  misc_feature (1)..(127): Homolog of NCBI NO: 32415611 NR Description: hypothetical protein [Neurospora crassa]
  misc_feature (1)..(105): Homolog of NCBI NO: 29829000 NR Description: hypothetical protein [Streptomyces avermitilis
  misc_feature (1)..(105): Homolog of NCBI NO: 21224153 NR Description: conserved hypothetical protein SC4H2.29
  misc_feature (1)..(105): Homolog of NCBI NO: 29469213 NR Description: unknown [Streptomyces murayamaensis]
  misc_feature (1)..(152): Homolog of NCBI NO: 34897810 NR Description: P0514G12.25 [Oryza sativa (japonica
  misc_feature (1)..(159): Homolog of NCBI NO: 15223983 NR Description: expressed protein [Arabidopsis thaliana]
  misc_feature (1)..(202): Homolog of NCBI NO: 15229917 NR Description: expressed protein [Arabidopsis thaliana]
MRATKKVRERFGRFFYRFPEGESAADVFDRVSSFLESLWRDIDMNRLHINPSHELNFVIVSHGLTSRVFLMKWFKWSVEQFEGLNNPGNSEIRVMELGQGGDYSLAIHHTEEELATWGLSPEMIADQKWRANAHKGEWKEDCKWYFGDFFDHMADSDKECETEATEEREEEEEEEEEEGKRVNLLTSSEYSNEPELYNGQCC

SEQ ID NO: 49381 - protein, 159 aa, Arabidopsis thaliana
  peptide (1)..(159): Ceres Seq. ID no. 13648035
  misc_feature (1)..(64): Pfam Name: Phosphoglycerate mutase family Pfam Description: Phosphoglycerate mutase family
  misc_feature (28)..(86): Homolog of NCBI NO: 37532206 NR Description: hypothetical protein [Oryza sativa (japonica
  misc_feature (1)..(56): Homolog of NCBI NO: 6320256 NR Description: Hypothetical ORF; Ydr051cp [Saccharomyces
  misc_feature (1)..(74): Homolog of NCBI NO: 40741871 NR Description: hypothetical protein AN4983.2 [Aspergillus
  misc_feature (1)..(84): Homolog of NCBI NO: 32415611 NR Description: hypothetical protein [Neurospora crassa]
  misc_feature (1)..(62): Homolog of NCBI NO: 29829000 NR Description: hypothetical protein [Streptomyces avermitilis
  misc_feature (1)..(62): Homolog of NCBI NO: 21224153 NR Description: conserved hypothetical protein SC4H2.29
  misc_feature (1)..(62): Homolog of NCBI NO: 29469213 NR Description: unknown [Streptomyces murayamaensis]
  misc_feature (1)..(109): Homolog of NCBI NO: 34897810 NR Description: P0514G12.25 [Oryza sativa (japonica
  misc_feature (1)..(116): Homolog of NCBI NO: 15223983 NR Description: expressed protein [Arabidopsis thaliana]
  misc_feature (1)..(159): Homolog of NCBI NO: 15229917 NR Description: expressed protein [Arabidopsis thaliana]
MNRLHINPSHELNFVIVSHGLTSRVFLMKWFKWSVEQFEGLNNPGNSEIRVMELGQGGDYSLAIHHTEEELATWGLSPEMIADQKWRANAHKGEWKEDCKWYFGDFFDHMADSDKECETEATEEREEEEEEEEEEGKRVNLLTSSEYSNEPELYNGQCC

SEQ ID NO: 49382 - DNA, 1612 bp, Arabidopsis thaliana
  misc_feature (1)..(1612): Ceres Seq. ID no. 12605127
  misc_feature: MA Experiment ID: 108434 Result: Up-regulated in Transcription
  misc_feature: MA Experiment 108434 PARAMETER Experiment Name: At_Root_Tips_cDNA_P Parameter: Tissue Value: Root Tips
  misc_feature: MA Experiment ID: 108462 Result: Down-regulated in Transcription
  misc_feature: MA Experiment 108462 PARAMETER Experiment Name: At_Germinating_Seeds_cDNA_P Parameter: Age (day) Value: 2 vs. 0
  misc_feature: MA Experiment 108462 PARAMETER Experiment Name: At_Germinating_Seeds_cDNA_P Parameter: Tissue Value: Germinating Seeds
  misc_feature: MA Experiment ID: 108463 Result: Down-regulated in Transcription
  misc_feature: MA Experiment 108463 PARAMETER Experiment Name: At_Germinating_Seeds_cDNA_P Parameter: Age (day) Value: 3 vs. 0
  misc_feature: MA Experiment 108463 PARAMETER Experiment Name: At_Germinating_Seeds_cDNA_P Parameter: Tissue Value: Germinating Seeds
  misc_feature: MA Experiment ID: 108464 Result: Down-regulated in Transcription
  misc_feature: MA Experiment 108464 PARAMETER Experiment Name: At_Germinating_Seeds_cDNA_P Parameter: Age (day) Value: 4 vs. 0
  misc_feature: MA Experiment 108464 PARAMETER Experiment Name: At_Germinating_Seeds_cDNA_P Parameter: Tissue Value: Germinating Seeds
  misc_feature: MA Experiment ID: 108573 Result: Down-regulated in Transcription
  misc_feature: MA Experiment 108573 PARAMETER Experiment Name: At_Drought_cDNA_P Parameter: Timepoint (hr) Value: 6
  misc_feature: MA Experiment 108573 PARAMETER Experiment Name: At_Drought_cDNA_P Parameter: Tissue Value: Aerial
  misc_feature: MA Experiment 108573 PARAMETER Experiment Name: At_Drought_cDNA_P Parameter: Treatment Value: Drought vs. No Drought
  misc_feature: MA Experiment ID: 108585 Result: Down-regulated in Transcription
  misc_feature: MA Experiment 108585 PARAMETER Experiment Name: At_5mM_NaNP_cDNA_P Parameter: Timepoint (hr) Value: 6
  misc_feature: MA Experiment 108585 PARAMETER Experiment Name: At_5mM_NaNP_cDNA_P Parameter: Tissue Value: Aerial
  misc_feature: MA Experiment 108585 PARAMETER Experiment Name: At_5mM_NaNP_cDNA_P Parameter: Treatment Value: null
  misc_feature: MA Experiment ID: 108595 Result: Down-regulated in Transcription
  misc_feature: MA Experiment 108595 PARAMETER Experiment Name: At_Ler-pi_Ovule_cDNA_P Parameter: Plant Line Value: null
  misc_feature: MA Experiment ID: 108668 Result: Down-regulated in Transcription
  misc_feature: MA Experiment 108668 PARAMETER Experiment Name: At_2mM_SA_cDNA_P Parameter: Plant Line Value: WS
  misc_feature: MA Experiment 108668 PARAMETER Experiment Name: At_2mM_SA_cDNA_P Parameter: Timepoint (hr) Value: 6
  misc_feature: MA Experiment 108668 PARAMETER Experiment Name: At_2mM_SA_cDNA_P Parameter: Treatment Value: 2mM SA vs. No Treatment
  misc_feature: MA Experiment ID: 20000089 Result: Up-regulated in Transcription
  misc_feature: MA Experiment ID: 20000182 Result: Down-regulated in Transcription
  misc_feature: MA Experiment 20000182 PARAMETER Experiment Name: At_2mM_SA_P Parameter: Age (day) Value: 14
  misc_feature: MA Experiment 20000182 PARAMETER Experiment Name: At_2mM_SA_P Parameter: Organism Value: A. thaliana
  misc_feature: MA Experiment 20000182 PARAMETER Experiment Name: At_2mM_SA_P Parameter: Plant Line Value: WS
  misc_feature: MA Experiment 20000182 PARAMETER Experiment Name: At_2mM_SA_P Parameter: Timepoint (hr) Value: 6
  misc_feature: MA Experiment 20000182 PARAMETER Experiment Name: At_2mM_SA_P Parameter: Tissue Value: Aerial
  misc_feature: MA Experiment 20000182 PARAMETER Experiment Name: At_2mM_SA_P Parameter: Treatment Value: 2mM SA vs. No Treatment
  misc_feature: MA Experiment ID: 20000185 Result: Down-regulated in Transcription
  misc_feature: MA Experiment 20000185 PARAMETER Experiment Name: At_Roots__P Parameter: Age (day) Value: 7 vs. 21
  misc_feature: MA Experiment 20000185 PARAMETER Experiment Name: At_Roots__P Parameter: Organism Value: A. thaliana
  misc_feature: MA Experiment 20000185 PARAMETER Experiment Name: At_Roots__P Parameter: Tissue Value: Roots vs. Whole Plant
  misc_feature: MA Experiment ID: 20000224 Result: Up-regulated in Transcription
  misc_feature: MA Experiment ID: 20000436 Result: Down-regulated in Transcription
  misc_feature: MA Experiment 20000436 PARAMETER Experiment Name: At_Drought_P Parameter: Age (day) Value: 7
  misc_feature: MA Experiment 20000436 PARAMETER Experiment Name: At_Drought_P Parameter: Organism Value: A. thaliana
  misc_feature: MA Experiment 20000436 PARAMETER Experiment Name: At_Drought_P Parameter: Plant Line Value: WS
  misc_feature: MA Experiment 20000436 PARAMETER Experiment Name: At_Drought_P Parameter: Timepoint (hr) Value: 12
  misc_feature: MA Experiment 20000436 PARAMETER Experiment Name: At_Drought_P Parameter: Tissue Value: Whole Plant
  misc_feature: MA Experiment 20000436 PARAMETER Experiment Name: At_Drought_P Parameter: Treatment Value: Drought vs. No Drought
  misc_feature: MA Experiment ID: 20000437 Result: Down-regulated in Transcription
  misc_feature: MA Experiment 20000437 PARAMETER Experiment Name: At_Drought_P Parameter: Age (day) Value: 8
  misc_feature: MA Experiment 20000437 PARAMETER Experiment Name: At_Drought_P Parameter: Organism Value: A. thaliana
  misc_feature: MA Experiment 20000437 PARAMETER Experiment Name: At_Drought_P Parameter: Plant Line Value: WS
  misc_feature: MA Experiment 20000437 PARAMETER Experiment Name: At_Drought_P Parameter: Timepoint (hr) Value: 24
  misc_feature: MA Experiment 20000437 PARAMETER Experiment Name: At_Drought_P Parameter: Tissue Value: Whole Plant
  misc_feature: MA Experiment 20000437 PARAMETER Experiment Name: At_Drought_P Parameter: Treatment Value: Drought vs. No Drought
  misc_feature: MA Experiment ID: 20000439 Result: Down-regulated in Transcription
  misc_feature: MA Experiment 20000439 PARAMETER Experiment Name: At_Roots__P Parameter: Age (day) Value: 14 vs. 21
  misc_feature: MA Experiment 20000439 PARAMETER Experiment Name: At_Roots__P Parameter: Organism Value: A. thaliana
  misc_feature: MA Experiment 20000439 PARAMETER Experiment Name: At_Roots__P Parameter: Tissue Value: Roots vs. Whole Plant
  misc_feature: MA Experiment ID: 20000527 Result: Up-regulated in Transcription
  misc_feature: MA Experiment 20000527 PARAMETER Experiment Name: At_10percent_PEG_P Parameter: Age (day) Value: 20
  misc_feature: MA Experiment 20000527 PARAMETER Experiment Name: At_10percent_PEG_P Parameter: Organism Value: A. thaliana
  misc_feature: MA Experiment 20000527 PARAMETER Experiment Name: At_10percent_PEG_P Parameter: Plant Line Value: WS
  misc_feature: MA Experiment 20000527 PARAMETER Experiment Name: At_10percent_PEG_P Parameter: Timepoint (day) Value: 20
  misc_feature: MA Experiment 20000527 PARAMETER Experiment Name: At_10percent_PEG_P Parameter: Tissue Value: Whole Plant
  misc_feature: MA Experiment 20000527 PARAMETER Experiment Name: At_10percent_PEG_P Parameter: Treatment Value: 10percent PEG vs. No Treatment
  misc_feature: MA Experiment ID: 20001247 Result: Down-regulated in Transcription
  misc_feature: MA Experiment 20001247 PARAMETER Experiment Name: At_Far-red-induction_P Parameter: Age (day) Value: 7
  misc_feature: MA Experiment 20001247 PARAMETER Experiment Name: At_Far-red-induction_P Parameter: Light Value: Far-red vs. White
  misc_feature: MA Experiment 20001247 PARAMETER Experiment Name: At_Far-red-induction_P Parameter: Organism Value: A. thaliana
  misc_feature: MA Experiment 20001247 PARAMETER Experiment Name: At_Far-red-induction_P Parameter: Plant Line Value: Columbia
  misc_feature: MA Experiment 20001247 PARAMETER Experiment Name: At_Far-red-induction_P Parameter: Timepoint (hr) Value: 1
  misc_feature: MA Experiment 20001247 PARAMETER Experiment Name: At_Far-red-induction_P Parameter: Tissue Value: Whole Plant
  misc_feature: MA Experiment ID: 20001458 Result: Up-regulated in Transcription
  misc_feature: MA Experiment 20001458 PARAMETER Experiment Name: At_50mM_NH4NO3_L-to-H_P Parameter: Age (day) Value: Undefined
  misc_feature: MA Experiment 20001458 PARAMETER Experiment Name: At_50mM_NH4NO3_L-to-H_P Parameter: Organism Value: Undefined
  misc_feature: MA Experiment 20001458 PARAMETER Experiment Name: At_50mM_NH4NO3_L-to-H_P Parameter: Plant Line Value: Undefined
  misc_feature: MA Experiment 20001458 PARAMETER Experiment Name: At_50mM_NH4NO3_L-to-H_P Parameter: Timepoint (hr) Value: 2
  misc_feature: MA Experiment 20001458 PARAMETER Experiment Name: At_50mM_NH4NO3_L-to-H_P Parameter: Tissue Value: Siliques
  misc_feature: MA Experiment 20001458 PARAMETER Experiment Name: At_50mM_NH4NO3_L-to-H_P Parameter: Treatment Value: 50mM NH4NO3 vs. 100mM Manitol
  misc_feature: MA Experiment ID: 20001556 Result: Up-regulated in Transcription
  misc_feature: MA Experiment 20001556 PARAMETER Experiment Name: At_Drought_Soil_Dry_P Parameter: Age (day) Value: 26
  misc_feature: MA Experiment 20001556 PARAMETER Experiment Name: At_Drought_Soil_Dry_P Parameter: Organism Value: A. thaliana
  misc_feature: MA Experiment 20001556 PARAMETER Experiment Name: At_Drought_Soil_Dry_P Parameter: Plant Line Value: WS
  misc_feature: MA Experiment 20001556 PARAMETER Experiment Name: At_Drought_Soil_Dry_P Parameter: Post Timepoint (hr) Value: None
  misc_feature: MA Experiment 20001556 PARAMETER Experiment Name: At_Drought_Soil_Dry_P Parameter: Post-Treatment Value: None
  misc_feature: MA Experiment 20001556 PARAMETER Experiment Name: At_Drought_Soil_Dry_P Parameter: Timepoint (day) Value: 12
  misc_feature: MA Experiment 20001556 PARAMETER Experiment Name: At_Drought_Soil_Dry_P Parameter: Treatment Value: Drought vs. No Drought
  misc_feature: MA Experiment ID: 20001558 Result: Up-regulated in Transcription
  misc_feature: MA Experiment 20001558 PARAMETER Experiment Name: At_Drought_Soil_Dry_P Parameter: Age (day) Value: 27
  misc_feature: MA Experiment 20001558 PARAMETER Experiment Name: At_Drought_Soil_Dry_P Parameter: Organism Value: A. thaliana
  misc_feature: MA Experiment 20001558 PARAMETER Experiment Name: At_Drought_Soil_Dry_P Parameter: Plant Line Value: WS
  misc_feature: MA Experiment 20001558 PARAMETER Experiment Name: At_Drought_Soil_Dry_P Parameter: Post Timepoint (hr) Value: 6
  misc_feature: MA Experiment 20001558 PARAMETER Experiment Name: At_Drought_Soil_Dry_P Parameter: Post-Treatment Value: Re-Water vs. No Drought
  misc_feature: MA Experiment 20001558 PARAMETER Experiment Name: At_Drought_Soil_Dry_P Parameter: Timepoint (day) Value: 13
  misc_feature: MA Experiment 20001558 PARAMETER Experiment Name: At_Drought_Soil_Dry_P Parameter: Treatment Value: Drought vs. No Drought
  misc_feature: MA Experiment ID: 20001560 Result: Up-regulated in Transcription
  misc_feature: MA Experiment 20001560 PARAMETER Experiment Name: At_Drought_Soil_Dry_P Parameter: Age (day) Value: 28
  misc_feature: MA Experiment 20001560 PARAMETER Experiment Name: At_Drought_Soil_Dry_P Parameter: Organism Value: A. thaliana
  misc_feature: MA Experiment 20001560 PARAMETER Experiment Name: At_Drought_Soil_Dry_P Parameter: Plant Line Value: WS
  misc_feature: MA Experiment 20001560 PARAMETER Experiment Name: At_Drought_Soil_Dry_P Parameter: Post Timepoint (hr) Value: None
  misc_feature: MA Experiment 20001560 PARAMETER Experiment Name: At_Drought_Soil_Dry_P Parameter: Post-Treatment Value: None
  misc_feature: MA Experiment 20001560 PARAMETER Experiment Name: At_Drought_Soil_Dry_P Parameter: Timepoint (day) Value: 14
  misc_feature: MA Experiment 20001560 PARAMETER Experiment Name: At_Drought_Soil_Dry_P Parameter: Treatment Value: Drought vs. No Drought
  misc_feature: MA Experiment ID: 20001757 Result: Up-regulated in Transcription
  misc_feature: MA Experiment 20001757 PARAMETER Experiment Name: At_50mM_NH4NO3_L-to-H_P Parameter: Timepoint (hr) Value: 6
  misc_feature: MA Experiment 20001757 PARAMETER Experiment Name: At_50mM_NH4NO3_L-to-H_P Parameter: Tissue Value: Leaf
  misc_feature: MA Experiment 20001757 PARAMETER Experiment Name: At_50mM_NH4NO3_L-to-H_P Parameter: Treatment Value: 50mM NH4NO3 vs 100mM Mannitol
ggataaaacagaaacctaatcccttaaacctcgccggcgacggaaaatggctttcgcgtctccttcgctccgtcttcttcctcagtctccgttaggtcgaataacatctaaactacaccgtttcagtactgcgaaactctcactcttctcctttcaccatgattcttcatcttctttggctgtcagaactccggtatcttccttcgtcgtcggcgctatctccggaaaatcctctaccggaacgaaatcgaaatccaaaaccaaacggaaaccacctcctcctccgccagtcactactgtggctgaagagcaacacattgctgagtcagagacagtcaacattgccgaagatgtcactcaattgattggaagcacaccaatggtctatctcaatagagtcacagatggttgtttggctgacattgctgccaagctcgaatcaatggagccctgtagaagcgtcaaagataggatcggtctgagcatgatcaacgaggcagaaaacagcggagctataactccgaggaagactgtattagtagaaccaacaaccggaaacactggccttgggattgcatttgtggctgcagctaaaggctacaagcttatagtgacaatgccagcttctatcaatattgaaaggaggatgcttttacgtgcactaggagcagagattgtgctaacgaatccagagaagggtctcaaaggagcagtggataaagccaaagagattgttctcaagacaaagaacgcatatatgtttcagcaattcgacaatacagcaaatacaaagatccactttgaaactacaggaccagaaatctgggaagatacaatgggtaatgtcgatatattcgttgccggaataggaactggtggtactgtaactggtactggaggtttcttgaaaatgatgaacaaggatattaaggtagttggcgttgaaccatcagaaagaagtgtgatttctggagacaaccctggttacttaccgggaatcttggatgttaaattacttgatgaagtgtttaaggttagcaacggggaagcgattgagatggcgaggagactagctttagaggaaggattgctggttgggatttcatctggagctgctgcagtagcagcagtcagcttggctaaaagagcagagaatgccggtaaactaatcacggttctgtttccaagccatggcgagcggtatatcacaacggctctgtttagttccatcaacagagaagtccaagagatgagatattagtagcagccattagaaaagcccccaaagtttggtccttttggagagtgtaaacaacaaatctctttgcaatacagaaaagagaggtttcagaagactgtgaggttagagctcacacgagaactgagagataaacatgtctcgagcccaaccagttttattcaaagatttgtgaatgtatagaagatcatagaccttgttgcattattcttcttcttctcactcatatgtcagggaagtatgctgaacaaataaaagtttgatcatctaaaccctgaaattgatttgagatctccaagattggaaaaactcaccgagagcaagcatgtatgtacattatatggtggttagaac

SEQ ID NO: 49383 - protein, 404 aa, Arabidopsis thaliana
  peptide (1)..(404): Ceres Seq. ID no. 12605128
  misc_feature (103)..(382): Pfam Name: Pyridoxal-phosphate dependent enzyme Pfam Description: Pyridoxal-phosphate dependent enzyme
  misc_feature (91)..(402): Homolog of NCBI NO: 11131901 NR Description: Cysteine synthase (O-acetylserine sulfhydrylase)
  misc_feature (95)..(403): Homolog of NCBI NO: 421795 NR Description: cysteine synthase (EC 4.2.99.8) B precursor,
  misc_feature (95)..(402): Homolog of NCBI NO: 231970 NR Description: Cysteine synthase (O-acetylserine sulfhydrylase)
  misc_feature (95)..(403): Homolog of NCBI NO: 12644209 NR Description: CYSTEINE SYNTHASE, CHLOROPLAST PRECURSOR SULFHYDRYLASE) (O-ACETYLSERINE (THIOL)-LYASE) (CSASE B) (CS-B)
  misc_feature (95)..(403): Homolog of NCBI NO: 303902 NR Description: cysteine synthase [Spinacia oleracea]
  misc_feature (93)..(403): Homolog of NCBI NO: 12081919 NR Description: plastidic cysteine synthase 1 [Solanum tuberosum]
  misc_feature (93)..(403): Homolog of NCBI NO: 11131628 NR Description: Cysteine synthase, chloroplast precursor sulfhydrylase) (O-acetylserine (Thiol)-lyase) (CSase B) (CS-B)
  misc_feature (93)..(403): Homolog of NCBI NO: 399333 NR Description: Cysteine synthase, chloroplast precursor sulfhydrylase) (O-acetylserine (Thiol)-lyase) (CSase B) (CS-B)
  misc_feature (93)..(403): Homolog of NCBI NO: 12081921 NR Description: plastidic cysteine synthase 2 [Solanum tuberosum]
  misc_feature (1)..(404): Homolog of NCBI NO: 15228596 NR Description: O-acetylserine (thiol) lyase
MAFASPSLRLLPQSPLGRITSKLHRFSTAKLSLFSFHHDSSSSLAVRTPVSSFVVGAISGKSSTGTKSKSKTKRKPPPPPPVTTVAEEQHIAESETVNIAEDVTQLIGSTPMVYLNRVTDGCLADIAAKLESMEPCRSVKDRIGLSMINEAENSGAITPRKTVLVEPTTGNTGLGIAFVAAAKGYKLIVTMPASINIERRMLLRALGAEIVLTNPEKGLKGAVDKAKEIVLKTKNAYMFQQFDNTANTKIHFETTGPEIWEDTMGNVDIFVAGIGTGGTVTGTGGFLKMMNKDIKVVGVEPSERSVISGDNPGYLPGILDVKLLDEVFKVSNGEAIEMARRLALEEGLLVGISSGAAAVAAVSLAKRAENAGKLITVLFPSHGERYITTALFSSINREVQEMRY

SEQ ID NO: 49384 - protein, 293 aa, Arabidopsis thaliana
  peptide (1)..(293): Ceres Seq. ID no. 12605129
  misc_feature (1)..(271): Pfam Name: Pyridoxal-phosphate dependent enzyme Pfam Description: Pyridoxal-phosphate dependent enzyme
  misc_feature (1)..(291): Homolog of NCBI NO: 11131901 NR Description: Cysteine synthase (O-acetylserine sulfhydrylase)
  misc_feature (1)..(292): Homolog of NCBI NO: 421795 NR Description: cysteine synthase (EC 4.2.99.8) B precursor,
  misc_feature (1)..(291): Homolog of NCBI NO: 231970 NR Description: Cysteine synthase (O-acetylserine sulfhydrylase)
  misc_feature (1)..(292): Homolog of NCBI NO: 12644209 NR Description: CYSTEINE SYNTHASE, CHLOROPLAST PRECURSOR SULFHYDRYLASE) (O-ACETYLSERINE (THIOL)-LYASE) (CSASE B) (CS-B)
  misc_feature (1)..(292): Homolog of NCBI NO: 303902 NR Description: cysteine synthase [Spinacia oleracea]
  misc_feature (1)..(292): Homolog of NCBI NO: 12081919 NR Description: plastidic cysteine synthase 1 [Solanum tuberosum]
  misc_feature (1)..(292): Homolog of NCBI NO: 11131628 NR Description: Cysteine synthase, chloroplast precursor sulfhydrylase) (O-acetylserine (Thiol)-lyase) (CSase B) (CS-B)
  misc_feature (1)..(292): Homolog of NCBI NO: 399333 NR Description: Cysteine synthase, chloroplast precursor sulfhydrylase) (O-acetylserine (Thiol)-lyase) (CSase B) (CS-B)
  misc_feature (1)..(292): Homolog of NCBI NO: 12081921 NR Description: plastidic cysteine synthase 2 [Solanum tuberosum]
  misc_feature (1)..(293): Homolog of NCBI NO: 15228596 NR Description: O-acetylserine (thiol) lyase
MVYLNRVTDGCLADIAAKLESMEPCRSVKDRIGLSMINEAENSGAITPRKTVLVEPTTGNTGLGIAFVAAAKGYKLIVTMPASINIERRMLLRALGAEIVLTNPEKGLKGAVDKAKEIVLKTKNAYMFQQFDNTANTKIHFETTGPEIWEDTMGNVDIFVAGIGTGGTVTGTGGFLKMMNKDIKVVGVEPSERSVISGDNPGYLPGILDVKLLDEVFKVSNGEAIEMARRLALEEGLLVGISSGAAAVAAVSLAKRAENAGKLITVLFPSHGERYITTALFSSINREVQEMRY

SEQ ID NO: 49385 - protein, 272 aa, Arabidopsis thaliana
  peptide (1)..(272): Ceres Seq. ID no. 12605130
  misc_feature (1)..(250): Pfam Name: Pyridoxal-phosphate dependent enzyme Pfam Description: Pyridoxal-phosphate dependent enzyme
  misc_feature (1)..(270): Homolog of NCBI NO: 11131901 NR Description: Cysteine synthase (O-acetylserine sulfhydrylase)
  misc_feature (1)..(271): Homolog of NCBI NO: 421795 NR Description: cysteine synthase (EC 4.2.99.8) B precursor,
  misc_feature (1)..(270): Homolog of NCBI NO: 231970 NR Description: Cysteine synthase (O-acetylserine sulfhydrylase)
  misc_feature (1)..(271): Homolog of NCBI NO: 12644209 NR Description: CYSTEINE SYNTHASE, CHLOROPLAST PRECURSOR SULFHYDRYLASE) (O-ACETYLSERINE (THIOL)-LYASE) (CSASE B) (CS-B)
  misc_feature (1)..(271): Homolog of NCBI NO: 303902 NR Description: cysteine synthase [Spinacia oleracea]
  misc_feature (1)..(271): Homolog of NCBI NO: 12081919 NR Description: plastidic cysteine synthase 1 [Solanum tuberosum]
  misc_feature (1)..(271): Homolog of NCBI NO: 11131628 NR Description: Cysteine synthase, chloroplast precursor sulfhydrylase) (O-acetylserine (Thiol)-lyase) (CSase B) (CS-B)
  misc_feature (1)..(271): Homolog of NCBI NO: 399333 NR Description: Cysteine synthase, chloroplast precursor sulfhydrylase) (O-acetylserine (Thiol)-lyase) (CSase B) (CS-B)
  misc_feature (1)..(271): Homolog of NCBI NO: 12081921 NR Description: plastidic cysteine synthase 2 [Solanum tuberosum]
  misc_feature (1)..(272): Homolog of NCBI NO: 15228596 NR Description: O-acetylserine (thiol) lyase
MEPCRSVKDRIGLSMINEAENSGAITPRKTVLVEPTTGNTGLGIAFVAAAKGYKLIVTMPASINIERRMLLRALGAEIVLTNPEKGLKGAVDKAKEIVLKTKNAYMFQQFDNTANTKIHFETTGPEIWEDTMGNVDIFVAGIGTGGTVTGTGGFLKMMNKDIKVVGVEPSERSVISGDNPGYLPGILDVKLLDEVFKVSNGEAIEMARRLALEEGLLVGISSGAAAVAAVSLAKRAENAGKLITVLFPSHGERYITTALFSSINREVQEMRY

SEQ ID NO: 49386 - DNA, 1849 bp, Arabidopsis thaliana
  misc_feature (1)..(1849): Ceres Seq. ID no. 12592085
  misc_feature: MA Experiment ID: 20000179 Result: Down-regulated in Transcription
  misc_feature: MA Experiment 20000179 PARAMETER Experiment Name: At_Germinating_Seeds_P Parameter: Age (hr) Value: 6 vs. 0
  misc_feature: MA Experiment 20000179 PARAMETER Experiment Name: At_Germinating_Seeds_P Parameter: Tissue Value: Germinating Seeds
  misc_feature: MA Experiment ID: 20000180 Result: Down-regulated in Transcription
  misc_feature: MA Experiment 20000180 PARAMETER Experiment Name: At_Germinating_Seeds_P Parameter: Age (hr) Value: 24 vs. 0
  misc_feature: MA Experiment 20000180 PARAMETER Experiment Name: At_Germinating_Seeds_P Parameter: Tissue Value: Germinating Seeds
agaaaatctgaaagcaaagcagagagcagctcccttcccctcggcgaggaggaaggaagaagaaagccagagagagagagagagagagatcatcgcagcttctcctccgaccatttgactgcgactgtgattacaacacaccgttgatcctacgaaaaagaggtaatggatactggcggcaattcgctggcgtccggacctgatggtgtgaagaggaaagtttgttatttctatgaccctgaggtcggcaattactactatggccaaggtcatcccatgaagccccatcgcatccgcatgacccatgccctcctcgctcactacggtctccttcagcatatgcaggttctcaagcccttccctgcccgcgaccgtgatctctgccgcttccacgccgacgactatgtctcttttctccgcagcattacccctgaaacccagcaagatcagattcgccaacttaagcgcttcaatgttggtgaagactgtcccgtctttgacggcctttattccttttgccagacctatgctggaggatctgttggtggctctgtcaagcttaaccacggcctctgcgatattgccatcaactgggctggtggtctccatcacgctaagaagtgcgaggcctctggcttctgttacgtcaatgatatcgtcttagctatcctagagctccttaagcagcatgagcgtgttctttatgtcgatattgatatccaccacggggatggagtggaggaggcattttatgctactgacagggttatgactgtctcgtttcataaatttggtgattactttcccggtacaggtcacattcaggatataggttatggtagcggaaagtactattctctcaatgtaccactggatgatggaatcgatgatgagagctatcatctgttattcaagcccatcatggggaaagttatggaaattttccgaccaggggctgtggtattgcaatgtggtgctgattcattgtctggtgataggttggggtgctttaatctttcaatcaaaggtcatgctgagtgcgtcaaatttatgagatcgttcaatgttcccctactgctcttgggtggtggtggttacactatccgcaatgttgcccgttgctggtgctacgagactggagttgcacttggagttgaagttgaagacaagatgccggagcatgaatattatgaatactttggtccagactatacacttcacgttgctccaagtaacatggaaaataagaattctcgtcagatgcttgaagagattcgcaatgaccttctccacaatctctctaagcttcagcatgctccaagtgtaccatttcaggaaagaccacctgatacagagactcccgaggttgatgaagaccaagaagatggggataaaagatgggatccggattcagacatggatgttgatgatgaccgtaaacctataccaagcagagtaaaaagagaagctgttgaaccagatacaaaggacaaggatggactgaaaggaattatggagcgtggaaaaggttgtgaggtggaggtggatgagagtggaagcactaaggttacaggagtaaacccagtgggagtggaggaagcaagtgtgaaaatggaagaggaaggaacaaacaagggtggggcggagcaggcgtttcctcctaaaacataagactcggagcttctaatttcttgctactttttctgtctatcaaatgttgctagttaagtttctggagttgttgttgttgtaagcactcctctgttttagaggattgagcacggatatgtatttattcgttgcatgtctgaatgatgatatgatatgacaagacgagctattccttttg

SEQ ID NO: 49387 - protein, 501 aa, Arabidopsis thaliana
  peptide (1)..(501): Ceres Seq. ID no. 12592086
  misc_feature (7)..(447): Homolog of NCBI NO: 4193320 NR Description: histone deacetylase [Zea mays]
  misc_feature (14)..(495): Homolog of NCBI NO: 6680193 NR Description: histone deacetylase 1 [Mus musculus]
  misc_feature (2)..(445): Homolog of NCBI NO: 11066141 NR Description: putative histone deacetylase [Arabidopsis
  misc_feature (2)..(445): Homolog of NCBI NO: 15242626 NR Description: histone deacetylase
  misc_feature (4)..(472): Homolog of NCBI NO: 12698880 NR Description: histone deacetylase HD1 [Oryza sativa]
  misc_feature (3)..(490): Homolog of NCBI NO: 3023947 NR Description: Probable histone deacetylase (RPD3 homolog)
  misc_feature (3)..(490): Homolog of NCBI NO: 14550104 NR Description: histone deacetylase HDA101 [Zea mays]
  misc_feature (1)..(490): Homolog of NCBI NO: 9022439 NR Description: histone deacetylase [Mesembryanthemum
  misc_feature (1)..(501): Homolog of NCBI NO: 2318131 NR Description: histone deacetylase [Arabidopsis thaliana]
  misc_feature (1)..(501): Homolog of NCBI NO: 15233694 NR Description: Histone deacetylase
MDTGGNSLASGPDGVKRKVCYFYDPEVGNYYYGQGHPMKPHRIRMTHALLAHYGLLQHMQVLKPFPARDRDLCRFHADDYVSFLRSITPETQQDQIRQLKRFNVGEDCPVFDGLYSFCQTYAGGSVGGSVKLNHGLCDIAINWAGGLHHAKKCEASGFCYVNDIVLAILELLKQHERVLYVDIDIHHGDGVEEAFYATDRVMTVSFHKFGDYFPGTGHIQDIGYGSGKYYSLNVPLDDGIDDESYHLLFKPIMGKVMEIFRPGAVVLQCGADSLSGDRLGCFNLSIKGHAECVKFMRSFNVPLLLLGGGGYTIRNVARCWCYETGVALGVEVEDKMPEHEYYEYFGPDYTLHVAPSNMENKNSRQMLEEIRNDLLHNLSKLQHAPSVPFQERPPDTETPEVDEDQEDGDKRWDPDSDMDVDDDRKPIPSRVKREAVEPDTKDKDGLKGIMERGKGCEVEVDESGSTKVTGVNPVGVEEASVKMEEEGTNKGGAEQAFPPKT

SEQ ID NO: 49388 - protein, 464 aa, Arabidopsis thaliana
  peptide (1)..(464): Ceres Seq. ID no. 12592087
  misc_feature (1)..(410): Homolog of NCBI NO: 4193320 NR Description: histone deacetylase [Zea mays]
  misc_feature (1)..(458): Homolog of NCBI NO: 6680193 NR Description: histone deacetylase 1 [Mus musculus]
  misc_feature (1)..(408): Homolog of NCBI NO: 11066141 NR Description: putative histone deacetylase [Arabidopsis
  misc_feature (1)..(408): Homolog of NCBI NO: 15242626 NR Description: histone deacetylase
  misc_feature (1)..(435): Homolog of NCBI NO: 12698880 NR Description: histone deacetylase HD1 [Oryza sativa]
  misc_feature (1)..(453): Homolog of NCBI NO: 3023947 NR Description: Probable histone deacetylase (RPD3 homolog)
  misc_feature (1)..(453): Homolog of NCBI NO: 14550104 NR Description: histone deacetylase HDA101 [Zea mays]
  misc_feature (1)..(453): Homolog of NCBI NO: 9022439 NR Description: histone deacetylase [Mesembryanthemum
  misc_feature (1)..(464): Homolog of NCBI NO: 2318131 NR Description: histone deacetylase [Arabidopsis thaliana]
  misc_feature (1)..(464): Homolog of NCBI NO: 15233694 NR Description: Histone deacetylase
MKPHRIRMTHALLAHYGLLQHMQVLKPFPARDRDLCRFHADDYVSFLRSITPETQQDQIRQLKRFNVGEDCPVFDGLYSFCQTYAGGSVGGSVKLNHGLCDIAINWAGGLHHAKKCEASGFCYVNDIVLAILELLKQHERVLYVDIDIHHGDGVEEAFYATDRVMTVSFHKFGDYFPGTGHIQDIGYGSGKYYSLNVPLDDGIDDESYHLLFKPIMGKVMEIFRPGAVVLQCGADSLSGDRLGCFNLSIKGHAECVKFMRSFNVPLLLLGGGGYTIRNVARCWCYETGVALGVEVEDKMPEHEYYEYFGPDYTLHVAPSNMENKNSRQMLEEIRNDLLHNLSKLQHAPSVPFQERPPDTETPEVDEDQEDGDKRWDPDSDMDVDDDRKPIPSRVKREAVEPDTKDKDGLKGIMERGKGCEVEVDESGSTKVTGVNPVGVEEASVKMEEEGTNKGGAEQAFPPKT

SEQ ID NO: 49389 - protein, 457 aa, Arabidopsis thaliana
  peptide (1)..(457): Ceres Seq. ID no. 12592088
  misc_feature (1)..(403): Homolog of NCBI NO: 4193320 NR Description: histone deacetylase [Zea mays]
  misc_feature (1)..(451): Homolog of NCBI NO: 6680193 NR Description: histone deacetylase 1 [Mus musculus]
  misc_feature (1)..(401): Homolog of NCBI NO: 11066141 NR Description: putative histone deacetylase [Arabidopsis
  misc_feature (1)..(401): Homolog of NCBI NO: 15242626 NR Description: histone deacetylase
  misc_feature (1)..(428): Homolog of NCBI NO: 12698880 NR Description: histone deacetylase HD1 [Oryza sativa]
  misc_feature (1)..(446): Homolog of NCBI NO: 3023947 NR Description: Probable histone deacetylase (RPD3 homolog)
  misc_feature (1)..(446): Homolog of NCBI NO: 14550104 NR Description: histone deacetylase HDA101 [Zea mays]
  misc_feature (1)..(446): Homolog of NCBI NO: 9022439 NR Description: histone deacetylase [Mesembryanthemum
  misc_feature (1)..(457): Homolog of NCBI NO: 2318131 NR Description: histone deacetylase [Arabidopsis thaliana]
  misc_feature (1)..(457): Homolog of NCBI NO: 15233694 NR Description: Histone deacetylase
MTHALLAHYGLLQHMQVLKPFPARDRDLCRFHADDYVSFLRSITPETQQDQIRQLKRFNVGEDCPVFDGLYSFCQTYAGGSVGGSVKLNHGLCDIAINWAGGLHHAKKCEASGFCYVNDIVLAILELLKQHERVLYVDIDIHHGDGVEEAFYATDRVMTVSFHKFGDYFPGTGHIQDIGYGSGKYYSLNVPLDDGIDDESYHLLFKPIMGKVMEIFRPGAVVLQCGADSLSGDRLGCFNLSIKGHAECVKFMRSFNVPLLLLGGGGYTIRNVARCWCYETGVALGVEVEDKMPEHEYYEYFGPDYTLHVAPSNMENKNSRQMLEEIRNDLLHNLSKLQHAPSVPFQERPPDTETPEVDEDQEDGDKRWDPDSDMDVDDDRKPIPSRVKREAVEPDTKDKDGLKGIMERGKGCEVEVDESGSTKVTGVNPVGVEEASVKMEEEGTNKGGAEQAFPPKT

SEQ ID NO: 49390 - DNA, 1005 bp, Arabidopsis thaliana
  misc_feature (1)..(1005): Ceres Seq. ID no. 13588739
  misc_feature: MA Experiment ID: 108434 Result: Up-regulated in Transcription
  misc_feature: MA Experiment 108434 PARAMETER Experiment Name: At_Root_Tips_cDNA_P Parameter: Tissue Value: Root Tips
  misc_feature: MA Experiment ID: 108461 Result: Down-regulated in Transcription
  misc_feature: MA Experiment 108461 PARAMETER Experiment Name: At_Germinating_Seeds_cDNA_P Parameter: Age (day) Value: 1 vs. 0
  misc_feature: MA Experiment 108461 PARAMETER Experiment Name: At_Germinating_Seeds_cDNA_P Parameter: Tissue Value: Germinating Seeds
  misc_feature: MA Experiment ID: 108462 Result: Down-regulated in Transcription
  misc_feature: MA Experiment 108462 PARAMETER Experiment Name: At_Germinating_Seeds_cDNA_P Parameter: Age (day) Value: 2 vs. 0
  misc_feature: MA Experiment 108462 PARAMETER Experiment Name: At_Germinating_Seeds_cDNA_P Parameter: Tissue Value: Germinating Seeds
  misc_feature: MA Experiment ID: 108463 Result: Down-regulated in Transcription
  misc_feature: MA Experiment 108463 PARAMETER Experiment Name: At_Germinating_Seeds_cDNA_P Parameter: Age (day) Value: 3 vs. 0
  misc_feature: MA Experiment 108463 PARAMETER Experiment Name: At_Germinating_Seeds_cDNA_P Parameter: Tissue Value: Germinating Seeds
  misc_feature: MA Experiment ID: 108464 Result: Down-regulated in Transcription
  misc_feature: MA Experiment 108464 PARAMETER Experiment Name: At_Germinating_Seeds_cDNA_P Parameter: Age (day) Value: 4 vs. 0
  misc_feature: MA Experiment 108464 PARAMETER Experiment Name: At_Germinating_Seeds_cDNA_P Parameter: Tissue Value: Germinating Seeds
  misc_feature: MA Experiment ID: 108585 Result: Up-regulated in Transcription
  misc_feature: MA Experiment 108585 PARAMETER Experiment Name: At_5mM_NaNP_cDNA_P Parameter: Timepoint (hr) Value: 6
  misc_feature: MA Experiment 108585 PARAMETER Experiment Name: At_5mM_NaNP_cDNA_P Parameter: Tissue Value: Aerial
  misc_feature: MA Experiment 108585 PARAMETER Experiment Name: At_5mM_NaNP_cDNA_P Parameter: Treatment Value: null
aagttcattgtgatgattttttatttactctgaatctctggattaactcagatccgttgtttttctagggttttgattccgttgtgcgaaggactttaagaggttttgcagatcgaaatcggaagagaagaagaagatgtttctcactagaactgagtatgacagaggagtgaacactttttctccagaaggaaggctatttcaagtggaatatgccattgaagctatcaagcttggttctactgcaattggagtaaagacaaaagaaggagttgtgcttgctgtcgagaagcgtatcacgtcgccattgctggaaccgagcagtgtggagaagattatggaaattgatgaccatattggttgtgctatgagcggtttaattgctgacgcgcgcacacttgttgagcatgctagagttgaaactcaaaaccatagattctcgtatggtgagccgatgactgtagagtccacaacacaagcactgtgtgatctggctttacggtttggtgaaggagaggaagaatcaatgtctcggccgtttggagtatctcttctcattgctggccatgatgaaaatggaccaagcttgtactacactgatccttcaggaacattctggcagtgcaatgcaaaggcaattggttcaggttctgaaggagctgatagctctcttcaagagcaattcaacaaagatttgtctctacaagaagctgagactatcgctgtatctatcctaaagcaagttatggaagaaaaggtgactccaaataacgtggatattgccaaggtagcaccagcttatcatctctacactccacaagaagtcgaagcagtcatcgctcgtctttgattgaaaaaactcaatttgggtaatttacctatcagcttgtgtcacaaaacttgttacttttgtctgttagattgaggatcatgtcacattttagtcggttgtgtaagagaatcttttggctcccatgtcattcaataacctttcggatttgtgac

SEQ ID NO: 49391 - protein, 237 aa, Arabidopsis thaliana; identical to SEQ ID NO: 34799
  peptide (1)..(237): Ceres Seq. ID no. 13588740
  misc_feature (31)..(218): Pfam Name: Proteasome A-type and B-type Pfam Description: Proteasome A-type and B-type
  misc_feature (1)..(237): Homolog of NCBI NO: 15231824 NR Description: 20S proteasome alpha subunit E2 (PAE2)
  misc_feature (1)..(237): Homolog of NCBI NO: 15220961 NR Description: 20S proteasome alpha subunit E1 (PAE1)

SEQ ID NO: 49392 - protein, 170 aa, Arabidopsis thaliana; identical to SEQ ID NO: 34800
  peptide (1)..(170): Ceres Seq. ID no. 13588741
  misc_feature (1)..(151): Pfam Name: Proteasome A-type and B-type Pfam Description: Proteasome A-type and B-type
  misc_feature (1)..(170): Homolog of NCBI NO: 15231824 NR Description: 20S proteasome alpha subunit E2 (PAE2)
  misc_feature (1)..(170): Homolog of NCBI NO: 15220961 NR Description: 20S proteasome alpha subunit E1 (PAE1)

SEQ ID NO: 49393 - protein, 160 aa, Arabidopsis thaliana; identical to SEQ ID NO: 34801
  peptide (1)..(160): Ceres Seq. ID no. 13588742
  misc_feature (1)..(141): Pfam Name: Proteasome A-type and B-type Pfam Description: Proteasome A-type and B-type
  misc_feature (1)..(160): Homolog of NCBI NO: 15231824 NR Description: 20S proteasome alpha subunit E2 (PAE2)
  misc_feature (1)..(160): Homolog of NCBI NO: 15220961 NR Description: 20S proteasome alpha subunit E1 (PAE1)

SEQ ID NO: 49394 - DNA, 875 bp, Arabidopsis thaliana
  misc_feature (1)..(875): Ceres Seq. ID no. 13587997
  misc_feature: MA Experiment ID: 20000180 Result: Up-regulated in Transcription
  misc_feature: MA Experiment 20000180 PARAMETER Experiment Name: At_Germinating_Seeds_P Parameter: Age (hr) Value: 24 vs. 0
  misc_feature: MA Experiment 20000180 PARAMETER Experiment Name: At_Germinating_Seeds_P Parameter: Tissue Value: Germinating Seeds
  misc_feature: MA Experiment ID: 20000184 Result: Up-regulated in Transcription
  misc_feature: MA Experiment 20000184 PARAMETER Experiment Name: At_Shoots__P Parameter: Age (day) Value: 7
  misc_feature: MA Experiment 20000184 PARAMETER Experiment Name: At_Shoots__P Parameter: Tissue Value: Shoots vs. Whole Plant
  misc_feature: MA Experiment ID: 20000185 Result: Up-regulated in Transcription
  misc_feature: MA Experiment 20000185 PARAMETER Experiment Name: At_Roots__P Parameter: Age (day) Value: 7 vs. 21
  misc_feature: MA Experiment 20000185 PARAMETER Experiment Name: At_Roots__P Parameter: Organism Value: A. thaliana
  misc_feature: MA Experiment 20000185 PARAMETER Experiment Name: At_Roots__P Parameter: Tissue Value: Roots vs. Whole Plant
  misc_feature: MA Experiment ID: 20000264 Result: Up-regulated in Transcription
  misc_feature: MA Experiment 20000264 PARAMETER Experiment Name: At_Open_Flower_P Parameter: Age (day) Value: 21
  misc_feature: MA Experiment 20000264 PARAMETER Experiment Name: At_Open_Flower_P Parameter: Plant Line Value: WS
  misc_feature: MA Experiment 20000264 PARAMETER Experiment Name: At_Open_Flower_P Parameter: Tissue Value: Open Flower vs. Whole Plant
  misc_feature: MA Experiment ID: 20000439 Result: Up-regulated in Transcription
  misc_feature: MA Experiment 20000439 PARAMETER Experiment Name: At_Roots__P Parameter: Age (day) Value: 14 vs. 21
  misc_feature: MA Experiment 20000439 PARAMETER Experiment Name: At_Roots__P Parameter: Organism Value: A. thaliana
  misc_feature: MA Experiment 20000439 PARAMETER Experiment Name: At_Roots__P Parameter: Tissue Value: Roots vs. Whole Plant
  misc_feature: MA Experiment ID: 20000794 Result: Up-regulated in Transcription
  misc_feature: MA Experiment 20000794 PARAMETER Experiment Name: At_Petals_P Parameter: Age (day) Value: 23-25 days
  misc_feature: MA Experiment 20000794 PARAMETER Experiment Name: At_Petals_P Parameter: Plant Line Value: WS
  misc_feature: MA Experiment 20000794 PARAMETER Experiment Name: At_Petals_P Parameter: Tissue Value: Petals vs. Whole plant
  misc_feature: MA Experiment ID: 20001555 Result: Up-regulated in Transcription
  misc_feature: MA Experiment 20001555 PARAMETER Experiment Name: At_Drought_Soil_Dry_P Parameter: Age (day) Value: 24
  misc_feature: MA Experiment 20001555 PARAMETER Experiment Name: At_Drought_Soil_Dry_P Parameter: Organism Value: A. thaliana
  misc_feature: MA Experiment 20001555 PARAMETER Experiment Name: At_Drought_Soil_Dry_P Parameter: Plant Line Value: WS
  misc_feature: MA Experiment 20001555 PARAMETER Experiment Name: At_Drought_Soil_Dry_P Parameter: Post Timepoint (hr) Value: None
  misc_feature: MA Experiment 20001555 PARAMETER Experiment Name: At_Drought_Soil_Dry_P Parameter: Post-Treatment Value: None
  misc_feature: MA Experiment 20001555 PARAMETER Experiment Name: At_Drought_Soil_Dry_P Parameter: Timepoint (day) Value: 10
  misc_feature: MA Experiment 20001555 PARAMETER Experiment Name: At_Drought_Soil_Dry_P Parameter: Treatment Value: Drought vs. No Drought
  misc_feature: MA Experiment ID: 20001556 Result: Up-regulated in Transcription
  misc_feature: MA Experiment 20001556 PARAMETER Experiment Name: At_Drought_Soil_Dry_P Parameter: Age (day) Value: 26
  misc_feature: MA Experiment 20001556 PARAMETER Experiment Name: At_Drought_Soil_Dry_P Parameter: Organism Value: A. thaliana
  misc_feature: MA Experiment 20001556 PARAMETER Experiment Name: At_Drought_Soil_Dry_P Parameter: Plant Line Value: WS
  misc_feature: MA Experiment 20001556 PARAMETER Experiment Name: At_Drought_Soil_Dry_P Parameter: Post Timepoint (hr) Value: None
  misc_feature: MA Experiment 20001556 PARAMETER Experiment Name: At_Drought_Soil_Dry_P Parameter: Post-Treatment Value: None
  misc_feature: MA Experiment 20001556 PARAMETER Experiment Name: At_Drought_Soil_Dry_P Parameter: Timepoint (day) Value: 12
  misc_feature: MA Experiment 20001556 PARAMETER Experiment Name: At_Drought_Soil_Dry_P Parameter: Treatment Value: Drought vs. No Drought
  misc_feature: MA Experiment ID: 20001905 Result: Up-regulated in Transcription
  misc_feature: MA Experiment 20001905 PARAMETER Experiment Name: At_Drought_Reproduction_P Parameter: Age (day) Value: 40
  misc_feature: MA Experiment 20001905 PARAMETER Experiment Name: At_Drought_Reproduction_P Parameter: Organism Value: A. thaliana
  misc_feature: MA Experiment 20001905 PARAMETER Experiment Name: At_Drought_Reproduction_P Parameter: Plant Line Value: WS
  misc_feature: MA Experiment 20001905 PARAMETER Experiment Name: At_Drought_Reproduction_P Parameter: Timepoint (day) Value: 10
  misc_feature: MA Experiment 20001905 PARAMETER Experiment Name: At_Drought_Reproduction_P Parameter: Tissue Value: Rosettes
  misc_feature: MA Experiment 20001905 PARAMETER Experiment Name: At_Drought_Reproduction_P Parameter: Treatment Value: Drought vs. No Drought
  misc_feature: MA Experiment ID: 20001911 Result: Down-regulated in Transcription
  misc_feature: MA Experiment 20001911 PARAMETER Experiment Name: At_Drought_Reproduction_P Parameter: Age (day) Value: 40
  misc_feature: MA Experiment 20001911 PARAMETER Experiment Name: At_Drought_Reproduction_P Parameter: Organism Value: A. thaliana
  misc_feature: MA Experiment 20001911 PARAMETER Experiment Name: At_Drought_Reproduction_P Parameter: Plant Line Value: WS
  misc_feature: MA Experiment 20001911 PARAMETER Experiment Name: At_Drought_Reproduction_P Parameter: Timepoint (day) Value: 10
  misc_feature: MA Experiment 20001911 PARAMETER Experiment Name: At_Drought_Reproduction_P Parameter: Tissue Value: Flowers
  misc_feature: MA Experiment 20001911 PARAMETER Experiment Name: At_Drought_Reproduction_P Parameter: Treatment Value: Drought vs. No Drought
atcctcatctacatttcaataaacacaaagagttgaaaacattaaatcgatatatcagaactaaaccggatctgaaaaatggcgaacgaccaagtgattcttcttgattactggccaagcatgttcgggatgaggacgaagatggctttggctgagaaaggagtcaagtatgagtacaaggaaacagatccatgggttaagactcctttactcatagagatgaacccgattcacaagaagattccggttctcatccacaacggtaaaccgatttgtgaatctcttattcagcttgagtacattgatgaggtttggtccgatgcatccccaatccttccctctgatccttaccagaagtctcgagctagattttgggctgaattcatcgacaaaaagttttacgacccatcatggaaggtatgggcaacaatgggcgaagaacatgcagcagtgaagaaggaattgttggaacatttcaagacacttgagacagagctcggagacaaaccttattacggtggtgaagtatttggatacctagacattgcattaatgggatactacagctggttcaaggccatggagaaatttggtgaattcagtatcgaaacagagtttcctatattgactacgtggaccaagaggtgtttggaaagagagagtgtggtcaaggcattggctgattctgataggatcattgagtatgtttatgtcctgaggaagaaatttggagcagcgtaaaaaaatggtttgggtttcaagaaggctgttattttctgtcttttataatgtttcatgtgaggtttgtaattgttatttctgtcgttttgttgaaagtatgataaaccgtaataacgaaatgtttactgtaccct

SEQ ID NO: 49395 - protein, 220 aa, Arabidopsis thaliana
  peptide (1)..(220): Ceres Seq. ID no. 13587998
  misc_feature (4)..(218): Homolog of NCBI NO: 15220040 NR Description: glutathione transferase, putative [Arabidopsis
  misc_feature (1)..(217): Homolog of NCBI NO: 8052534 NR Description: F3F9.11 [Arabidopsis thaliana]
  misc_feature (4)..(218): Homolog of NCBI NO: 7447307 NR Description: glutathione transferase (EC 2.5.1.18) - papaya
  misc_feature (1)..(217): Homolog of NCBI NO: 21592644 NR Description: glutathione transferase, putative [Arabidopsis
  misc_feature (1)..(218): Homolog of NCBI NO: 1346215 NR Description: PROBABLE GLUTATHIONE S-TRANSFERASE PARC
  misc_feature (1)..(217): Homolog of NCBI NO: 18411929 NR Description: glutathione transferase, putative [Arabidopsis
  misc_feature (1)..(218): Homolog of NCBI NO: 416652 NR Description: PROBABLE GLUTATHIONE S-TRANSFERASE (AUXIN-INDUCED
  misc_feature (1)..(218): Homolog of NCBI NO: 100302 NR Description: auxin-induced protein (clone pCNT107) - common
  misc_feature (4)..(218): Homolog of NCBI NO: 15220041 NR Description: glutathione transferase, putative [Arabidopsis
  misc_feature (1)..(220): Homolog of NCBI NO: 15220042 NR Description: glutathione transferase, putative [Arabidopsis
MANDQVILLDYWPSMFGMRTKMALAEKGVKYEYKETDPWVKTPLLIEMNPIHKKIPVLIHNGKPICESLIQLEYIDEVWSDASPILPSDPYQKSRARFWAEFIDKKFYDPSWKVWATMGEEHAAVKKELLEHFKTLETELGDKPYYGGEVFGYLDIALMGYYSWFKAMEKFGEFSIETEFPILTTWTKRCLERESVVKALADSDRIIEYVYVLRKKFGAA

SEQ ID NO: 49396 - protein, 206 aa, Arabidopsis thaliana
  peptide (1)..(206): Ceres Seq. ID no. 13587999
  misc_feature (1)..(204): Homolog of NCBI NO: 15220040 NR Description: glutathione transferase, putative [Arabidopsis
  misc_feature (1)..(203): Homolog of NCBI NO: 8052534 NR Description: F3F9.11 [Arabidopsis thaliana]
  misc_feature (1)..(204): Homolog of NCBI NO: 7447307 NR Description: glutathione transferase (EC 2.5.1.18) - papaya
  misc_feature (1)..(203): Homolog of NCBI NO: 21592644 NR Description: glutathione transferase, putative [Arabidopsis
  misc_feature (1)..(204): Homolog of NCBI NO: 1346215 NR Description: PROBABLE GLUTATHIONE S-TRANSFERASE PARC
  misc_feature (1)..(203): Homolog of NCBI NO: 18411929 NR Description: glutathione transferase, putative [Arabidopsis
  misc_feature (1)..(204): Homolog of NCBI NO: 416652 NR Description: PROBABLE GLUTATHIONE S-TRANSFERASE (AUXIN-INDUCED
  misc_feature (1)..(204): Homolog of NCBI NO: 100302 NR Description: auxin-induced protein (clone pCNT107) - common
  misc_feature (1)..(204): Homolog of NCBI NO: 15220041 NR Description: glutathione transferase, putative [Arabidopsis
  misc_feature (1)..(206): Homolog of NCBI NO: 15220042 NR Description: glutathione transferase, putative [Arabidopsis
MFGMRTKMALAEKGVKYEYKETDPWVKTPLLIEMNPIHKKIPVLIHNGKPICESLIQLEYIDEVWSDASPILPSDPYQKSRARFWAEFIDKKFYDPSWKVWATMGEEHAAVKKELLEHFKTLETELGDKPYYGGEVFGYLDIALMGYYSWFKAMEKFGEFSIETEFPILTTWTKRCLERESVVKALADSDRIIEYVYVLRKKFGAA

SEQ ID NO: 49397 - protein, 203 aa, Arabidopsis thaliana
  peptide (1)..(203): Ceres Seq. ID no. 13588000
  misc_feature (1)..(201): Homolog of NCBI NO: 15220040 NR Description: glutathione transferase, putative [Arabidopsis
  misc_feature (1)..(200): Homolog of NCBI NO: 8052534 NR Description: F3F9.11 [Arabidopsis thaliana]
  misc_feature (1)..(201): Homolog of NCBI NO: 7447307 NR Description: glutathione transferase (EC 2.5.1.18) - papaya
  misc_feature (1)..(200): Homolog of NCBI NO: 21592644 NR Description: glutathione transferase, putative [Arabidopsis
  misc_feature (1)..(201): Homolog of NCBI NO: 1346215 NR Description: PROBABLE GLUTATHIONE S-TRANSFERASE PARC
  misc_feature (1)..(200): Homolog of NCBI NO: 18411929 NR Description: glutathione transferase, putative [Arabidopsis
  misc_feature (1)..(201): Homolog of NCBI NO: 416652 NR Description: PROBABLE GLUTATHIONE S-TRANSFERASE (AUXIN-INDUCED
  misc_feature (1)..(201): Homolog of NCBI NO: 100302 NR Description: auxin-induced protein (clone pCNT107) - common
  misc_feature (1)..(201): Homolog of NCBI NO: 15220041 NR Description: glutathione transferase, putative [Arabidopsis
  misc_feature (1)..(203): Homolog of NCBI NO: 15220042 NR Description: glutathione transferase, putative [Arabidopsis
MRTKMALAEKGVKYEYKETDPWVKTPLLIEMNPIHKKIPVLIHNGKPICESLIQLEYIDEVWSDASPILPSDPYQKSRARFWAEFIDKKFYDPSWKVWATMGEEHAAVKKELLEHFKTLETELGDKPYYGGEVFGYLDIALMGYYSWFKAMEKFGEFSIETEFPILTTWTKRCLERESVVKALADSDRIIEYVYVLRKKFGAA

SEQ ID NO: 49398 - DNA, 1817 bp, Arabidopsis thaliana
  misc_feature (1)..(1817): Ceres Seq. ID no. 13648292
  misc_feature: MA Experiment ID: 20000169 Result: Down-regulated in Transcription
  misc_feature: MA Experiment 20000169 PARAMETER Experiment Name: At_100uM_ABA_P Parameter: Age (day) Value: 14
  misc_feature: MA Experiment 20000169 PARAMETER Experiment Name: At_100uM_ABA_P Parameter: Organism Value: A. thaliana
  misc_feature: MA Experiment 20000169 PARAMETER Experiment Name: At_100uM_ABA_P Parameter: Plant Line Value: WS
  misc_feature: MA Experiment 20000169 PARAMETER Experiment Name: At_100uM_ABA_P Parameter: Timepoint (hr) Value: 6
  misc_feature: MA Experiment 20000169 PARAMETER Experiment Name: At_100uM_ABA_P Parameter: Tissue Value: Aerial
  misc_feature: MA Experiment 20000169 PARAMETER Experiment Name: At_100uM_ABA_P Parameter: Treatment Value: 100uM ABA vs. No Treatment
  misc_feature: MA Experiment ID: 20000171 Result: Down-regulated in Transcription
  misc_feature: MA Experiment 20000171 PARAMETER Experiment Name: At_42deg_Heat_P Parameter: Age (day) Value: 14
  misc_feature: MA Experiment 20000171 PARAMETER Experiment Name: At_42deg_Heat_P Parameter: Organism Value: A. thaliana
  misc_feature: MA Experiment 20000171 PARAMETER Experiment Name: At_42deg_Heat_P Parameter: Plant Line Value: WS
  misc_feature: MA Experiment 20000171 PARAMETER Experiment Name: At_42deg_Heat_P Parameter: Temperature (deg C) Value: 42 vs. 22
  misc_feature: MA Experiment 20000171 PARAMETER Experiment Name: At_42deg_Heat_P Parameter: Timepoint (hr) Value: 1
  misc_feature: MA Experiment 20000171 PARAMETER Experiment Name: At_42deg_Heat_P Parameter: Tissue Value: Aerial
  misc_feature: MA Experiment ID: 20000173 Result: Down-regulated in Transcription
  misc_feature: MA Experiment 20000173 PARAMETER Experiment Name: At_42deg_Heat_P Parameter: Age (day) Value: 14
  misc_feature: MA Experiment 20000173 PARAMETER Experiment Name: At_42deg_Heat_P Parameter: Organism Value: A. thaliana
  misc_feature: MA Experiment 20000173 PARAMETER Experiment Name: At_42deg_Heat_P Parameter: Plant Line Value: WS
  misc_feature: MA Experiment 20000173 PARAMETER Experiment Name: At_42deg_Heat_P Parameter: Temperature (deg C) Value: 42 vs. 22
  misc_feature: MA Experiment 20000173 PARAMETER Experiment Name: At_42deg_Heat_P Parameter: Timepoint (hr) Value: 6
  misc_feature: MA Experiment 20000173 PARAMETER Experiment Name: At_42deg_Heat_P Parameter: Tissue Value: Aerial
  misc_feature: MA Experiment ID: 20000179 Result: Up-regulated in Transcription
  misc_feature: MA Experiment 20000179 PARAMETER Experiment Name: At_Germinating_Seeds_P Parameter: Age (hr) Value: 6 vs. 0
  misc_feature: MA Experiment 20000179 PARAMETER Experiment Name: At_Germinating_Seeds_P Parameter: Tissue Value: Germinating Seeds
  misc_feature: MA Experiment ID: 20000180 Result: Up-regulated in Transcription
  misc_feature: MA Experiment 20000180 PARAMETER Experiment Name: At_Germinating_Seeds_P Parameter: Age (hr) Value: 24 vs. 0
  misc_feature: MA Experiment 20000180 PARAMETER Experiment Name: At_Germinating_Seeds_P Parameter: Tissue Value: Germinating Seeds
  misc_feature: MA Experiment ID: 20000185 Result: Down-regulated in Transcription
  misc_feature: MA Experiment 20000185 PARAMETER Experiment Name: At_Roots__P Parameter: Age (day) Value: 7 vs. 21
  misc_feature: MA Experiment 20000185 PARAMETER Experiment Name: At_Roots__P Parameter: Organism Value: A. thaliana
  misc_feature: MA Experiment 20000185 PARAMETER Experiment Name: At_Roots__P Parameter: Tissue Value: Roots vs. Whole Plant
  misc_feature: MA Experiment ID: 20000436 Result: Down-regulated in Transcription
  misc_feature: MA Experiment 20000436 PARAMETER Experiment Name: At_Drought_P Parameter: Age (day) Value: 7
  misc_feature: MA Experiment 20000436 PARAMETER Experiment Name: At_Drought_P Parameter: Organism Value: A. thaliana
  misc_feature: MA Experiment 20000436 PARAMETER Experiment Name: At_Drought_P Parameter: Plant Line Value: WS
  misc_feature: MA Experiment 20000436 PARAMETER Experiment Name: At_Drought_P Parameter: Timepoint (hr) Value: 12
  misc_feature: MA Experiment 20000436 PARAMETER Experiment Name: At_Drought_P Parameter: Tissue Value: Whole Plant
  misc_feature: MA Experiment 20000436 PARAMETER Experiment Name: At_Drought_P Parameter: Treatment Value: Drought vs. No Drought
  misc_feature: MA Experiment ID: 20000439 Result: Down-regulated in Transcription
  misc_feature: MA Experiment 20000439 PARAMETER Experiment Name: At_Roots__P Parameter: Age (day) Value: 14 vs. 21
  misc_feature: MA Experiment 20000439 PARAMETER Experiment Name: At_Roots__P Parameter: Organism Value: A. thaliana
  misc_feature: MA Experiment 20000439 PARAMETER Experiment Name: At_Roots__P Parameter: Tissue Value: Roots vs. Whole Plant
  misc_feature: MA Experiment ID: 20000453 Result: Down-regulated in Transcription
  misc_feature: MA Experiment 20000453 PARAMETER Experiment Name: At_100uM_ABA_P Parameter: Age (day) Value: 15
  misc_feature: MA Experiment 20000453 PARAMETER Experiment Name: At_100uM_ABA_P Parameter: Organism Value: A. thaliana
  misc_feature: MA Experiment 20000453 PARAMETER Experiment Name: At_100uM_ABA_P Parameter: Plant Line Value: WS
  misc_feature: MA Experiment 20000453 PARAMETER Experiment Name: At_100uM_ABA_P Parameter: Timepoint (hr) Value: 24
  misc_feature: MA Experiment 20000453 PARAMETER Experiment Name: At_100uM_ABA_P Parameter: Tissue Value: Aerial
  misc_feature: MA Experiment 20000453 PARAMETER Experiment Name: At_100uM_ABA_P Parameter: Treatment Value: 100uM ABA vs. No Treatment
  misc_feature: MA Experiment ID: 20000794 Result: Down-regulated in Transcription
  misc_feature: MA Experiment 20000794 PARAMETER Experiment Name: At_Petals_P Parameter: Age (day) Value: 23-25 days
  misc_feature: MA Experiment 20000794 PARAMETER Experiment Name: At_Petals_P Parameter: Plant Line Value: WS
  misc_feature: MA Experiment 20000794 PARAMETER Experiment Name: At_Petals_P Parameter: Tissue Value: Petals vs. Whole plant
  misc_feature: MA Experiment ID: 20001554 Result: Down-regulated in Transcription
  misc_feature: MA Experiment 20001554 PARAMETER Experiment Name: At_Drought_Soil_Dry_P Parameter: Age (day) Value: 21
  misc_feature: MA Experiment 20001554 PARAMETER Experiment Name: At_Drought_Soil_Dry_P Parameter: Organism Value: A. thaliana
  misc_feature: MA Experiment 20001554 PARAMETER Experiment Name: At_Drought_Soil_Dry_P Parameter: Plant Line Value: WS
  misc_feature: MA Experiment 20001554 PARAMETER Experiment Name: At_Drought_Soil_Dry_P Parameter: Post Timepoint (hr) Value: None
  misc_feature: MA Experiment 20001554 PARAMETER Experiment Name: At_Drought_Soil_Dry_P Parameter: Post-Treatment Value: None
  misc_feature: MA Experiment 20001554 PARAMETER Experiment Name: At_Drought_Soil_Dry_P Parameter: Timepoint (day) Value: 7
  misc_feature: MA Experiment 20001554 PARAMETER Experiment Name: At_Drought_Soil_Dry_P Parameter: Treatment Value: Drought vs. No Drought
  misc_feature: MA Experiment ID: 20001555 Result: Down-regulated in Transcription
  misc_feature: MA Experiment 20001555 PARAMETER Experiment Name: At_Drought_Soil_Dry_P Parameter: Age (day) Value: 24
  misc_feature: MA Experiment 20001555 PARAMETER Experiment Name: At_Drought_Soil_Dry_P Parameter: Organism Value: A. thaliana
  misc_feature: MA Experiment 20001555 PARAMETER Experiment Name: At_Drought_Soil_Dry_P Parameter: Plant Line Value: WS
  misc_feature: MA Experiment 20001555 PARAMETER Experiment Name: At_Drought_Soil_Dry_P Parameter: Post Timepoint (hr) Value: None
  misc_feature: MA Experiment 20001555 PARAMETER Experiment Name: At_Drought_Soil_Dry_P Parameter: Post-Treatment Value: None
  misc_feature: MA Experiment 20001555 PARAMETER Experiment Name: At_Drought_Soil_Dry_P Parameter: Timepoint (day) Value: 10
  misc_feature: MA Experiment 20001555 PARAMETER Experiment Name: At_Drought_Soil_Dry_P Parameter: Treatment Value: Drought vs. No Drought
  misc_feature: MA Experiment ID: 20001905 Result: Down-regulated in Transcription
  misc_feature: MA Experiment 20001905 PARAMETER Experiment Name: At_Drought_Reproduction_P Parameter: Age (day) Value: 40
  misc_feature: MA Experiment 20001905 PARAMETER Experiment Name: At_Drought_Reproduction_P Parameter: Organism Value: A. thaliana
  misc_feature: MA Experiment 20001905 PARAMETER Experiment Name: At_Drought_Reproduction_P Parameter: Plant Line Value: WS
  misc_feature: MA Experiment 20001905 PARAMETER Experiment Name: At_Drought_Reproduction_P Parameter: Timepoint (day) Value: 10
  misc_feature: MA Experiment 20001905 PARAMETER Experiment Name: At_Drought_Reproduction_P Parameter: Tissue Value: Rosettes
  misc_feature: MA Experiment 20001905 PARAMETER Experiment Name: At_Drought_Reproduction_P Parameter: Treatment Value: Drought vs. No Drought
  misc_feature: MA Experiment ID: 20001911 Result: Down-regulated in Transcription
  misc_feature: MA Experiment 20001911 PARAMETER Experiment Name: At_Drought_Reproduction_P Parameter: Age (day) Value: 40
  misc_feature: MA Experiment 20001911 PARAMETER Experiment Name: At_Drought_Reproduction_P Parameter: Organism Value: A. thaliana
  misc_feature: MA Experiment 20001911 PARAMETER Experiment Name: At_Drought_Reproduction_P Parameter: Plant Line Value: WS
  misc_feature: MA Experiment 20001911 PARAMETER Experiment Name: At_Drought_Reproduction_P Parameter: Timepoint (day) Value: 10
  misc_feature: MA Experiment 20001911 PARAMETER Experiment Name: At_Drought_Reproduction_P Parameter: Tissue Value: Flowers
  misc_feature: MA Experiment 20001911 PARAMETER Experiment Name: At_Drought_Reproduction_P Parameter: Treatment Value: Drought vs. No Drought
gtgattcaaagttttgatttttagctaccaatctatgagtgagtgactgagaaacagagaaggattccaagctgctaaagattttttgtcaagatttttaatttaagtttcctggaggaggagatcacagatcttcttttcatatgaagagatctttccttctcttgtatgtgctcctggtacaggccttctatggggcttggtgtagtgttggagaaagcctgcattgtgaatattccaatttagcgagtcttcaccggcctcacagcgtatcgattacagagtttggagcggttggagatggtgtgactctaaacactaaagcctttcagaatgctctgttctacctcaattctttctctgataaaggcggggccaagctttttgttcccgctggtcagtggcttaccgggagtttcgaccttatcagtcacctcaccttatggctagataaaggtgcaacgattctcgggtcaacgagctcagagaattggcccgtggttgatccattaccatcatatggacgaggaagagaattgcccggtagaagacacagaagtcttatatatggtcagaatctcacagatgtagtcataacaggcgagaacgggacaattgatggtcaaggaactgtatggtgggattggtttagaaatggagagcttaactatacaagacctcatcttgttgagctcatgaactctactggtctgatcatctccaacctcacattcttgaattcaccgttttggaacattcatcctgtttattgcagagatgttgttgtaaagaatctcacaattttggctcctcttgaatctccaaatacagatggagttgatccagattcatcaactaatgtttgcatagaggattgttacatagttaccggggatgatttggtatcgataaaaagcggatgggatgagtatggaatatcctacgcaagaccgagctccaagatcaagattaatcggttaacaggtcaaactacttcaagctcaggaatagcaataggaagtgaaatgtcgggaggtgtatccgaaatatacattaaagacttacatttgttcaattcgaatactggaatcagaatcaagacttctgctggaagaggcgggtatgttagaaacgttcacatcttgaacgtgaagctcgataatgtaaagaaagcgattaggttcaccggtaagtacggtgaacatcctgatgagaaatacgatcccaaagcactcccagctatagagaaaatcacctttgagaatgtaaatggcgatggaataggtgttgcgggtcttcttgaaggtatagaaggagatgtgtttaagaatatatgtttccttaatgttactcttagagtgaagaagaattcgaagaaatcaccatgggaatgctcgaatgtgagaggttattcacagtgggtttcgccggaaattacttgtgattctttgaaagagagtatattcccggaacatggatctgattgtttcgggttatcggaaaataatatggagatatcaagtggtttaagtagatcaccatggttactttcttggtaagttactgtgaagttttgaacatcaaaggggaaacacagtttgcttgattctgaagaaacctcttcgattttgaaaaatgatgctttctttcatcttttgttgttttcgtgtaaatttgtgtgcagtgaggaaaataatcagagtggcttaagagtttttgtttttgttttccttgtatgggctttaatgcttttggtgagcggaacaattgtaatatctccgacagagtctgttgaaattttttgacaattatttttc

SEQ ID NO: 49399 - protein, 471 aa, Arabidopsis thaliana
  peptide (1)..(471): Ceres Seq. ID no. 13648293
  misc_feature (75)..(430): Pfam Name: Glycosyl hydrolases family 28 Pfam Description: Glycosyl hydrolases family 28
  misc_feature (6)..(437): Homolog of NCBI NO: 15236625 NR Description: polygalacturonase, putative [Arabidopsis
  misc_feature (24)..(449): Homolog of NCBI NO: 21553827 NR Description: polygalacturonase, putative [Arabidopsis thaliana]
  misc_feature (24)..(449): Homolog of NCBI NO: 15228881 NR Description: polygalacturonase, putative [Arabidopsis
  misc_feature (24)..(449): Homolog of NCBI NO: 7939578 NR Description: polygalacturonase-like protein [Arabidopsis
  misc_feature (30)..(438): Homolog of NCBI NO: 15236514 NR Description: polygalacturonase, putative [Arabidopsis
  misc_feature (43)..(436): Homolog of NCBI NO: 22329119 NR Description: polygalacturonase, putative [Arabidopsis
  misc_feature (74)..(449): Homolog of NCBI NO: 34393209 NR Description: putative polygalacturonase
  misc_feature (1)..(437): Homolog of NCBI NO: 40714685 NR Description: putative polygalacturonase
  misc_feature (1)..(471): Homolog of NCBI NO: 11263971 NR Description: hypothetical protein T17J13.70 - Arabidopsis
  misc_feature (1)..(471): Homolog of NCBI NO: 18412253 NR Description: polygalacturonase, putative [Arabidopsis
MKRSFLLLYVLLVQAFYGAWCSVGESLHCEYSNLASLHRPHSVSITEFGAVGDGVTLNTKAFQNALFYLNSFSDKGGAKLFVPAGQWLTGSFDLISHLTLWLDKGATILGSTSSENWPVVDPLPSYGRGRELPGRRHRSLIYGQNLTDVVITGENGTIDGQGTVWWDWFRNGELNYTRPHLVELMNSTGLIISNLTFLNSPFWNIHPVYCRDVVVKNLTILAPLESPNTDGVDPDSSTNVCIEDCYIVTGDDLVSIKSGWDEYGISYARPSSKIKINRLTGQTTSSSGIAIGSEMSGGVSEIYIKDLHLFNSNTGIRIKTSAGRGGYVRNVHILNVKLDNVKKAIRFTGKYGEHPDEKYDPKALPAIEKITFENVNGDGIGVAGLLEGIEGDVFKNICFLNVTLRVKKNSKKSPWECSNVRGYSQWVSPEITCDSLKESIFPEHGSDCFGLSENNMEISSGLSRSPWLLSW

SEQ ID NO: 49400 - protein, 287 aa, Arabidopsis thaliana
  peptide (1)..(287): Ceres Seq. ID no. 13648294
  misc_feature (1)..(246): Pfam Name: Glycosyl hydrolases family 28 Pfam Description: Glycosyl hydrolases family 28
  misc_feature (1)..(253): Homolog of NCBI NO: 15236625 NR Description: polygalacturonase, putative [Arabidopsis
  misc_feature (1)..(265): Homolog of NCBI NO: 21553827 NR Description: polygalacturonase, putative [Arabidopsis thaliana]
  misc_feature (1)..(265): Homolog of NCBI NO: 15228881 NR Description: polygalacturonase, putative [Arabidopsis
  misc_feature (1)..(265): Homolog of NCBI NO: 7939578 NR Description: polygalacturonase-like protein [Arabidopsis
  misc_feature (1)..(254): Homolog of NCBI NO: 15236514 NR Description: polygalacturonase, putative [Arabidopsis
  misc_feature (1)..(252): Homolog of NCBI NO: 22329119 NR Description: polygalacturonase, putative [Arabidopsis
  misc_feature (1)..(265): Homolog of NCBI NO: 34393209 NR Description: putative polygalacturonase
  misc_feature (1)..(253): Homolog of NCBI NO: 40714685 NR Description: putative polygalacturonase
  misc_feature (1)..(287): Homolog of NCBI NO: 11263971 NR Description: hypothetical protein T17J13.70 - Arabidopsis
  misc_feature (1)..(287): Homolog of NCBI NO: 18412253 NR Description: polygalacturonase, putative [Arabidopsis
MNSTGLIISNLTFLNSPFWNIHPVYCRDVVVKNLTILAPLESPNTDGVDPDSSTNVCIEDCYIVTGDDLVSIKSGWDEYGISYARPSSKIKINRLTGQTTSSSGIAIGSEMSGGVSEIYIKDLHLFNSNTGIRIKTSAGRGGYVRNVHILNVKLDNVKKAIRFTGKYGEHPDEKYDPKALPAIEKITFENVNGDGIGVAGLLEGIEGDVFKNICFLNVTLRVKKNSKKSPWECSNVRGYSQWVSPEITCDSLKESIFPEHGSDCFGLSENNMEISSGLSRSPWLLSW

SEQ ID NO: 49401 - DNA, 2416 bp, Arabidopsis thaliana
  misc_feature (1)..(2416): Ceres Seq. ID no. 12560030
  misc_feature: MA Experiment ID: 20001905 Result: Down-regulated in Transcription
  misc_feature: MA Experiment 20001905 PARAMETER Experiment Name: At_Drought_Reproduction_P Parameter: Age (day) Value: 40
  misc_feature: MA Experiment 20001905 PARAMETER Experiment Name: At_Drought_Reproduction_P Parameter: Organism Value: A. thaliana
  misc_feature: MA Experiment 20001905 PARAMETER Experiment Name: At_Drought_Reproduction_P Parameter: Plant Line Value: WS
  misc_feature: MA Experiment 20001905 PARAMETER Experiment Name: At_Drought_Reproduction_P Parameter: Timepoint (day) Value: 10
  misc_feature: MA Experiment 20001905 PARAMETER Experiment Name: At_Drought_Reproduction_P Parameter: Tissue Value: Rosettes
  misc_feature: MA Experiment 20001905 PARAMETER Experiment Name: At_Drought_Reproduction_P Parameter: Treatment Value: Drought vs. No Drought
ggagcctgtctgtgtaatgaaaatccacttgacgacctaaacaacaacaacgactccggcgagtgtatgtatctttcactttctcactaaccaaccagacgacaaaagaaaattattcatcttagctaagctcgattagtttctggcggaaacggttttgtggataattgttagcatattccgatcttgccctcccccgagagagagaggccaatcaatcaatcaatcaatcatctcttacgaagctacgtgtgacctaacattctccagattgttgtttatagcctcttcttagatttacgatttgtgagcttgtgaagatttcttggtagaattagagttctctgtttcgagatcgagatgaataataataataataatagaggaagatttccaccggggattggtgcggcgggtcctggtccggatcctaattttcagtcacggaatccgaatccacctcagcctcaacagtaccttcagtcacggactccgtttccacagcaacctcagcctcagcctcctcagtatctccagtctcaatctgatgctcagcagtacgttcagcgaggttatccccagcagattcaacagcaacagcaactgcagcagcaacaacaacaacaacagcagcagcaagaacaacaatggtctcgacgggctcagcttcctggtgatccaagttacatagatgaggtcgaaaaaacggttcaatctgaagctattagcgattctaataatgaagactggaaagcaaccttaaagctgccaccacgagataatcgttaccagacagaggatgtgactgccactaaaggaaatgaatttgaagattactttttgaagagggatctgcttaggggaatatatgagaagggttttgaaaaaccatctcctattcaggaagaaagcattcccattgctttgactggtagtgatattcttgctagagccaaaaatggtactgggaagactggtgccttctgcattcctacccttgagaaaattgatccagagaacaatgtcattcaagccgtaattctagttccaacccgagagctcgcccttcagacatcccaggtttgcaaggagctttccaaatatttgaaaattgaggttatggtcaccactggcggtaccagtctgagggatgatatcatgcgattgtatcaacctgtccatttactggttggaactcctggaagaatattagatcttgccaaaaagggtgtgtgtgttttgaaagattgtgccatgcttgtaatggatgaggccgacaagcttttgtctgtagaatttcaaccttctatagaggagttgatacagttcttgccagagagccggcagattttgatgttttcagctacatttcctgtcactgtgaagtctttcaaggatcggtatctcaagaagccttacattatcaatctcatggatcagctcacacttatgggtgttacccaatattatgcttttgttgaagagagacagaaggtgcactgccttaacacgctattctctaagctccaaataaaccaatccattatcttttgcaactctgttaatcgtgttgagctgttggccaagaaaattacagaacttggttactcatgcttctatatccatgcaaagatggttcaagaccatcggaacagggttttccatgatttccgcaatggtgcatgcagaaatcttgtttgcactgatttgtttacacgtgggattgacattcaagctgtgaatgtggtgataaatttcgattttcctaggacttctgagtcgtatctacatagggtaggcagatcaggacgatttggacaccttgggttggctgtgaatttggtaacttatgaggaccgcttcaaaatgtatcagacagagcaagaacttggaactgaaatcaagcccataccttcacttatcgacaaggcaatctactgtcagtaacttctacctggtgtacattctctacccggcaaggcattgatggactaaccggtgtagtgaggaggcaaatcattcagctttggcagccactagctcgttctagagatgaaggcaacacatagagtactgtactgaggcaagaagagacagtataggtggttgatggcgatggaagcggttgattgtgtctaaacctttaaagcagtaccggcttgatttggtttgaattgaagacttcttctgctgcatgatatgaaccttaaagttgtcttctctcatctctaattttcatgttcttagaaaccttttcaccttttcattttgatgttctctcatcttgaagacttgagaggaatttccgagtagtgagatcaaaccgaagaagacattttaacttcattcgcttgtttattgcttttagatctccacctgtgcctgaactgtttaaggattatagttggtgtgtgtc

SEQ ID NO: 49402 - protein, 528 aa, Arabidopsis thaliana
  peptide (1)..(528): Ceres Seq. ID no. 12560031
  misc_feature (167)..(369): Pfam Name: DEAD/DEAH box helicase Pfam Description: DEAD/DEAH box helicase
  misc_feature (127)..(526): Homolog of NCBI NO: 23488233 NR Description: ATP-dependent RNA Helicase [Plasmodium yoelii
  misc_feature (125)..(526): Homolog of NCBI NO: 12644168 NR Description: Putative ATP-dependent RNA helicase me31b
  misc_feature (50)..(528): Homolog of NCBI NO: 22758337 NR Description: putative RNA helicase [Oryza sativa (japonica
  misc_feature (36)..(528): Homolog of NCBI NO: 7436453 NR Description: probable RNA helicase (EC 3.6.1.-) F6N23.6 -
  misc_feature (16)..(528): Homolog of NCBI NO: 11267537 NR Description: RNA helicase RH8 [imported] - Arabidopsis
  misc_feature (16)..(528): Homolog of NCBI NO: 22328183 NR Description: DEAD/DEAH box RNA helicase, putative
  misc_feature (33)..(528): Homolog of NCBI NO: 11267538 NR Description: RNA helicase RH12 [imported] - Arabidopsis
  misc_feature (33)..(528): Homolog of NCBI NO: 15233064 NR Description: DEAD/DEAH box RNA helicase, putative; protein id:
  misc_feature (1)..(528): Homolog of NCBI NO: 14532476 NR Description: At2g45810/F4I18.21 [Arabidopsis thaliana]
  misc_feature (1)..(528): Homolog of NCBI NO: 15225898 NR Description: DEAD/DEAH box RNA helicase, putative
MNNNNNNRGRFPPGIGAAGPGPDPNFQSRNPNPPQPQQYLQSRTPFPQQPQPQPPQYLQSQSDAQQYVQRGYPQQIQQQQQLQQQQQQQQQQQEQQWSRRAQLPGDPSYIDEVEKTVQSEAISDSNNEDWKATLKLPPRDNRYQTEDVTATKGNEFEDYFLKRDLLRGIYEKGFEKPSPIQEESIPIALTGSDILARAKNGTGKTGAFCIPTLEKIDPENNVIQAVILVPTRELALQTSQVCKELSKYLKIEVMVTTGGTSLRDDIMRLYQPVHLLVGTPGRILDLAKKGVCVLKDCAMLVMDEADKLLSVEFQPSIEELIQFLPESRQILMFSATFPVTVKSFKDRYLKKPYIINLMDQLTLMGVTQYYAFVEERQKVHCLNTLFSKLQINQSIIFCNSVNRVELLAKKITELGYSCFYIHAKMVQDHRNRVFHDFRNGACRNLVCTDLFTRGIDIQAVNVVINFDFPRTSESYLHRVGRSGRFGHLGLAVNLVTYEDRFKMYQTEQELGTEIKPIPSLIDKAIYCQ

SEQ ID NO: 49403 - protein, 275 aa, Arabidopsis thaliana
  peptide (1)..(275): Ceres Seq. ID no. 12560032
  misc_feature (1)..(116): Pfam Name: DEAD/DEAH box helicase Pfam Description: DEAD/DEAH box helicase
  misc_feature (1)..(273): Homolog of NCBI NO: 23488233 NR Description: ATP-dependent RNA Helicase [Plasmodium yoelii
  misc_feature (1)..(273): Homolog of NCBI NO: 12644168 NR Description: Putative ATP-dependent RNA helicase me31b
  misc_feature (1)..(275): Homolog of NCBI NO: 22758337 NR Description: putative RNA helicase [Oryza sativa (japonica
  misc_feature (1)..(275): Homolog of NCBI NO: 7436453 NR Description: probable RNA helicase (EC 3.6.1.-) F6N23.6 -
  misc_feature (1)..(275): Homolog of NCBI NO: 11267537 NR Description: RNA helicase RH8 [imported] - Arabidopsis
  misc_feature (1)..(275): Homolog of NCBI NO: 22328183 NR Description: DEAD/DEAH box RNA helicase, putative
  misc_feature (1)..(275): Homolog of NCBI NO: 11267538 NR Description: RNA helicase RH12 [imported] - Arabidopsis
  misc_feature (1)..(275): Homolog of NCBI NO: 15233064 NR Description: DEAD/DEAH box RNA helicase, putative; protein id:
  misc_feature (1)..(275): Homolog of NCBI NO: 14532476 NR Description: At2g45810/F4I18.21 [Arabidopsis thaliana]
  misc_feature (1)..(275): Homolog of NCBI NO: 15225898 NR Description: DEAD/DEAH box RNA helicase, putative
MVTTGGTSLRDDIMRLYQPVHLLVGTPGRILDLAKKGVCVLKDCAMLVMDEADKLLSVEFQPSIEELIQFLPESRQILMFSATFPVTVKSFKDRYLKKPYIINLMDQLTLMGVTQYYAFVEERQKVHCLNTLFSKLQINQSIIFCNSVNRVELLAKKITELGYSCFYIHAKMVQDHRNRVFHDFRNGACRNLVCTDLFTRGIDIQAVNVVINFDFPRTSESYLHRVGRSGRFGHLGLAVNLVTYEDRFKMYQTEQELGTEIKPIPSLIDKAIYCQ

SEQ ID NO: 49404 - DNA, 827 bp, Arabidopsis thaliana
  misc_feature (1)..(827): Ceres Seq. ID no. 13648275
  misc_feature: MA Experiment ID: 20000315 Result: Down-regulated in Transcription
  misc_feature: MA Experiment 20000315 PARAMETER Experiment Name: At_14day_Shoots-Roots_Sub_P Parameter: Age (day) Value: 14
  misc_feature: MA Experiment 20000315 PARAMETER Experiment Name: At_14day_Shoots-Roots_Sub_P Parameter: Organism Value: A. thaliana
  misc_feature: MA Experiment 20000315 PARAMETER Experiment Name: At_14day_Shoots-Roots_Sub_P Parameter: Plant Line Value: WS
  misc_feature: MA Experiment 20000315 PARAMETER Experiment Name: At_14day_Shoots-Roots_Sub_P Parameter: Tissue Value: Shoots vs. Whole Plant
  misc_feature: MA Experiment ID: 20000327 Result: Up-regulated in Transcription
  misc_feature: MA Experiment 20000327 PARAMETER Experiment Name: At_42deg_Heat_Sub_P Parameter: Age (day) Value: 14
  misc_feature: MA Experiment 20000327 PARAMETER Experiment Name: At_42deg_Heat_Sub_P Parameter: Organism Value: A. thaliana
  misc_feature: MA Experiment 20000327 PARAMETER Experiment Name: At_42deg_Heat_Sub_P Parameter: Plant Line Value: WS
  misc_feature: MA Experiment 20000327 PARAMETER Experiment Name: At_42deg_Heat_Sub_P Parameter: Temperature (deg C) Value: 42 vs. 22
  misc_feature: MA Experiment 20000327 PARAMETER Experiment Name: At_42deg_Heat_Sub_P Parameter: Timepoint (hr) Value: 1
  misc_feature: MA Experiment 20000327 PARAMETER Experiment Name: At_42deg_Heat_Sub_P Parameter: Tissue Value: Aerial
  misc_feature: MA Experiment ID: 20000328 Result: Up-regulated in Transcription
  misc_feature: MA Experiment 20000328 PARAMETER Experiment Name: At_42deg_Heat_Sub_P Parameter: Age (day) Value: 14
  misc_feature: MA Experiment 20000328 PARAMETER Experiment Name: At_42deg_Heat_Sub_P Parameter: Organism Value: A. thaliana
  misc_feature: MA Experiment 20000328 PARAMETER Experiment Name: At_42deg_Heat_Sub_P Parameter: Plant Line Value: WS
  misc_feature: MA Experiment 20000328 PARAMETER Experiment Name: At_42deg_Heat_Sub_P Parameter: Temperature (deg C) Value: 42 vs. 22
  misc_feature: MA Experiment 20000328 PARAMETER Experiment Name: At_42deg_Heat_Sub_P Parameter: Timepoint (hr) Value: 6
  misc_feature: MA Experiment 20000328 PARAMETER Experiment Name: At_42deg_Heat_Sub_P Parameter: Tissue Value: Aerial
  misc_feature: MA Experiment ID: 20000347 Result: Up-regulated in Transcription
  misc_feature: MA Experiment 20000347 PARAMETER Experiment Name: At_2mM_SA_Sub_P Parameter: Age (day) Value: 14
  misc_feature: MA Experiment 20000347 PARAMETER Experiment Name: At_2mM_SA_Sub_P Parameter: Organism Value: A. thaliana
  misc_feature: MA Experiment 20000347 PARAMETER Experiment Name: At_2mM_SA_Sub_P Parameter: Plant Line Value: WS
  misc_feature: MA Experiment 20000347 PARAMETER Experiment Name: At_2mM_SA_Sub_P Parameter: Timepoint (hr) Value: 6
  misc_feature: MA Experiment 20000347 PARAMETER Experiment Name: At_2mM_SA_Sub_P Parameter: Tissue Value: Aerial
  misc_feature: MA Experiment 20000347 PARAMETER Experiment Name: At_2mM_SA_Sub_P Parameter: Treatment Value: 2mM SA vs. No Treatment
  misc_feature: MA Experiment ID: 20000348 Result: Up-regulated in Transcription
  misc_feature: MA Experiment 20000348 PARAMETER Experiment Name: At_100uM_ABA_Sub_P Parameter: Age (day) Value: 14
  misc_feature: MA Experiment 20000348 PARAMETER Experiment Name: At_100uM_ABA_Sub_P Parameter: Organism Value: A. thaliana
  misc_feature: MA Experiment 20000348 PARAMETER Experiment Name: At_100uM_ABA_Sub_P Parameter: Plant Line Value: WS
  misc_feature: MA Experiment 20000348 PARAMETER Experiment Name: At_100uM_ABA_Sub_P Parameter: Timepoint (hr) Value: 1
  misc_feature: MA Experiment 20000348 PARAMETER Experiment Name: At_100uM_ABA_Sub_P Parameter: Tissue Value: Aerial
  misc_feature: MA Experiment 20000348 PARAMETER Experiment Name: At_100uM_ABA_Sub_P Parameter: Treatment Value: 100uM ABA vs. No Treatment
  misc_feature: MA Experiment ID: 20000440 Result: Up-regulated in Transcription
  misc_feature: MA Experiment 20000440 PARAMETER Experiment Name: At_Closed-Flower__Sub_P Parameter: Tissue Value: Closed Flower vs. Whole Plant
ctagtccccccccccccccgaattccccgagagtaaccaacaacacaaagcgatcaaagaacttttcccgctagagagagagagaagaagaagaagaagaagaagaaaagttacgcagagagactgaaggaagagtgatcgatcggagaaagatggcgatggaagtagcaacaccggctccggcaccaatcccatcggagaggaacatcgttctcgcgcctgcaacaacaacaacaaccgccactgttgagactcacaagaagaacaggatccaagtttccaacaccaagaagccattgttcttctacgttaatctcgccaagaggtacattcagcaacacaacgaggtcgagctttctgcacttggaatggcaatcacaactgtggtaacaatctctgagatcttgaagaacaatggacttgcaacagagaagaaggtgctaacatcgactgtgggaatgaaagatgagacaaaagggaagatggtccagaaggcaaagattgagatagtgttgggcaagtcagacaagtttgactctttggtgccacctgtgaccaacggcaagactccggaggaggaagccagtgcagagacggaagcttccgtggaagcacaagaagaagttgccgctgccaccgaggtctaggttggagccggttgagagatttactgcagaaggactgatttctcttttactatgttttgttggcttttgtttcgtttgtgacatatcgaacataatactctagatatgatagtaattgtttgtttagcaaaaaaaaaaaagaaaaaaaaaaaaaaaaaaactcgagggggggcccggtac

SEQ ID NO: 49405 - protein, 164 aa, Arabidopsis thaliana
  peptide (1)..(164): Ceres Seq. ID no. 13648276
  misc_feature (40)..(157): Homolog of NCBI NO: 15029401 NR Description: unknown [Leishmania infantum]
  misc_feature (40)..(157): Homolog of NCBI NO: 8745040 NR Description: conserved hypothetical protein L6293.01
  misc_feature (38)..(150): Homolog of NCBI NO: 34910240 NR Description: OSJNBa0089K24.4 [Oryza sativa (japonica
  misc_feature (33)..(149): Homolog of NCBI NO: 18403464 NR Description: expressed protein [Arabidopsis thaliana]
  misc_feature (32)..(142): Homolog of NCBI NO: 18397011 NR Description: expressed protein [Arabidopsis thaliana]
  misc_feature (1)..(164): Homolog of NCBI NO: 15229322 NR Description: expressed protein [Arabidopsis thaliana]
MAMEVATPAPAPIPSERNIVLAPATTTTTATVETHKKNRIQVSNTKKPLFFYVNLAKRYIQQHNEVELSALGMAITTVVTISEILKNNGLATEKKVLTSTVGMKDETKGKMVQKAKIEIVLGKSDKFDSLVPPVTNGKTPEEEASAETEASVEAQEEVAAATEV

SEQ ID NO: 49406 - protein, 162 aa, Arabidopsis thaliana
  peptide (1)..(162): Ceres Seq. ID no. 13648277
  misc_feature (38)..(155): Homolog of NCBI NO: 15029401 NR Description: unknown [Leishmania infantum]
  misc_feature (38)..(155): Homolog of NCBI NO: 8745040 NR Description: conserved hypothetical protein L6293.01
  misc_feature (36)..(148): Homolog of NCBI NO: 34910240 NR Description: OSJNBa0089K24.4 [Oryza sativa (japonica
  misc_feature (31)..(147): Homolog of NCBI NO: 18403464 NR Description: expressed protein [Arabidopsis thaliana]
  misc_feature (30)..(140): Homolog of NCBI NO: 18397011 NR Description: expressed protein [Arabidopsis thaliana]
  misc_feature (1)..(162): Homolog of NCBI NO: 15229322 NR Description: expressed protein [Arabidopsis thaliana]
MEVATPAPAPIPSERNIVLAPATTTTTATVETHKKNRIQVSNTKKPLFFYVNLAKRYIQQHNEVELSALGMAITTVVTISEILKNNGLATEKKVLTSTVGMKDETKGKMVQKAKIEIVLGKSDKFDSLVPPVTNGKTPEEEASAETEASVEAQEEVAAATEV

SEQ ID NO: 49407 - protein, 92 aa, Arabidopsis thaliana
  peptide (1)..(92): Ceres Seq. ID no. 13648278
  misc_feature (1)..(85): Homolog of NCBI NO: 15029401 NR Description: unknown [Leishmania infantum]
  misc_feature (1)..(85): Homolog of NCBI NO: 8745040 NR Description: conserved hypothetical protein L6293.01
  misc_feature (1)..(78): Homolog of NCBI NO: 34910240 NR Description: OSJNBa0089K24.4 [Oryza sativa (japonica
  misc_feature (1)..(77): Homolog of NCBI NO: 18403464 NR Description: expressed protein [Arabidopsis thaliana]
  misc_feature (1)..(70): Homolog of NCBI NO: 18397011 NR Description: expressed protein [Arabidopsis thaliana]
  misc_feature (1)..(92): Homolog of NCBI NO: 15229322 NR Description: expressed protein [Arabidopsis thaliana]
MAITTVVTISEILKNNGLATEKKVLTSTVGMKDETKGKMVQKAKIEIVLGKSDKFDSLVPPVTNGKTPEEEASAETEASVEAQEEVAAATEV

SEQ ID NO: 49408 - DNA, 1621 bp, Arabidopsis thaliana
  misc_feature (1)..(1621): Ceres Seq. ID no. 13648468
  misc_feature: MA Experiment ID: 20000495 Result: Up-regulated in Transcription
  misc_feature: MA Experiment 20000495 PARAMETER Experiment Name: At_Guard_Cells_P Parameter: Harvest Date Value: 8/2/2002
  misc_feature: MA Experiment 20000495 PARAMETER Experiment Name: At_Guard_Cells_P Parameter: Organism Value: A. thaliana
  misc_feature: MA Experiment 20000495 PARAMETER Experiment Name: At_Guard_Cells_P Parameter: Tissue Value: Guard Cells vs. Leaves
ccactttaccctcttctctctctctgtctctctttctttttccgtaactcttcatcttcttttcccagatttttccgttttccaattctctgtgtctaattccaaacttcctaggggttttttctccaacgtgagaaaaaagcttctagctttagcgatgggatgtttcggacgcactccgaaatcgaacaaacgatcagataccaaaaccacgaagaacaacgatttcaccccaaaaaaactcaccgtcaatgcaaatcgagataagctgacacaacccagctcagattgtttaaaagttagtatatgtggagatgtaagcaaggagatagttactaagaaggatcaattagctttggatgctaaagatactaatgttgaagatgaagttatagggaagaaagcacagacttttacatttgaagaactctctgtttctactggaaactttaagtcggattgttttctaggagaaggaggttttggaaaagtttacaaaggtttcattgagaaaatcaatcaggttgttgcaattaagcaacttgatcggaatggtgctcaaggaatcagggagtttgttgttgaagtgttgacattaagtctcgctgatcatccaaatctcgtcaagcttataggattttgcgctgagggtgttcagagactgttggtttacgagtatatgcctctaggatctctggataatcaccttcatgatcttccttctggtaaaaacccgcttgcttggaacactcgaatgaaaatagcggctggtgcagcaagaggactagagtatctccacgatacaatgaaacctcctgtgatataccgtgatcttaagtgttcgaatatcttgatcgatgaaggatatcacgcaaaactctcagactttggattagctaaagtaggaccaagaggaagtgaaactcatgtttccacaagagttatgggaacatacggttactgtgctcctgattacgcattaactggacaactcacattcaaatcagatgtatacagtttcggagttgttcttttggagcttattactggaaggaaagcttacgataacacgagaacacgtaatcaccagagtcttgttgaatgggcaaatcccttgtttaaagataggaagaatttcaagaaaatggttgatccgttactcgaaggagattatccggttagaggattgtatcaagcacttgcaatagctgcaatgtgtgttcaagaacagcctagtatgagaccggtgatagctgatgtagtaatggctttggatcacttagcttcttctaaatatgatcgtagtcaccgtcaaaagcaggataatgtgaccgagactaaagtcgatgaagagaaaacacttaccacagaatctaatgtttgtgtggaggagaaacaagagatcaagatatgctcagatcaagcaacttaatcatcaatgaggattcttaaaattttgatattttcttgatttgtagaatgcttcgtttacgtaagcaacagttttgttcgaatttcgactcatacttatatagtaaactgtagcaaaagttcggttannnaaaaaaaaaaaaaaaaaaagaaaaaaaaaaaaaaaaaaactcgagggggggcccggtac

SEQ ID NO: 49409 - protein, 476 aa, Arabidopsis thaliana
  peptide (1)..(476): Ceres Seq. ID no. 15220534
  misc_feature (135)..(433): Homolog of NCBI NO: 34907210 NR Description: putative serine/threonine kinase PBS1 protein
  misc_feature (135)..(433): Homolog of NCBI NO: 15238886 NR Description: protein kinase family [Arabidopsis thaliana]
  misc_feature (135)..(433): Homolog of NCBI NO: 10445209 NR Description: protein serine/threonine kinase BNK1 [Brassica
  misc_feature (86)..(433): Homolog of NCBI NO: 30679773 NR Description: protein kinase family [Arabidopsis thaliana]
  misc_feature (86)..(433): Homolog of NCBI NO: 11259782 NR Description: protein kinase-like - Arabidopsis thaliana
  misc_feature (135)..(433): Homolog of NCBI NO: 34394036 NR Description: putative protein serine/threonine kinase BNK1
  misc_feature (55)..(433): Homolog of NCBI NO: 7573598 NR Description: protein kinase 2 [Populus nigra]
  misc_feature (53)..(442): Homolog of NCBI NO: 7573596 NR Description: protein kinase 1 [Populus nigra]
  misc_feature (53)..(452): Homolog of NCBI NO: 15223024 NR Description: protein kinase family [Arabidopsis thaliana]
  misc_feature (53)..(476): Homolog of NCBI NO: 15226901 NR Description: protein kinase family [Arabidopsis thaliana]
HFTLFSLSVSLSFSVTLHLLFPDFSVFQFSVSNSKLPRGFFSNVRKKLLALAMGCFGRTPKSNKRSDTKTTKNNDFTPKKLTVNANRDKLTQPSSDCLKVSICGDVSKEIVTKKDQLALDAKDTNVEDEVIGKKAQTFTFEELSVSTGNFKSDCFLGEGGFGKVYKGFIEKINQVVAIKQLDRNGAQGIREFVVEVLTLSLADHPNLVKLIGFCAEGVQRLLVYEYMPLGSLDNHLHDLPSGKNPLAWNTRMKIAAGAARGLEYLHDTMKPPVIYRDLKCSNILIDEGYHAKLSDFGLAKVGPRGSETHVSTRVMGTYGYCAPDYALTGQLTFKSDVYSFGVVLLELITGRKAYDNTRTRNHQSLVEWANPLFKDRKNFKKMVDPLLEGDYPVRGLYQALAIAAMCVQEQPSMRPVIADVVMALDHLASSKYDRSHRQKQDNVTETKVDEEKTLTTESNVCVEEKQEIKICSDQAT

SEQ ID NO: 49410 - protein, 424 aa, Arabidopsis thaliana
  peptide (1)..(424): Ceres Seq. ID no. 15220535
  misc_feature (83)..(381): Homolog of NCBI NO: 34907210 NR Description: putative serine/threonine kinase PBS1 protein
  misc_feature (83)..(381): Homolog of NCBI NO: 15238886 NR Description: protein kinase family [Arabidopsis thaliana]
  misc_feature (83)..(381): Homolog of NCBI NO: 10445209 NR Description: protein serine/threonine kinase BNK1 [Brassica
  misc_feature (34)..(381): Homolog of NCBI NO: 30679773 NR Description: protein kinase family [Arabidopsis thaliana]
  misc_feature (34)..(381): Homolog of NCBI NO: 11259782 NR Description: protein kinase-like - Arabidopsis thaliana
  misc_feature (83)..(381): Homolog of NCBI NO: 34394036 NR Description: putative protein serine/threonine kinase BNK1
  misc_feature (3)..(381): Homolog of NCBI NO: 7573598 NR Description: protein kinase 2 [Populus nigra]
  misc_feature (1)..(390): Homolog of NCBI NO: 7573596 NR Description: protein kinase 1 [Populus nigra]
  misc_feature (1)..(400): Homolog of NCBI NO: 15223024 NR Description: protein kinase family [Arabidopsis thaliana]
  misc_feature (1)..(424): Homolog of NCBI NO: 15226901 NR Description: protein kinase family [Arabidopsis thaliana]
MGCFGRTPKSNKRSDTKTTKNNDFTPKKLTVNANRDKLTQPSSDCLKVSICGDVSKEIVTKKDQLALDAKDTNVEDEVIGKKAQTFTFEELSVSTGNFKSDCFLGEGGFGKVYKGFIEKINQVVAIKQLDRNGAQGIREFVVEVLTLSLADHPNLVKLIGFCAEGVQRLLVYEYMPLGSLDNHLHDLPSGKNPLAWNTRMKIAAGAARGLEYLHDTMKPPVIYRDLKCSNILIDEGYHAKLSDFGLAKVGPRGSETHVSTRVMGTYGYCAPDYALTGQLTFKSDVYSFGVVLLELITGRKAYDNTRTRNHQSLVEWANPLFKDRKNFKKMVDPLLEGDYPVRGLYQALAIAAMCVQEQPSMRPVIADVVMALDHLASSKYDRSHRQKQDNVTETKVDEEKTLTTESNVCVEEKQEIKICSDQAT

SEQ ID NO: 49411 - protein, 250 aa, Arabidopsis thaliana
  peptide (1)..(250): Ceres Seq. ID no. 15220536
  misc_feature (1)..(207): Homolog of NCBI NO: 34907210 NR Description: putative serine/threonine kinase PBS1 protein
  misc_feature (1)..(207): Homolog of NCBI NO: 15238886 NR Description: protein kinase family [Arabidopsis thaliana]
  misc_feature (1)..(207): Homolog of NCBI NO: 10445209 NR Description: protein serine/threonine kinase BNK1 [Brassica
  misc_feature (1)..(207): Homolog of NCBI NO: 30679773 NR Description: protein kinase family [Arabidopsis thaliana]
  misc_feature (1)..(207): Homolog of NCBI NO: 11259782 NR Description: protein kinase-like - Arabidopsis thaliana
  misc_feature (1)..(207): Homolog of NCBI NO: 34394036 NR Description: putative protein serine/threonine kinase BNK1
  misc_feature (1)..(207): Homolog of NCBI NO: 7573598 NR Description: protein kinase 2 [Populus nigra]
  misc_feature (1)..(216): Homolog of NCBI NO: 7573596 NR Description: protein kinase 1 [Populus nigra]
  misc_feature (1)..(226): Homolog of NCBI NO: 15223024 NR Description: protein kinase family [Arabidopsis thaliana]
  misc_feature (1)..(250): Homolog of NCBI NO: 15226901 NR Description: protein kinase family [Arabidopsis thaliana]
MPLGSLDNHLHDLPSGKNPLAWNTRMKIAAGAARGLEYLHDTMKPPVIYRDLKCSNILIDEGYHAKLSDFGLAKVGPRGSETHVSTRVMGTYGYCAPDYALTGQLTFKSDVYSFGVVLLELITGRKAYDNTRTRNHQSLVEWANPLFKDRKNFKKMVDPLLEGDYPVRGLYQALAIAAMCVQEQPSMRPVIADVVMALDHLASSKYDRSHRQKQDNVTETKVDEEKTLTTESNVCVEEKQEIKICSDQAT

SEQ ID NO: 49412 - DNA, 3828 bp, Arabidopsis thaliana
  misc_feature (1)..(3828): Ceres Seq. ID no. 13588600
  misc_feature: MA Experiment ID: 20000179 Result: Up-regulated in Transcription
  misc_feature: MA Experiment 20000179 PARAMETER Experiment Name: At_Germinating_Seeds_P Parameter: Age (hr) Value: 6 vs. 0
  misc_feature: MA Experiment 20000179 PARAMETER Experiment Name: At_Germinating_Seeds_P Parameter: Tissue Value: Germinating Seeds
gtaaagttgcgtttgtcttgttgaatcgcccgtcactaaaatcctctccgagaatcctcctccgatctgccactagctatggcggaatcgtctggtaccacgctaatggatctgatctcggcggatccaaccccggttcctgcacaatctacttcttcgtccgcatcttccacggcgtctcagccgacttctgcttccgcatcgtcttcttcccatctgcaccatccaatgtcgacgaagacgactctaggagagaagaaatcgaagagagccactttgatgcagatccaaaacgacactatatctgttgctaaagctgcactgaatcctgttaaggccaatatcatgccacaaaggcagagacagaaaaagaagccggtttcctattcgcaacttgcaaggagcattcatgaattagctgccactttggatcagaaaagttctcagaaacaactagtgaatcacgtgttccctaagcttgctgtgtacaactcagttgatccttctctggccccatctcttcttatgcttaatcagcaatgtgaagacaggaatgtgctacgatatgtttattattacctagctagaattttgtccgatacgggcatgactccagggggtggtatccccactcctaactgggatgctctagcagatattgatgctggtggaggagtcacaagagctgatgttgttcctcggatagtgaatcaacttacaaacgaagctacaaattctgaatttgaatttcatgctcgacgactgcaagctttgaaagctctgacatattcaccatcaggcaattctgagcttttgtcaaaattgtatgagattgtatttggcattcttgaaaaggttggtgatgttccgcataaacgaaagaaaggtgtatttgggacaaaagggggtgataaagagtcgattatgcgaagtaacttgcaatacgctgctatgagtgcactgagaagactccctcttgatccaggaaatccactttttctgcaccgtgcagctcagggtgttttctttgctgatcctgttgcggtgaggcattcactggaaattctatctgagttagccacaagagacccctatacagtagcaatgacattagaaaagcttgcgtctccaacaggggctttgcaagatatcctgcatatgaatgatgttcttgctagagtttctctggctaggttgtgccactcaatatctagagctcgggcattagatgagaggcctgatattaggtctcagttcaactcaattctctatcagctactcctagatccaagcgaaagggtatgctatgaggcgattttgtgcattctgggaaaacacgataacactgagaggatggatgagcgtgctgctgggtggtatcgcttgacgagagagatcctgaagctgccagaagcaccatccttgtcctccaaggataaatctaataaaaccaagcgtccacagccccttattaagcttgtaatgaggaggttagagagctcatttcgcagtttctcaagaccagtacttcatgcagcagcaagggttgtgcaagagatgggaaagagtagagcagcagcgtttgctatgggattacaggacattgatgaatccgttcatgtaaatgcattttctgatgctctagatgatgctgagaccaatgaaagttctcatccagaaggaattcggagaacatcatccatatctgcagggcctggtcgcagtgatacaattgcaagtttgctagctgcattaatggaggtggttcggacaacagtagcatgcgagtgcgtgtatgtccgggcaatggttatcaaagcattgatatggatgcaaagtccagatgaatcattggatgagttaaaatcaatcattgcctcggagctttcagatcctggttggcctgcagctctagtcaatgatgttttgcttactttgcatgcccgctttaaggcaactccagatatggctgttattcttctcgaaattgccagaatatttgccaccaaagttccagggaaaattgacgctgatgtcttacagctgctatggaagacatgtcttgttggagctggtcctgacgggaaacacacagctctggaagcagtcacgatagtactcgatctaccacctccacaaccggggtccatggctggactgacatcaattgatagggtctctgcatcagatcctaagtcagctctggcgctgcagaaattggtgcaagcagcagtatggttccttggagaaaatgcaaactacgccgcatcagaatatgcatgggaatctgcaactccaccaggcacagcacttatgatgttggatgcagataaaatggttgctgctgctagttctcgcaatcctactctagctggtgcattaactcgcctccagaggtgtgcatttagtggaagctgggaggtcagaattgttgcaattcaagctcttactacaatagccattagatctggtgaacctttcaggctgcagatatacgagtttttgtacaccttagcagagggtggtgtacagtctcaactttctgaaatgcacctgagtaatggggaagaccaaggagctagtggtacaggtcttggagttttaataacaccgatgttaaaagttcttgatgaaatgtatgttggacaagacgaattaatcaaggatatacgccatcacgataatgcaaacaaagaatggaaggacgaggagctgaaaaaactctacgaaaaccatgagaggctgctggattttgtttcattgttttgctttattcctagagccaagtatttaccactgggcccgataagcgcgaagctcattgacacataccgtacaaagcacaatatcactgcatctactgggtccaccgatccagctgttgttgctactgggatctcggacttaatctatgagtccactcagcctgcccccgctgcctcaaactccagtggtctggatgatgatttggtgaatgcttgggctgcaaaccttggtgatgatggtcttcttggaaacaatgccccagcaatgagtagggtcaatgaattcattgccggagtcggaacagatgcaccagatgttgaggaggagaatgtcttctctagaccttcggttgggtatgatgacatgtgggctaaaactcttttagaaacttcagaattggaggaagaagatgcgagatcaggttcatcgtctccagattctgctggatcagtggaaagctcaatatcctctcactttggtggaatgaactacccatcattgttcagttcaaagccttcctcacaagcaacggcaaaatcaggtggaagtaaataccagtccacatatgaaggctatggttccccaattagagaagagcctcctccgccttattcgtattctgagccacaaagtcgtgaatcgtttgagaaccctgtagcagggtctggttctcgaagttatgaatcagatgatgaagaacctaggaaatctactggtacaagatttggaacagcgctctatgacttcacagcaggaggagatgatgagctaaacttgacggcagaagaggaattggagatagagtatgaagttgatggctggttttacgtaaagaagaagcggcctggaagagatgggaagatggcgggacttgttcctgttctatacgtcaatcaatcttgaatttttggggaacggctttagacgtagaagccaacacactatggatatgttaagtggacttgcttagatgccaatagacattatgatccatgatttccttgaagaggtagtgtaaaatcagtgtacatgaaggaatgtatttgttggggtttgatgtgt

SEQ ID NO: 49413 - protein, 1196 aa, Arabidopsis thaliana
  peptide (1)..(1196): Ceres Seq. ID no. 13588601
  misc_feature (1137)..(1196): Pfam Name: SH3 domain Pfam Description: SH3 domain
  misc_feature (482)..(659): Homolog of NCBI NO: 15225713 NR Description: hypothetical protein [Arabidopsis thaliana]
  misc_feature (1)..(362): Homolog of NCBI NO: 15225713 NR Description: hypothetical protein [Arabidopsis thaliana]
  misc_feature (719)..(1196): Homolog of NCBI NO: 15225702 NR Description: SH3 domain-containing protein [Arabidopsis
MAESSGTTLMDLISADPTPVPAQSTSSSASSTASQPTSASASSSSHLHHPMSTKTTLGEKKSKRATLMQIQNDTISVAKAALNPVKANIMPQRQRQKKKPVSYSQLARSIHELAATLDQKSSQKQLVNHVFPKLAVYNSVDPSLAPSLLMLNQQCEDRNVLRYVYYYLARILSDTGMTPGGGIPTPNWDALADIDAGGGVTRADVVPRIVNQLTNEATNSEFEFHARRLQALKALTYSPSGNSELLSKLYEIVFGILEKVGDVPHKRKKGVFGTKGGDKESIMRSNLQYAAMSALRRLPLDPGNPLFLHRAAQGVFFADPVAVRHSLEILSELATRDPYTVAMTLEKLASPTGALQDILHMNDVLARVSLARLCHSISRARALDERPDIRSQFNSILYQLLLDPSERVCYEAILCILGKHDNTERMDERAAGWYRLTREILKLPEAPSLSSKDKSNKTKRPQPLIKLVMRRLESSFRSFSRPVLHAAARVVQEMGKSRAAAFAMGLQDIDESVHVNAFSDALDDAETNESSHPEGIRRTSSISAGPGRSDTIASLLAALMEVVRTTVACECVYVRAMVIKALIWMQSPDESLDELKSIIASELSDPGWPAALVNDVLLTLHARFKATPDMAVILLEIARIFATKVPGKIDADVLQLLWKTCLVGAGPDGKHTALEAVTIVLDLPPPQPGSMAGLTSIDRVSASDPKSALALQKLVQAAVWFLGENANYAASEYAWESATPPGTALMMLDADKMVAAASSRNPTLAGALTRLQRCAFSGSWEVRIVAIQALTTIAIRSGEPFRLQIYEFLYTLAEGGVQSQLSEMHLSNGEDQGASGTGLGVLITPMLKVLDEMYVGQDELIKDIRHHDNANKEWKDEELKKLYENHERLLDFVSLFCFIPRAKYLPLGPISAKLIDTYRTKHNITASTGSTDPAVVATGISDLIYESTQPAPAASNSSGLDDDLVNAWAANLGDDGLLGNNAPAMSRVNEFIAGVGTDAPDVEEENVFSRPSVGYDDMWAKTLLETSELEEEDARSGSSSPDSAGSVESSISSHFGGMNYPSLFSSKPSSQATAKSGGSKYQSTYEGYGSPIREEPPPPYSYSEPQSRESFENPVAGSGSRSYESDDEEPRKSTGTRFGTALYDFTAGGDDELNLTAEEELEIEYEVDGWFYVKKKRPGRDGKMAGLVPVLYVNQS

SEQ ID NO: 49414 - protein, 1187 aa, Arabidopsis thaliana
  peptide (1)..(1187): Ceres Seq. ID no. 13588602
  misc_feature (1128)..(1187): Pfam Name: SH3 domain Pfam Description: SH3 domain
  misc_feature (473)..(650): Homolog of NCBI NO: 15225713 NR Description: hypothetical protein [Arabidopsis thaliana]
  misc_feature (1)..(353): Homolog of NCBI NO: 15225713 NR Description: hypothetical protein [Arabidopsis thaliana]
  misc_feature (710)..(1187): Homolog of NCBI NO: 15225702 NR Description: SH3 domain-containing protein [Arabidopsis
MDLISADPTPVPAQSTSSSASSTASQPTSASASSSSHLHHPMSTKTTLGEKKSKRATLMQIQNDTISVAKAALNPVKANIMPQRQRQKKKPVSYSQLARSIHELAATLDQKSSQKQLVNHVFPKLAVYNSVDPSLAPSLLMLNQQCEDRNVLRYVYYYLARILSDTGMTPGGGIPTPNWDALADIDAGGGVTRADVVPRIVNQLTNEATNSEFEFHARRLQALKALTYSPSGNSELLSKLYEIVFGILEKVGDVPHKRKKGVFGTKGGDKESIMRSNLQYAAMSALRRLPLDPGNPLFLHRAAQGVFFADPVAVRHSLEILSELATRDPYTVAMTLEKLASPTGALQDILHMNDVLARVSLARLCHSISRARALDERPDIRSQFNSILYQLLLDPSERVCYEAILCILGKHDNTERMDERAAGWYRLTREILKLPEAPSLSSKDKSNKTKRPQPLIKLVMRRLESSFRSFSRPVLHAAARVVQEMGKSRAAAFAMGLQDIDESVHVNAFSDALDDAETNESSHPEGIRRTSSISAGPGRSDTIASLLAALMEVVRTTVACECVYVRAMVIKALIWMQSPDESLDELKSIIASELSDPGWPAALVNDVLLTLHARFKATPDMAVILLEIARIFATKVPGKIDADVLQLLWKTCLVGAGPDGKHTALEAVTIVLDLPPPQPGSMAGLTSIDRVSASDPKSALALQKLVQAAVWFLGENANYAASEYAWESATPPGTALMMLDADKMVAAASSRNPTLAGALTRLQRCAFSGSWEVRIVAIQALTTIAIRSGEPFRLQIYEFLYTLAEGGVQSQLSEMHLSNGEDQGASGTGLGVLITPMLKVLDEMYVGQDELIKDIRHHDNANKEWKDEELKKLYENHERLLDFVSLFCFIPRAKYLPLGPISAKLIDTYRTKHNITASTGSTDPAVVATGISDLIYESTQPAPAASNSSGLDDDLVNAWAANLGDDGLLGNNAPAMSRVNEFIAGVGTDAPDVEEENVFSRPSVGYDDMWAKTLLETSELEEEDARSGSSSPDSAGSVESSISSHFGGMNYPSLFSSKPSSQATAKSGGSKYQSTYEGYGSPIREEPPPPYSYSEPQSRESFENPVAGSGSRSYESDDEEPRKSTGTRFGTALYDFTAGGDDELNLTAEEELEIEYEVDGWFYVKKKRPGRDGKMAGLVPVLYVNQS

SEQ ID NO: 49415 - protein, 1146 aa, Arabidopsis thaliana
  peptide (1)..(1146): Ceres Seq. ID no. 13588603
  misc_feature (1087)..(1146): Pfam Name: SH3 domain Pfam Description: SH3 domain
  misc_feature (432)..(609): Homolog of NCBI NO: 15225713 NR Description: hypothetical protein [Arabidopsis thaliana]
  misc_feature (1)..(312): Homolog of NCBI NO: 15225713 NR Description: hypothetical protein [Arabidopsis thaliana]
  misc_feature (669)..(1146): Homolog of NCBI NO: 15225702 NR Description: SH3 domain-containing protein [Arabidopsis
MSTKTTLGEKKSKRATLMQIQNDTISVAKAALNPVKANIMPQRQRQKKKPVSYSQLARSIHELAATLDQKSSQKQLVNHVFPKLAVYNSVDPSLAPSLLMLNQQCEDRNVLRYVYYYLARILSDTGMTPGGGIPTPNWDALADIDAGGGVTRADVVPRIVNQLTNEATNSEFEFHARRLQALKALTYSPSGNSELLSKLYEIVFGILEKVGDVPHKRKKGVFGTKGGDKESIMRSNLQYAAMSALRRLPLDPGNPLFLHRAAQGVFFADPVAVRHSLEILSELATRDPYTVAMTLEKLASPTGALQDILHMNDVLARVSLARLCHSISRARALDERPDIRSQFNSILYQLLLDPSERVCYEAILCILGKHDNTERMDERAAGWYRLTREILKLPEAPSLSSKDKSNKTKRPQPLIKLVMRRLESSFRSFSRPVLHAAARVVQEMGKSRAAAFAMGLQDIDESVHVNAFSDALDDAETNESSHPEGIRRTSSISAGPGRSDTIASLLAALMEVVRTTVACECVYVRAMVIKALIWMQSPDESLDELKSIIASELSDPGWPAALVNDVLLTLHARFKATPDMAVILLEIARIFATKVPGKIDADVLQLLWKTCLVGAGPDGKHTALEAVTIVLDLPPPQPGSMAGLTSIDRVSASDPKSALALQKLVQAAVWFLGENANYAASEYAWESATPPGTALMMLDADKMVAAASSRNPTLAGALTRLQRCAFSGSWEVRIVAIQALTTIAIRSGEPFRLQIYEFLYTLAEGGVQSQLSEMHLSNGEDQGASGTGLGVLITPMLKVLDEMYVGQDELIKDIRHHDNANKEWKDEELKKLYENHERLLDFVSLFCFIPRAKYLPLGPISAKLIDTYRTKHNITASTGSTDPAVVATGISDLIYESTQPAPAASNSSGLDDDLVNAWAANLGDDGLLGNNAPAMSRVNEFIAGVGTDAPDVEEENVFSRPSVGYDDMWAKTLLETSELEEEDARSGSSSPDSAGSVESSISSHFGGMNYPSLFSSKPSSQATAKSGGSKYQSTYEGYGSPIREEPPPPYSYSEPQSRESFENPVAGSGSRSYESDDEEPRKSTGTRFGTALYDFTAGGDDELNLTAEEELEIEYEVDGWFYVKKKRPGRDGKMAGLVPVLYVNQS

SEQ ID NO: 49416 - DNA, 1966 bp, Arabidopsis thaliana; identical to SEQ ID NO: 45864
  misc_feature (1)..(1966): Ceres Seq. ID no. 13591692
  misc_feature: MA Experiment ID: 20000179 Result: Up-regulated in Transcription
  misc_feature: MA Experiment 20000179 PARAMETER Experiment Name: At_Germinating_Seeds_P Parameter: Age (hr) Value: 6 vs. 0
  misc_feature: MA Experiment 20000179 PARAMETER Experiment Name: At_Germinating_Seeds_P Parameter: Tissue Value: Germinating Seeds
  misc_feature: MA Experiment ID: 20000180 Result: Up-regulated in Transcription
  misc_feature: MA Experiment 20000180 PARAMETER Experiment Name: At_Germinating_Seeds_P Parameter: Age (hr) Value: 24 vs. 0
  misc_feature: MA Experiment 20000180 PARAMETER Experiment Name: At_Germinating_Seeds_P Parameter: Tissue Value: Germinating Seeds
  misc_feature: MA Experiment ID: 20000214 Result: Up-regulated in Transcription
  misc_feature: MA Experiment 20000214 PARAMETER Experiment Name: At_4deg_Cold_P Parameter: Timepoint (hr) Value: 6
  misc_feature: MA Experiment ID: 20000794 Result: Up-regulated in Transcription
  misc_feature: MA Experiment 20000794 PARAMETER Experiment Name: At_Petals_P Parameter: Age (day) Value: 23-25 days
  misc_feature: MA Experiment 20000794 PARAMETER Experiment Name: At_Petals_P Parameter: Plant Line Value: WS
  misc_feature: MA Experiment 20000794 PARAMETER Experiment Name: At_Petals_P Parameter: Tissue Value: Petals vs. Whole plant
  misc_feature: MA Experiment ID: 20001248 Result: Down-regulated in Transcription
  misc_feature: MA Experiment 20001248 PARAMETER Experiment Name: At_Far-red-induction_P Parameter: Age (day) Value: 7
  misc_feature: MA Experiment 20001248 PARAMETER Experiment Name: At_Far-red-induction_P Parameter: Light Value: Far-red vs. White
  misc_feature: MA Experiment 20001248 PARAMETER Experiment Name: At_Far-red-induction_P Parameter: Organism Value: A. thaliana
  misc_feature: MA Experiment 20001248 PARAMETER Experiment Name: At_Far-red-induction_P Parameter: Plant Line Value: Columbia
  misc_feature: MA Experiment 20001248 PARAMETER Experiment Name: At_Far-red-induction_P Parameter: Timepoint (hr) Value: 4
  misc_feature: MA Experiment 20001248 PARAMETER Experiment Name: At_Far-red-induction_P Parameter: Tissue Value: Whole Plant
  misc_feature: MA Experiment ID: 20001557 Result: Up-regulated in Transcription
  misc_feature: MA Experiment 20001557 PARAMETER Experiment Name: At_Drought_Soil_Dry_P Parameter: Age (day) Value: 27
  misc_feature: MA Experiment 20001557 PARAMETER Experiment Name: At_Drought_Soil_Dry_P Parameter: Organism Value: A. thaliana
  misc_feature: MA Experiment 20001557 PARAMETER Experiment Name: At_Drought_Soil_Dry_P Parameter: Plant Line Value: WS
  misc_feature: MA Experiment 20001557 PARAMETER Experiment Name: At_Drought_Soil_Dry_P Parameter: Post Timepoint (hr) Value: 3
  misc_feature: MA Experiment 20001557 PARAMETER Experiment Name: At_Drought_Soil_Dry_P Parameter: Post-Treatment Value: Re-Water vs. No Drought
  misc_feature: MA Experiment 20001557 PARAMETER Experiment Name: At_Drought_Soil_Dry_P Parameter: Timepoint (day) Value: 13
  misc_feature: MA Experiment 20001557 PARAMETER Experiment Name: At_Drought_Soil_Dry_P Parameter: Treatment Value: Drought vs. No Drought
  misc_feature: MA Experiment ID: 20001559 Result: Down-regulated in Transcription
  misc_feature: MA Experiment 20001559 PARAMETER Experiment Name: At_Drought_Soil_Dry_P Parameter: Age (day) Value: 28
  misc_feature: MA Experiment 20001559 PARAMETER Experiment Name: At_Drought_Soil_Dry_P Parameter: Organism Value: A. thaliana
  misc_feature: MA Experiment 20001559 PARAMETER Experiment Name: At_Drought_Soil_Dry_P Parameter: Plant Line Value: WS
  misc_feature: MA Experiment 20001559 PARAMETER Experiment Name: At_Drought_Soil_Dry_P Parameter: Post Timepoint (hr) Value: 29
  misc_feature: MA Experiment 20001559 PARAMETER Experiment Name: At_Drought_Soil_Dry_P Parameter: Post-Treatment Value: Re-Water vs. No Drought
  misc_feature: MA Experiment 20001559 PARAMETER Experiment Name: At_Drought_Soil_Dry_P Parameter: Timepoint (day) Value: 14
  misc_feature: MA Experiment 20001559 PARAMETER Experiment Name: At_Drought_Soil_Dry_P Parameter: Treatment Value: Drought vs. No Drought

SEQ ID NO: 49417 - protein, 460 aa, Arabidopsis thaliana; identical to SEQ ID NO: 45865
  peptide (1)..(460): Ceres Seq. ID no. 13591693
  misc_feature (114)..(443): Pfam Name: NAD dependent epimerase/dehydratase family Pfam Description: NAD dependent epimerase/dehydratase family
  misc_feature (114)..(443): Pfam Name: NAD dependent epimerase/dehydratase family Pfam Description: NAD dependent epimerase/dehydratase family
  misc_feature (114)..(443): Pfam Name: NAD dependent epimerase/dehydratase family Pfam Description: NAD dependent epimerase/dehydratase family
  misc_feature (114)..(443): Pfam Name: NAD dependent epimerase/dehydratase family Pfam Description: NAD dependent epimerase/dehydratase family
  misc_feature (65)..(450): Homolog of NCBI NO: 15234745 NR Description: nucleotide sugar epimerase family [Arabidopsis
  misc_feature (25)..(443): Homolog of NCBI NO: 15293119 NR Description: putative nucleotide sugar epimerase [Arabidopsis
  misc_feature (25)..(443): Homolog of NCBI NO: 15234486 NR Description: nucleotide sugar epimerase family [Arabidopsis
  misc_feature (14)..(443): Homolog of NCBI NO: 15225451 NR Description: nucleotide sugar epimerase family [Arabidopsis
  misc_feature (1)..(443): Homolog of NCBI NO: 29647497 NR Description: OJ1191_A10.21 [Oryza sativa (japonica
  misc_feature (65)..(450): Homolog of NCBI NO: 15234745 NR Description: nucleotide sugar epimerase family [Arabidopsis
  misc_feature (25)..(443): Homolog of NCBI NO: 15234486 NR Description: nucleotide sugar epimerase family [Arabidopsis
  misc_feature (1)..(443): Homolog of NCBI NO: 29647497 NR Description: OJ1191_A10.21 [Oryza sativa (japonica
  misc_feature (14)..(443): Homolog of NCBI NO: 15225451 NR Description: nucleotide sugar epimerase family [Arabidopsis
  misc_feature (25)..(443): Homolog of NCBI NO: 15234486 NR Description: nucleotide sugar epimerase family [Arabidopsis
  misc_feature (25)..(443): Homolog of NCBI NO: 15293119 NR Description: putative nucleotide sugar epimerase [Arabidopsis
  misc_feature (65)..(450): Homolog of NCBI NO: 15234745 NR Description: nucleotide sugar epimerase family [Arabidopsis
  misc_feature (1)..(460): Homolog of NCBI NO: 15229524 NR Description: NAD-dependent epimerase/dehydratase family
  misc_feature (1)..(460): Homolog of NCBI NO: 24417280 NR Description: unknown [Arabidopsis thaliana]
  misc_feature (90)..(443): Homolog of NCBI NO: 15217591 NR Description: nucleotide sugar epimerase family [Arabidopsis
  misc_feature (90)..(443): Homolog of NCBI NO: 21536982 NR Description: nucleotide sugar epimerase, putative [Arabidopsis
  misc_feature (90)..(443): Homolog of NCBI NO: 15236712 NR Description: nucleotide sugar epimerase family [Arabidopsis
  misc_feature (1)..(460): Homolog of NCBI NO: 15229524 NR Description: NAD-dependent epimerase/dehydratase family
  misc_feature (1)..(460): Homolog of NCBI NO: 24417280 NR Description: unknown [Arabidopsis thaliana]
  misc_feature (90)..(443): Homolog of NCBI NO: 15217591 NR Description: nucleotide sugar epimerase family [Arabidopsis
  misc_feature (90)..(443): Homolog of NCBI NO: 21536982 NR Description: nucleotide sugar epimerase, putative [Arabidopsis
  misc_feature (90)..(443): Homolog of NCBI NO: 15236712 NR Description: nucleotide sugar epimerase family [Arabidopsis
  misc_feature (1)..(443): Homolog of NCBI NO: 29647497 NR Description: OJ1191_A10.21 [Oryza sativa (japonica
  misc_feature (14)..(443): Homolog of NCBI NO: 15225451 NR Description: nucleotide sugar epimerase family [Arabidopsis
  misc_feature (25)..(443): Homolog of NCBI NO: 15234486 NR Description: nucleotide sugar epimerase family [Arabidopsis
  misc_feature (25)..(443): Homolog of NCBI NO: 15293119 NR Description: putative nucleotide sugar epimerase [Arabidopsis
  misc_feature (65)..(450): Homolog of NCBI NO: 15234745 NR Description: nucleotide sugar epimerase family [Arabidopsis
  misc_feature (1)..(460): Homolog of NCBI NO: 15229524 NR Description: NAD-dependent epimerase/dehydratase family
  misc_feature (1)..(460): Homolog of NCBI NO: 24417280 NR Description: unknown [Arabidopsis thaliana]
  misc_feature (90)..(443): Homolog of NCBI NO: 15217591 NR Description: nucleotide sugar epimerase family [Arabidopsis
  misc_feature (90)..(443): Homolog of NCBI NO: 21536982 NR Description: nucleotide sugar epimerase, putative [Arabidopsis
  misc_feature (90)..(443): Homolog of NCBI NO: 15236712 NR Description: nucleotide sugar epimerase family [Arabidopsis
  misc_feature (1)..(443): Homolog of NCBI NO: 29647497 NR Description: OJ1191_A10.21 [Oryza sativa (japonica
  misc_feature (14)..(443): Homolog of NCBI NO: 15225451 NR Description: nucleotide sugar epimerase family [Arabidopsis
  misc_feature (25)..(443): Homolog of NCBI NO: 15293119 NR Description: putative nucleotide sugar epimerase [Arabidopsis
  misc_feature (90)..(443): Homolog of NCBI NO: 15236712 NR Description: nucleotide sugar epimerase family [Arabidopsis
  misc_feature (90)..(443): Homolog of NCBI NO: 21536982 NR Description: nucleotide sugar epimerase, putative [Arabidopsis
  misc_feature (90)..(443): Homolog of NCBI NO: 15217591 NR Description: nucleotide sugar epimerase family [Arabidopsis
  misc_feature (1)..(460): Homolog of NCBI NO: 24417280 NR Description: unknown [Arabidopsis thaliana]
  misc_feature (1)..(460): Homolog of NCBI NO: 15229524 NR Description: NAD-dependent epimerase/dehydratase family

SEQ ID NO: 49418 - protein, 258 aa, Arabidopsis thaliana; identical to SEQ ID NO: 45866
  peptide (1)..(258): Ceres Seq. ID no. 13591694
  misc_feature (1)..(241): Pfam Name: NAD dependent epimerase/dehydratase family Pfam Description: NAD dependent epimerase/dehydratase family
  misc_feature (1)..(241): Pfam Name: NAD dependent epimerase/dehydratase family Pfam Description: NAD dependent epimerase/dehydratase family
  misc_feature (1)..(241): Pfam Name: NAD dependent epimerase/dehydratase family Pfam Description: NAD dependent epimerase/dehydratase family
  misc_feature (1)..(241): Pfam Name: NAD dependent epimerase/dehydratase family Pfam Description: NAD dependent epimerase/dehydratase family
  misc_feature (1)..(248): Homolog of NCBI NO: 15234745 NR Description: nucleotide sugar epimerase family [Arabidopsis
  misc_feature (1)..(241): Homolog of NCBI NO: 15293119 NR Description: putative nucleotide sugar epimerase [Arabidopsis
  misc_feature (1)..(241): Homolog of NCBI NO: 15234486 NR Description: nucleotide sugar epimerase family [Arabidopsis
  misc_feature (1)..(241): Homolog of NCBI NO: 15225451 NR Description: nucleotide sugar epimerase family [Arabidopsis
  misc_feature (1)..(241): Homolog of NCBI NO: 29647497 NR Description: OJ1191_A10.21 [Oryza sativa (japonica
  misc_feature (1)..(248): Homolog of NCBI NO: 15234745 NR Description: nucleotide sugar epimerase family [Arabidopsis
  misc_feature (1)..(241): Homolog of NCBI NO: 15234486 NR Description: nucleotide sugar epimerase family [Arabidopsis
  misc_feature (1)..(241): Homolog of NCBI NO: 29647497 NR Description: OJ1191_A10.21 [Oryza sativa (japonica
  misc_feature (1)..(241): Homolog of NCBI NO: 15225451 NR Description: nucleotide sugar epimerase family [Arabidopsis
  misc_feature (1)..(241): Homolog of NCBI NO: 15234486 NR Description: nucleotide sugar epimerase family [Arabidopsis
  misc_feature (1)..(241): Homolog of NCBI NO: 15293119 NR Description: putative nucleotide sugar epimerase [Arabidopsis
  misc_feature (1)..(248): Homolog of NCBI NO: 15234745 NR Description: nucleotide sugar epimerase family [Arabidopsis
  misc_feature (1)..(258): Homolog of NCBI NO: 15229524 NR Description: NAD-dependent epimerase/dehydratase family
  misc_feature (1)..(258): Homolog of NCBI NO: 24417280 NR Description: unknown [Arabidopsis thaliana]
  misc_feature (1)..(241): Homolog of NCBI NO: 15217591 NR Description: nucleotide sugar epimerase family [Arabidopsis
  misc_feature (1)..(241): Homolog of NCBI NO: 21536982 NR Description: nucleotide sugar epimerase, putative [Arabidopsis
  misc_feature (1)..(241): Homolog of NCBI NO: 15236712 NR Description: nucleotide sugar epimerase family [Arabidopsis
  misc_feature (1)..(258): Homolog of NCBI NO: 15229524 NR Description: NAD-dependent epimerase/dehydratase family
  misc_feature (1)..(258): Homolog of NCBI NO: 24417280 NR Description: unknown [Arabidopsis thaliana]
  misc_feature (1)..(241): Homolog of NCBI NO: 15217591 NR Description: nucleotide sugar epimerase family [Arabidopsis
  misc_feature (1)..(241): Homolog of NCBI NO: 21536982 NR Description: nucleotide sugar epimerase, putative [Arabidopsis
  misc_feature (1)..(241): Homolog of NCBI NO: 15236712 NR Description: nucleotide sugar epimerase family [Arabidopsis
  misc_feature (1)..(241): Homolog of NCBI NO: 29647497 NR Description: OJ1191_A10.21 [Oryza sativa (japonica
  misc_feature (1)..(241): Homolog of NCBI NO: 15225451 NR Description: nucleotide sugar epimerase family [Arabidopsis
  misc_feature (1)..(241): Homolog of NCBI NO: 15234486 NR Description: nucleotide sugar epimerase family [Arabidopsis
  misc_feature (1)..(241): Homolog of NCBI NO: 15293119 NR Description: putative nucleotide sugar epimerase [Arabidopsis
  misc_feature (1)..(248): Homolog of NCBI NO: 15234745 NR Description: nucleotide sugar epimerase family [Arabidopsis
  misc_feature (1)..(258): Homolog of NCBI NO: 15229524 NR Description: NAD-dependent epimerase/dehydratase family
  misc_feature (1)..(258): Homolog of NCBI NO: 24417280 NR Description: unknown [Arabidopsis thaliana]
  misc_feature (1)..(241): Homolog of NCBI NO: 15217591 NR Description: nucleotide sugar epimerase family [Arabidopsis
  misc_feature (1)..(241): Homolog of NCBI NO: 21536982 NR Description: nucleotide sugar epimerase, putative [Arabidopsis
  misc_feature (1)..(241): Homolog of NCBI NO: 15236712 NR Description: nucleotide sugar epimerase family [Arabidopsis
  misc_feature (1)..(241): Homolog of NCBI NO: 29647497 NR Description: OJ1191_A10.21 [Oryza sativa (japonica
  misc_feature (1)..(241): Homolog of NCBI NO: 15225451 NR Description: nucleotide sugar epimerase family [Arabidopsis
  misc_feature (1)..(241): Homolog of NCBI NO: 15293119 NR Description: putative nucleotide sugar epimerase [Arabidopsis
  misc_feature (1)..(241): Homolog of NCBI NO: 15236712 NR Description: nucleotide sugar epimerase family [Arabidopsis
  misc_feature (1)..(241): Homolog of NCBI NO: 21536982 NR Description: nucleotide sugar epimerase, putative [Arabidopsis
  misc_feature (1)..(241): Homolog of NCBI NO: 15217591 NR Description: nucleotide sugar epimerase family [Arabidopsis
  misc_feature (1)..(258): Homolog of NCBI NO: 24417280 NR Description: unknown [Arabidopsis thaliana]
  misc_feature (1)..(258): Homolog of NCBI NO: 15229524 NR Description: NAD-dependent epimerase/dehydratase family

SEQ ID NO: 49419 - DNA, 1456 bp, Arabidopsis thaliana
  misc_feature (1)..(1456): Ceres Seq. ID no. 13588005
  misc_feature: MA Experiment ID: 20000184 Result: Up-regulated in Transcription
  misc_feature: MA Experiment 20000184 PARAMETER Experiment Name: At_Shoots__P Parameter: Age (day) Value: 7
  misc_feature: MA Experiment 20000184 PARAMETER Experiment Name: At_Shoots__P Parameter: Tissue Value: Shoots vs. Whole Plant
  misc_feature: MA Experiment ID: 20000265 Result: Up-regulated in Transcription
  misc_feature: MA Experiment 20000265 PARAMETER Experiment Name: At_Open_Flower_P Parameter: Age (day) Value: 21
  misc_feature: MA Experiment 20000265 PARAMETER Experiment Name: At_Open_Flower_P Parameter: Plant Line Value: WS
  misc_feature: MA Experiment 20000265 PARAMETER Experiment Name: At_Open_Flower_P Parameter: Tissue Value: Closed Flower vs. Whole Plant
  misc_feature: MA Experiment ID: 20000438 Result: Up-regulated in Transcription
  misc_feature: MA Experiment 20000438 PARAMETER Experiment Name: At_Shoots__P Parameter: Age (day) Value: 14
  misc_feature: MA Experiment 20000438 PARAMETER Experiment Name: At_Shoots__P Parameter: Tissue Value: Shoots vs. Whole Plant
  misc_feature: MA Experiment ID: 20001247 Result: Up-regulated in Transcription
  misc_feature: MA Experiment 20001247 PARAMETER Experiment Name: At_Far-red-induction_P Parameter: Age (day) Value: 7
  misc_feature: MA Experiment 20001247 PARAMETER Experiment Name: At_Far-red-induction_P Parameter: Light Value: Far-red vs. White
  misc_feature: MA Experiment 20001247 PARAMETER Experiment Name: At_Far-red-induction_P Parameter: Organism Value: A. thaliana
  misc_feature: MA Experiment 20001247 PARAMETER Experiment Name: At_Far-red-induction_P Parameter: Plant Line Value: Columbia
  misc_feature: MA Experiment 20001247 PARAMETER Experiment Name: At_Far-red-induction_P Parameter: Timepoint (hr) Value: 1
  misc_feature: MA Experiment 20001247 PARAMETER Experiment Name: At_Far-red-induction_P Parameter: Tissue Value: Whole Plant
  misc_feature: MA Experiment ID: 20001450 Result: Up-regulated in Transcription
  misc_feature: MA Experiment 20001450 PARAMETER Experiment Name: At_Far-red-induction_P Parameter: Age (day) Value: 7
  misc_feature: MA Experiment 20001450 PARAMETER Experiment Name: At_Far-red-induction_P Parameter: Light Value: Far-red vs. White
  misc_feature: MA Experiment 20001450 PARAMETER Experiment Name: At_Far-red-induction_P Parameter: Organism Value: A. thaliana
  misc_feature: MA Experiment 20001450 PARAMETER Experiment Name: At_Far-red-induction_P Parameter: Plant Line Value: Columbia
  misc_feature: MA Experiment 20001450 PARAMETER Experiment Name: At_Far-red-induction_P Parameter: Timepoint (hr) Value: 8
  misc_feature: MA Experiment 20001450 PARAMETER Experiment Name: At_Far-red-induction_P Parameter: Tissue Value: Whole Plant
atcttcaagtgtgatatattgtgagaagattgcagaagcgtgtccaacttggttccctctctctctgaaattactcaatcatggggatttgcttgagtgctcaggtcaaagctgagagctcaggagcgagtacgaagtatgacgccaaagatataggaagtcttgggagcaaggcttcgtctgtgtctgtaagaccaagccctcgaactgagggtgagatcttacagtctccaaatctcaagagttttagctttgctgagcttaaatcagcaaccaggaattttagaccagacagtgtgcttggtgaaggtggattcggttgtgttttcaaaggatggattgatgagaagtctctcactgcctcaagaccaggcacgggtttggttattgccgtcaaaaagcttaaccaagatggttggcaaggtcaccaggagtggctggctgaagtgaattaccttggtcagttttctcaccgtcaccttgtgaagctgattggttattgcctagaggatgagcaccgtcttcttgtttacgagttcatgcctcggggtagcttggagaatcatcttttcaggagaggtttgtacttccaaccgttatcttggaaacttcggttgaaagttgctcttggtgctgcaaagggacttgcttttcttcacagttccgagacaagagtgatataccgagatttcaagacttctaatatccttcttgactcggagtacaacgcaaagctttctgattttgggttggctaaggatgggccaataggtgataaaagtcatgtctctacacgagtcatgggtacacacggatatgcagctcctgaataccttgcaaccggtcatctaacaacaaagagtgatgtctatagcttcggggttgtccttctggagctgttgtctggtcgtcgagcagtggacaagaaccgcccatctggagagaggaaccttgtggagtgggctaaaccatacctcgtaaacaaaagaaagatattccgagtcattgataatcgtcttcaggaccagtactctatggaagaagcatgtaaagtggctactctgtctctgagatgtctcaccacagagattaagctgagaccaaacatgagcgaggttgtttcgcacctcgaacacattcagtctttaaatgctgctataggaggaaatatggataaaacagatagaagaatgcgtaggagaagtgacagtgttgtcagcaaaaaagtgaatgcaggttttgctcgacagactgctgttggcagtacagttgttgcttatcctcgcccatcagcctcgccactgtatgtttgaatagggttaaacacgtcctgggtctgtgttcagtgttcttggtaaaacatttgcaggacatgaagttcctatatcatgtcctgagaatggaatctggatgtacagtttttgtctctcttaatgtaagaattctgtttaaatcc

SEQ ID NO: 49420 - protein, 410 aa, Arabidopsis thaliana
  peptide (1)..(410): Ceres Seq. ID no. 13588006
  misc_feature (68)..(350): Pfam Name: Protein kinase domain Pfam Description: Protein kinase domain
  misc_feature (1)..(354): Homolog of NCBI NO: 15225520 NR Description: protein kinase, putative [Arabidopsis thaliana]
  misc_feature (1)..(354): Homolog of NCBI NO: 34906046 NR Description: putative serine/threonine-specific protein kinase
  misc_feature (1)..(354): Homolog of NCBI NO: 166809 NR Description: protein kinase
  misc_feature (1)..(354): Homolog of NCBI NO: 15241749 NR Description: protein kinase, putative [Arabidopsis thaliana]
  misc_feature (13)..(393): Homolog of NCBI NO: 34897424 NR Description: putative protein kinase [Oryza sativa (japonica
  misc_feature (1)..(386): Homolog of NCBI NO: 14719339 NR Description: putative protein kinase [Oryza sativa]
  misc_feature (1)..(410): Homolog of NCBI NO: 15227001 NR Description: protein kinase (APK1b) [Arabidopsis thaliana]
  misc_feature (1)..(410): Homolog of NCBI NO: 15222437 NR Description: protein kinase (APK1a) [Arabidopsis thaliana]
  misc_feature (255)..(408): Homolog of NCBI NO: 8778537 NR Description: F22G5.5 [Arabidopsis thaliana]
  misc_feature (1)..(255): Homolog of NCBI NO: 8778537 NR Description: F22G5.5 [Arabidopsis thaliana]
MGICLSAQVKAESSGASTKYDAKDIGSLGSKASSVSVRPSPRTEGEILQSPNLKSFSFAELKSATRNFRPDSVLGEGGFGCVFKGWIDEKSLTASRPGTGLVIAVKKLNQDGWQGHQEWLAEVNYLGQFSHRHLVKLIGYCLEDEHRLLVYEFMPRGSLENHLFRRGLYFQPLSWKLRLKVALGAAKGLAFLHSSETRVIYRDFKTSNILLDSEYNAKLSDFGLAKDGPIGDKSHVSTRVMGTHGYAAPEYLATGHLTTKSDVYSFGVVLLELLSGRRAVDKNRPSGERNLVEWAKPYLVNKRKIFRVIDNRLQDQYSMEEACKVATLSLRCLTTEIKLRPNMSEVVSHLEHIQSLNAAIGGNMDKTDRRMRRRSDSVVSKKVNAGFARQTAVGSTVVAYPRPSASPLYV

SEQ ID NO: 49421 - protein, 257 aa, Arabidopsis thaliana
  peptide (1)..(257): Ceres Seq. ID no. 13588007
  misc_feature (1)..(197): Pfam Name: Protein kinase domain Pfam Description: Protein kinase domain
  misc_feature (1)..(201): Homolog of NCBI NO: 15225520 NR Description: protein kinase, putative [Arabidopsis thaliana]
  misc_feature (1)..(201): Homolog of NCBI NO: 34906046 NR Description: putative serine/threonine-specific protein kinase
  misc_feature (1)..(201): Homolog of NCBI NO: 166809 NR Description: protein kinase
  misc_feature (1)..(201): Homolog of NCBI NO: 15241749 NR Description: protein kinase, putative [Arabidopsis thaliana]
  misc_feature (1)..(240): Homolog of NCBI NO: 34897424 NR Description: putative protein kinase [Oryza sativa (japonica
  misc_feature (1)..(233): Homolog of NCBI NO: 14719339 NR Description: putative protein kinase [Oryza sativa]
  misc_feature (1)..(257): Homolog of NCBI NO: 15227001 NR Description: protein kinase (APK1b) [Arabidopsis thaliana]
  misc_feature (1)..(257): Homolog of NCBI NO: 15222437 NR Description: protein kinase (APK1a) [Arabidopsis thaliana]
  misc_feature (102)..(255): Homolog of NCBI NO: 8778537 NR Description: F22G5.5 [Arabidopsis thaliana]
  misc_feature (1)..(102): Homolog of NCBI NO: 8778537 NR Description: F22G5.5 [Arabidopsis thaliana]
MPRGSLENHLFRRGLYFQPLSWKLRLKVALGAAKGLAFLHSSETRVIYRDFKTSNILLDSEYNAKLSDFGLAKDGPIGDKSHVSTRVMGTHGYAAPEYLATGHLTTKSDVYSFGVVLLELLSGRRAVDKNRPSGERNLVEWAKPYLVNKRKIFRVIDNRLQDQYSMEEACKVATLSLRCLTTEIKLRPNMSEVVSHLEHIQSLNAAIGGNMDKTDRRMRRRSDSVVSKKVNAGFARQTAVGSTVVAYPRPSASPLYV

SEQ ID NO: 49422 - DNA, 1850 bp, Arabidopsis thaliana; identical to SEQ ID NO: 43424
  misc_feature (1)..(1850): Ceres Seq. ID no. 13592577
  misc_feature: MA Experiment ID: 20000180 Result: Down-regulated in Transcription
  misc_feature: MA Experiment 20000180 PARAMETER Experiment Name: At_Germinating_Seeds_P Parameter: Age (hr) Value: 24 vs. 0
  misc_feature: MA Experiment 20000180 PARAMETER Experiment Name: At_Germinating_Seeds_P Parameter: Tissue Value: Germinating Seeds
  misc_feature: MA Experiment ID: 20000184 Result: Down-regulated in Transcription
  misc_feature: MA Experiment 20000184 PARAMETER Experiment Name: At_Shoots__P Parameter: Age (day) Value: 7
  misc_feature: MA Experiment 20000184 PARAMETER Experiment Name: At_Shoots__P Parameter: Tissue Value: Shoots vs. Whole Plant
  misc_feature: MA Experiment ID: 20001458 Result: Up-regulated in Transcription
  misc_feature: MA Experiment 20001458 PARAMETER Experiment Name: At_50mM_NH4NO3_L-to-H_P Parameter: Age (day) Value: Undefined
  misc_feature: MA Experiment 20001458 PARAMETER Experiment Name: At_50mM_NH4NO3_L-to-H_P Parameter: Organism Value: Undefined
  misc_feature: MA Experiment 20001458 PARAMETER Experiment Name: At_50mM_NH4NO3_L-to-H_P Parameter: Plant Line Value: Undefined
  misc_feature: MA Experiment 20001458 PARAMETER Experiment Name: At_50mM_NH4NO3_L-to-H_P Parameter: Timepoint (hr) Value: 2
  misc_feature: MA Experiment 20001458 PARAMETER Experiment Name: At_50mM_NH4NO3_L-to-H_P Parameter: Tissue Value: Siliques
  misc_feature: MA Experiment 20001458 PARAMETER Experiment Name: At_50mM_NH4NO3_L-to-H_P Parameter: Treatment Value: 50mM NH4NO3 vs. 100mM Manitol
  misc_feature: MA Experiment ID: 20001558 Result: Up-regulated in Transcription
  misc_feature: MA Experiment 20001558 PARAMETER Experiment Name: At_Drought_Soil_Dry_P Parameter: Age (day) Value: 27
  misc_feature: MA Experiment 20001558 PARAMETER Experiment Name: At_Drought_Soil_Dry_P Parameter: Organism Value: A. thaliana
  misc_feature: MA Experiment 20001558 PARAMETER Experiment Name: At_Drought_Soil_Dry_P Parameter: Plant Line Value: WS
  misc_feature: MA Experiment 20001558 PARAMETER Experiment Name: At_Drought_Soil_Dry_P Parameter: Post Timepoint (hr) Value: 6
  misc_feature: MA Experiment 20001558 PARAMETER Experiment Name: At_Drought_Soil_Dry_P Parameter: Post-Treatment Value: Re-Water vs. No Drought
  misc_feature: MA Experiment 20001558 PARAMETER Experiment Name: At_Drought_Soil_Dry_P Parameter: Timepoint (day) Value: 13
  misc_feature: MA Experiment 20001558 PARAMETER Experiment Name: At_Drought_Soil_Dry_P Parameter: Treatment Value: Drought vs. No Drought
  misc_feature: MA Experiment ID: 20001560 Result: Up-regulated in Transcription
  misc_feature: MA Experiment 20001560 PARAMETER Experiment Name: At_Drought_Soil_Dry_P Parameter: Age (day) Value: 28
  misc_feature: MA Experiment 20001560 PARAMETER Experiment Name: At_Drought_Soil_Dry_P Parameter: Organism Value: A. thaliana
  misc_feature: MA Experiment 20001560 PARAMETER Experiment Name: At_Drought_Soil_Dry_P Parameter: Plant Line Value: WS
  misc_feature: MA Experiment 20001560 PARAMETER Experiment Name: At_Drought_Soil_Dry_P Parameter: Post Timepoint (hr) Value: None
  misc_feature: MA Experiment 20001560 PARAMETER Experiment Name: At_Drought_Soil_Dry_P Parameter: Post-Treatment Value: None
  misc_feature: MA Experiment 20001560 PARAMETER Experiment Name: At_Drought_Soil_Dry_P Parameter: Timepoint (day) Value: 14
  misc_feature: MA Experiment 20001560 PARAMETER Experiment Name: At_Drought_Soil_Dry_P Parameter: Treatment Value: Drought vs. No Drought

SEQ ID NO: 49423 - protein, 555 aa, Arabidopsis thaliana; identical to SEQ ID NO: 43425
  peptide (1)..(555): Ceres Seq. ID no. 13592578
  misc_feature (145)..(359): Pfam Name: DEAD/DEAH box helicase Pfam Description: DEAD/DEAH box helicase
  misc_feature (145)..(359): Pfam Name: DEAD/DEAH box helicase Pfam Description: DEAD/DEAH box helicase
  misc_feature (91)..(517): Homolog of NCBI NO: 40738604 NR Description: hypothetical protein AN5931.2 [Aspergillus
  misc_feature (91)..(518): Homolog of NCBI NO: 34903586 NR Description: putative ethylene-responsive RNA helicase
  misc_feature (91)..(518): Homolog of NCBI NO: 15221998 NR Description: ethylene-responsive DEAD box RNA helicase,
  misc_feature (72)..(549): Homolog of NCBI NO: 40742814 NR Description: hypothetical protein AN7424.2 [Aspergillus
  misc_feature (91)..(514): Homolog of NCBI NO: 10177293 NR Description: ATP-dependent RNA helicase-like protein
  misc_feature (91)..(517): Homolog of NCBI NO: 40738604 NR Description: hypothetical protein AN5931.2 [Aspergillus
  misc_feature (91)..(518): Homolog of NCBI NO: 15221998 NR Description: ethylene-responsive DEAD box RNA helicase,
  misc_feature (91)..(514): Homolog of NCBI NO: 10177293 NR Description: ATP-dependent RNA helicase-like protein
  misc_feature (19)..(555): Homolog of NCBI NO: 15222526 NR Description: DEAD/DEAH box helicase, putative [Arabidopsis
  misc_feature (145)..(555): Homolog of NCBI NO: 11358811 NR Description: RNA helicase RH5 [imported] - Arabidopsis
  misc_feature (71)..(554): Homolog of NCBI NO: 34394349 NR Description: putative RNA helicase [Oryza sativa (japonica
  misc_feature (17)..(549): Homolog of NCBI NO: 6321360 NR Description: ATP-dependent RNA helicase CA3 of the DEAD/DEAH
  misc_feature (44)..(549): Homolog of NCBI NO: 19113180 NR Description: putative atp-dependent rna helicase
  misc_feature (72)..(549): Homolog of NCBI NO: 40742814 NR Description: hypothetical protein AN7424.2 [Aspergillus
  misc_feature (91)..(518): Homolog of NCBI NO: 34903586 NR Description: putative ethylene-responsive RNA helicase
  misc_feature (44)..(549): Homolog of NCBI NO: 19113180 NR Description: putative atp-dependent rna helicase
  misc_feature (17)..(549): Homolog of NCBI NO: 6321360 NR Description: ATP-dependent RNA helicase CA3 of the DEAD/DEAH
  misc_feature (71)..(554): Homolog of NCBI NO: 34394349 NR Description: putative RNA helicase [Oryza sativa (japonica
  misc_feature (145)..(555): Homolog of NCBI NO: 11358811 NR Description: RNA helicase RH5 [imported] - Arabidopsis
  misc_feature (19)..(555): Homolog of NCBI NO: 15222526 NR Description: DEAD/DEAH box helicase, putative [Arabidopsis

SEQ ID NO: 49424 - protein, 537 aa, Arabidopsis thaliana; identical to SEQ ID NO: 43426
  peptide (1)..(537): Ceres Seq. ID no. 13592579
  misc_feature (127)..(341): Pfam Name: DEAD/DEAH box helicase Pfam Description: DEAD/DEAH box helicase
  misc_feature (127)..(341): Pfam Name: DEAD/DEAH box helicase Pfam Description: DEAD/DEAH box helicase
  misc_feature (73)..(499): Homolog of NCBI NO: 40738604 NR Description: hypothetical protein AN5931.2 [Aspergillus
  misc_feature (73)..(500): Homolog of NCBI NO: 34903586 NR Description: putative ethylene-responsive RNA helicase
  misc_feature (73)..(500): Homolog of NCBI NO: 15221998 NR Description: ethylene-responsive DEAD box RNA helicase,
  misc_feature (54)..(531): Homolog of NCBI NO: 40742814 NR Description: hypothetical protein AN7424.2 [Aspergillus
  misc_feature (73)..(496): Homolog of NCBI NO: 10177293 NR Description: ATP-dependent RNA helicase-like protein
  misc_feature (73)..(499): Homolog of NCBI NO: 40738604 NR Description: hypothetical protein AN5931.2 [Aspergillus
  misc_feature (73)..(500): Homolog of NCBI NO: 15221998 NR Description: ethylene-responsive DEAD box RNA helicase,
  misc_feature (73)..(496): Homolog of NCBI NO: 10177293 NR Description: ATP-dependent RNA helicase-like protein
  misc_feature (1)..(537): Homolog of NCBI NO: 15222526 NR Description: DEAD/DEAH box helicase, putative [Arabidopsis
  misc_feature (127)..(537): Homolog of NCBI NO: 11358811 NR Description: RNA helicase RH5 [imported] - Arabidopsis
  misc_feature (53)..(536): Homolog of NCBI NO: 34394349 NR Description: putative RNA helicase [Oryza sativa (japonica
  misc_feature (1)..(531): Homolog of NCBI NO: 6321360 NR Description: ATP-dependent RNA helicase CA3 of the DEAD/DEAH
  misc_feature (26)..(531): Homolog of NCBI NO: 19113180 NR Description: putative atp-dependent rna helicase
  misc_feature (54)..(531): Homolog of NCBI NO: 40742814 NR Description: hypothetical protein AN7424.2 [Aspergillus
  misc_feature (73)..(500): Homolog of NCBI NO: 34903586 NR Description: putative ethylene-responsive RNA helicase
  misc_feature (26)..(531): Homolog of NCBI NO: 19113180 NR Description: putative atp-dependent rna helicase
  misc_feature (1)..(531): Homolog of NCBI NO: 6321360 NR Description: ATP-dependent RNA helicase CA3 of the DEAD/DEAH
  misc_feature (53)..(536): Homolog of NCBI NO: 34394349 NR Description: putative RNA helicase [Oryza sativa (japonica
  misc_feature (127)..(537): Homolog of NCBI NO: 11358811 NR Description: RNA helicase RH5 [imported] - Arabidopsis
  misc_feature (1)..(537): Homolog of NCBI NO: 15222526 NR Description: DEAD/DEAH box helicase, putative [Arabidopsis

SEQ ID NO: 49425 - protein, 517 aa, Arabidopsis thaliana; identical to SEQ ID NO: 43427
  peptide (1)..(517): Ceres Seq. ID no. 13592580
  misc_feature (107)..(321): Pfam Name: DEAD/DEAH box helicase Pfam Description: DEAD/DEAH box helicase
  misc_feature (107)..(321): Pfam Name: DEAD/DEAH box helicase Pfam Description: DEAD/DEAH box helicase
  misc_feature (53)..(479): Homolog of NCBI NO: 40738604 NR Description: hypothetical protein AN5931.2 [Aspergillus
  misc_feature (53)..(480): Homolog of NCBI NO: 34903586 NR Description: putative ethylene-responsive RNA helicase
  misc_feature (53)..(480): Homolog of NCBI NO: 15221998 NR Description: ethylene-responsive DEAD box RNA helicase,
  misc_feature (34)..(511): Homolog of NCBI NO: 40742814 NR Description: hypothetical protein AN7424.2 [Aspergillus
  misc_feature (53)..(476): Homolog of NCBI NO: 10177293 NR Description: ATP-dependent RNA helicase-like protein
  misc_feature (53)..(479): Homolog of NCBI NO: 40738604 NR Description: hypothetical protein AN5931.2 [Aspergillus
  misc_feature (53)..(480): Homolog of NCBI NO: 15221998 NR Description: ethylene-responsive DEAD box RNA helicase,
  misc_feature (53)..(476): Homolog of NCBI NO: 10177293 NR Description: ATP-dependent RNA helicase-like protein
  misc_feature (1)..(517): Homolog of NCBI NO: 15222526 NR Description: DEAD/DEAH box helicase, putative [Arabidopsis
  misc_feature (107)..(517): Homolog of NCBI NO: 11358811 NR Description: RNA helicase RH5 [imported] - Arabidopsis
  misc_feature (33)..(516): Homolog of NCBI NO: 34394349 NR Description: putative RNA helicase [Oryza sativa (japonica
  misc_feature (1)..(511): Homolog of NCBI NO: 6321360 NR Description: ATP-dependent RNA helicase CA3 of the DEAD/DEAH
  misc_feature (6)..(511): Homolog of NCBI NO: 19113180 NR Description: putative atp-dependent rna helicase
  misc_feature (34)..(511): Homolog of NCBI NO: 40742814 NR Description: hypothetical protein AN7424.2 [Aspergillus
  misc_feature (53)..(480): Homolog of NCBI NO: 34903586 NR Description: putative ethylene-responsive RNA helicase
  misc_feature (6)..(511): Homolog of NCBI NO: 19113180 NR Description: putative atp-dependent rna helicase
  misc_feature (1)..(511): Homolog of NCBI NO: 6321360 NR Description: ATP-dependent RNA helicase CA3 of the DEAD/DEAH
  misc_feature (33)..(516): Homolog of NCBI NO: 34394349 NR Description: putative RNA helicase [Oryza sativa (japonica
  misc_feature (107)..(517): Homolog of NCBI NO: 11358811 NR Description: RNA helicase RH5 [imported] - Arabidopsis
  misc_feature (1)..(517): Homolog of NCBI NO: 15222526 NR Description: DEAD/DEAH box helicase, putative [Arabidopsis

SEQ ID NO: 49426 - DNA, 1839 bp, Arabidopsis thaliana; identical to SEQ ID NO: 45999
  misc_feature (1)..(1839): Ceres Seq. ID no. 12581062
  misc_feature: MA Experiment ID: 20000307 Result: Up-regulated in Transcription
  misc_feature: MA Experiment 20000307 PARAMETER Experiment Name: At_Germinating_Seeds_Sub_P Parameter: Age (hr) Value: 24 vs. 0
  misc_feature: MA Experiment 20000307 PARAMETER Experiment Name: At_Germinating_Seeds_Sub_P Parameter: Organism Value: A. thaliana
  misc_feature: MA Experiment 20000307 PARAMETER Experiment Name: At_Germinating_Seeds_Sub_P Parameter: Plant Line Value: WS
  misc_feature: MA Experiment 20000307 PARAMETER Experiment Name: At_Germinating_Seeds_Sub_P Parameter: Tissue Value: Germinating Seeds

SEQ ID NO: 49427 - protein, 486 aa, Arabidopsis thaliana; identical to SEQ ID NO: 46000
  peptide (1)..(486): Ceres Seq. ID no. 12581063
  misc_feature (202)..(381): Pfam Name: ATP synthase alpha/beta family, Pfam Description: ATP synthase alpha/beta family,
  misc_feature (202)..(381): Pfam Name: ATP synthase alpha/beta family, Pfam Description: ATP synthase alpha/beta family,
  misc_feature (4)..(486): Homolog of NCBI NO: 11266665 NR Description: H+-transporting two-sector ATPase (EC 3.6.3.14)
  misc_feature (1)..(486): Homolog of NCBI NO: 26986106 NR Description: vacuolar ATPase subunit B [Mesembryanthemum
  misc_feature (7)..(485): Homolog of NCBI NO: 2493132 NR Description: Vacuolar ATP synthase subunit B isoform 2
  misc_feature (1)..(484): Homolog of NCBI NO: 2493129 NR Description: Vacuolar ATP synthase subunit B isoform 1
  misc_feature (1)..(486): Homolog of NCBI NO: 15233891 NR Description: probable H+-transporting ATPase
  misc_feature (4)..(486): Homolog of NCBI NO: 11266665 NR Description: H+-transporting two-sector ATPase (EC 3.6.3.14)
  misc_feature (7)..(485): Homolog of NCBI NO: 2493132 NR Description: Vacuolar ATP synthase subunit B isoform 2
  misc_feature (1)..(486): Homolog of NCBI NO: 15233891 NR Description: probable H+-transporting ATPase
  misc_feature (1)..(486): Homolog of NCBI NO: 81637 NR Description: H+-exporting ATPase (EC 3.6.3.6) 57K chain -
  misc_feature (1)..(486): Homolog of NCBI NO: 15222929 NR Description: vacuolar ATP synthase subunit B
  misc_feature (240)..(486): Homolog of NCBI NO: 25290419 NR Description: protein T4O12.24 [imported] - Arabidopsis
  misc_feature (1)..(241): Homolog of NCBI NO: 25290419 NR Description: protein T4O12.24 [imported] - Arabidopsis
  misc_feature (1)..(486): Homolog of NCBI NO: 17065080 NR Description: Unknown protein [Arabidopsis thaliana]
  misc_feature (1)..(484): Homolog of NCBI NO: 2493129 NR Description: Vacuolar ATP synthase subunit B isoform 1
  misc_feature (1)..(486): Homolog of NCBI NO: 26986106 NR Description: vacuolar ATPase subunit B [Mesembryanthemum
  misc_feature (1)..(486): Homolog of NCBI NO: 17065080 NR Description: Unknown protein [Arabidopsis thaliana]
  misc_feature (1)..(241): Homolog of NCBI NO: 25290419 NR Description: protein T4O12.24 [imported] - Arabidopsis
  misc_feature (240)..(486): Homolog of NCBI NO: 25290419 NR Description: protein T4O12.24 [imported] - Arabidopsis
  misc_feature (1)..(486): Homolog of NCBI NO: 15222929 NR Description: vacuolar ATP synthase subunit B
  misc_feature (1)..(486): Homolog of NCBI NO: 81637 NR Description: H+-exporting ATPase (EC 3.6.3.6) 57K chain -

SEQ ID NO: 49428 - protein, 470 aa, Arabidopsis thaliana; identical to SEQ ID NO: 46001
  peptide (1)..(470): Ceres Seq. ID no. 12581064
  misc_feature (186)..(365): Pfam Name: ATP synthase alpha/beta family, Pfam Description: ATP synthase alpha/beta family,
  misc_feature (186)..(365): Pfam Name: ATP synthase alpha/beta family, Pfam Description: ATP synthase alpha/beta family,
  misc_feature (1)..(470): Homolog of NCBI NO: 11266665 NR Description: H+-transporting two-sector ATPase (EC 3.6.3.14)
  misc_feature (1)..(470): Homolog of NCBI NO: 26986106 NR Description: vacuolar ATPase subunit B [Mesembryanthemum
  misc_feature (1)..(469): Homolog of NCBI NO: 2493132 NR Description: Vacuolar ATP synthase subunit B isoform 2
  misc_feature (1)..(468): Homolog of NCBI NO: 2493129 NR Description: Vacuolar ATP synthase subunit B isoform 1
  misc_feature (1)..(470): Homolog of NCBI NO: 15233891 NR Description: probable H+-transporting ATPase
  misc_feature (1)..(470): Homolog of NCBI NO: 11266665 NR Description: H+-transporting two-sector ATPase (EC 3.6.3.14)
  misc_feature (1)..(469): Homolog of NCBI NO: 2493132 NR Description: Vacuolar ATP synthase subunit B isoform 2
  misc_feature (1)..(470): Homolog of NCBI NO: 15233891 NR Description: probable H+-transporting ATPase
  misc_feature (1)..(470): Homolog of NCBI NO: 81637 NR Description: H+-exporting ATPase (EC 3.6.3.6) 57K chain -
  misc_feature (1)..(470): Homolog of NCBI NO: 15222929 NR Description: vacuolar ATP synthase subunit B
  misc_feature (224)..(470): Homolog of NCBI NO: 25290419 NR Description: protein T4O12.24 [imported] - Arabidopsis
  misc_feature (1)..(225): Homolog of NCBI NO: 25290419 NR Description: protein T4O12.24 [imported] - Arabidopsis
  misc_feature (1)..(470): Homolog of NCBI NO: 17065080 NR Description: Unknown protein [Arabidopsis thaliana]
  misc_feature (1)..(468): Homolog of NCBI NO: 2493129 NR Description: Vacuolar ATP synthase subunit B isoform 1
  misc_feature (1)..(470): Homolog of NCBI NO: 26986106 NR Description: vacuolar ATPase subunit B [Mesembryanthemum
  misc_feature (1)..(470): Homolog of NCBI NO: 17065080 NR Description: Unknown protein [Arabidopsis thaliana]
  misc_feature (1)..(225): Homolog of NCBI NO: 25290419 NR Description: protein T4O12.24 [imported] - Arabidopsis
  misc_feature (224)..(470): Homolog of NCBI NO: 25290419 NR Description: protein T4O12.24 [imported] - Arabidopsis
  misc_feature (1)..(470): Homolog of NCBI NO: 15222929 NR Description: vacuolar ATP synthase subunit B
  misc_feature (1)..(470): Homolog of NCBI NO: 81637 NR Description: H+-exporting ATPase (EC 3.6.3.6) 57K chain -

SEQ ID NO: 49429 - protein, 388 aa, Arabidopsis thaliana; identical to SEQ ID NO: 46002
  peptide (1)..(388): Ceres Seq. ID no. 12581065
  misc_feature (104)..(283): Pfam Name: ATP synthase alpha/beta family, Pfam Description: ATP synthase alpha/beta family,
  misc_feature (104)..(283): Pfam Name: ATP synthase alpha/beta family, Pfam Description: ATP synthase alpha/beta family,
  misc_feature (1)..(388): Homolog of NCBI NO: 11266665 NR Description: H+-transporting two-sector ATPase (EC 3.6.3.14)
  misc_feature (1)..(388): Homolog of NCBI NO: 26986106 NR Description: vacuolar ATPase subunit B [Mesembryanthemum
  misc_feature (1)..(387): Homolog of NCBI NO: 2493132 NR Description: Vacuolar ATP synthase subunit B isoform 2
  misc_feature (1)..(386): Homolog of NCBI NO: 2493129 NR Description: Vacuolar ATP synthase subunit B isoform 1
  misc_feature (1)..(388): Homolog of NCBI NO: 15233891 NR Description: probable H+-transporting ATPase
  misc_feature (1)..(388): Homolog of NCBI NO: 11266665 NR Description: H+-transporting two-sector ATPase (EC 3.6.3.14)
  misc_feature (1)..(387): Homolog of NCBI NO: 2493132 NR Description: Vacuolar ATP synthase subunit B isoform 2
  misc_feature (1)..(388): Homolog of NCBI NO: 15233891 NR Description: probable H+-transporting ATPase
  misc_feature (1)..(388): Homolog of NCBI NO: 81637 NR Description: H+-exporting ATPase (EC 3.6.3.6) 57K chain -
  misc_feature (1)..(388): Homolog of NCBI NO: 15222929 NR Description: vacuolar ATP synthase subunit B
  misc_feature (142)..(388): Homolog of NCBI NO: 25290419 NR Description: protein T4O12.24 [imported] - Arabidopsis
  misc_feature (1)..(143): Homolog of NCBI NO: 25290419 NR Description: protein T4O12.24 [imported] - Arabidopsis
  misc_feature (1)..(388): Homolog of NCBI NO: 17065080 NR Description: Unknown protein [Arabidopsis thaliana]
  misc_feature (1)..(386): Homolog of NCBI NO: 2493129 NR Description: Vacuolar ATP synthase subunit B isoform 1
  misc_feature (1)..(388): Homolog of NCBI NO: 26986106 NR Description: vacuolar ATPase subunit B [Mesembryanthemum
  misc_feature (1)..(388): Homolog of NCBI NO: 17065080 NR Description: Unknown protein [Arabidopsis thaliana]
  misc_feature (1)..(143): Homolog of NCBI NO: 25290419 NR Description: protein T4O12.24 [imported] - Arabidopsis
  misc_feature (142)..(388): Homolog of NCBI NO: 25290419 NR Description: protein T4O12.24 [imported] - Arabidopsis
  misc_feature (1)..(388): Homolog of NCBI NO: 15222929 NR Description: vacuolar ATP synthase subunit B
  misc_feature (1)..(388): Homolog of NCBI NO: 81637 NR Description: H+-exporting ATPase (EC 3.6.3.6) 57K chain -

SEQ ID NO: 49430 - DNA, 1058 bp, Arabidopsis thaliana; identical to SEQ ID NO: 35374
  misc_feature (1)..(1058): Ceres Seq. ID no. 13592274
  misc_feature: MA Experiment ID: 108569 Result: Up-regulated in Transcription
  misc_feature: MA Experiment 108569 PARAMETER Experiment Name: At_0.001%_MeJA__cDNA_P Parameter: Timepoint (hr) Value: 6
  misc_feature: MA Experiment 108569 PARAMETER Experiment Name: At_0.001%_MeJA__cDNA_P Parameter: Tissue Value: Aerial
  misc_feature: MA Experiment 108569 PARAMETER Experiment Name: At_0.001%_MeJA__cDNA_P Parameter: Treatment Value: 0.001% MeJA vs. No Treatment
  misc_feature: MA Experiment ID: 108573 Result: Up-regulated in Transcription
  misc_feature: MA Experiment 108573 PARAMETER Experiment Name: At_Drought_cDNA_P Parameter: Timepoint (hr) Value: 6
  misc_feature: MA Experiment 108573 PARAMETER Experiment Name: At_Drought_cDNA_P Parameter: Tissue Value: Aerial
  misc_feature: MA Experiment 108573 PARAMETER Experiment Name: At_Drought_cDNA_P Parameter: Treatment Value: Drought vs. No Drought
  misc_feature: MA Experiment ID: 108574 Result: Up-regulated in Transcription
  misc_feature: MA Experiment 108574 PARAMETER Experiment Name: At_Wounding__cDNA_P Parameter: Timepoint (hr) Value: 1
  misc_feature: MA Experiment 108574 PARAMETER Experiment Name: At_Wounding__cDNA_P Parameter: Tissue Value: Aerial
  misc_feature: MA Experiment 108574 PARAMETER Experiment Name: At_Wounding__cDNA_P Parameter: Treatment Value: Wounding vs. No Wounding
  misc_feature: MA Experiment ID: 108579 Result: Up-regulated in Transcription
  misc_feature: MA Experiment 108579 PARAMETER Experiment Name: At_4deg_Cold_cDNA_P Parameter: Temperature (deg C) Value: 4 vs. 22
  misc_feature: MA Experiment 108579 PARAMETER Experiment Name: At_4deg_Cold_cDNA_P Parameter: Timepoint (hr) Value: 6
  misc_feature: MA Experiment 108579 PARAMETER Experiment Name: At_4deg_Cold_cDNA_P Parameter: Tissue Value: Aerial
  misc_feature: MA Experiment ID: 108595 Result: Up-regulated in Transcription
  misc_feature: MA Experiment 108595 PARAMETER Experiment Name: At_Ler-pi_Ovule_cDNA_P Parameter: Plant Line Value: null
  misc_feature: MA Experiment ID: 20000069 Result: Up-regulated in Transcription
  misc_feature: MA Experiment 20000069 PARAMETER Experiment Name: At_100uM_ABA_Mutants_cDNA_P Parameter: Plant Line Value: CS23
  misc_feature: MA Experiment 20000069 PARAMETER Experiment Name: At_100uM_ABA_Mutants_cDNA_P Parameter: Timepoint (hr) Value: 6
  misc_feature: MA Experiment 20000069 PARAMETER Experiment Name: At_100uM_ABA_Mutants_cDNA_P Parameter: Tissue Value: Aerial
  misc_feature: MA Experiment 20000069 PARAMETER Experiment Name: At_100uM_ABA_Mutants_cDNA_P Parameter: Treatment Value: 100uM ABA vs. No Treatment
  misc_feature: MA Experiment ID: 20000071 Result: Up-regulated in Transcription
  misc_feature: MA Experiment 20000071 PARAMETER Experiment Name: At_100uM_ABA_Mutants_cDNA_P Parameter: Plant Line Value: CS8104
  misc_feature: MA Experiment 20000071 PARAMETER Experiment Name: At_100uM_ABA_Mutants_cDNA_P Parameter: Timepoint (hr) Value: 6
  misc_feature: MA Experiment 20000071 PARAMETER Experiment Name: At_100uM_ABA_Mutants_cDNA_P Parameter: Tissue Value: Aerial
  misc_feature: MA Experiment 20000071 PARAMETER Experiment Name: At_100uM_ABA_Mutants_cDNA_P Parameter: Treatment Value: 100uM ABA vs. No Treatment
  misc_feature: MA Experiment ID: 20000089 Result: Down-regulated in Transcription
  misc_feature: MA Experiment ID: 20000185 Result: Down-regulated in Transcription
  misc_feature: MA Experiment 20000185 PARAMETER Experiment Name: At_Roots__P Parameter: Age (day) Value: 7 vs. 21
  misc_feature: MA Experiment 20000185 PARAMETER Experiment Name: At_Roots__P Parameter: Organism Value: A. thaliana
  misc_feature: MA Experiment 20000185 PARAMETER Experiment Name: At_Roots__P Parameter: Tissue Value: Roots vs. Whole Plant
  misc_feature: MA Experiment ID: 20000224 Result: Down-regulated in Transcription
  misc_feature: MA Experiment ID: 20000227 Result: Down-regulated in Transcription
  misc_feature: MA Experiment 20000227 PARAMETER Experiment Name: At_Root-Tips-vs-Tops_P Parameter: Tissue Value: Root Tips vs. Root Tops
  misc_feature: MA Experiment ID: 20000234 Result: Down-regulated in Transcription
  misc_feature: MA Experiment 20000234 PARAMETER Experiment Name: At_Siliques_P Parameter: Age (day) Value: 21
  misc_feature: MA Experiment 20000234 PARAMETER Experiment Name: At_Siliques_P Parameter: Organism Value: A. thaliana
  misc_feature: MA Experiment 20000234 PARAMETER Experiment Name: At_Siliques_P Parameter: Plant Line Value: WS
  misc_feature: MA Experiment 20000234 PARAMETER Experiment Name: At_Siliques_P Parameter: Tissue Value: Less Than 5mm Siliques vs. Whole Plant
  misc_feature: MA Experiment ID: 20000235 Result: Down-regulated in Transcription
  misc_feature: MA Experiment 20000235 PARAMETER Experiment Name: At_Siliques_P Parameter: Age (day) Value: 21
  misc_feature: MA Experiment 20000235 PARAMETER Experiment Name: At_Siliques_P Parameter: Organism Value: A. thaliana
  misc_feature: MA Experiment 20000235 PARAMETER Experiment Name: At_Siliques_P Parameter: Plant Line Value: WS
  misc_feature: MA Experiment 20000235 PARAMETER Experiment Name: At_Siliques_P Parameter: Tissue Value: 5-10mm Siliques vs. Whole Plant
  misc_feature: MA Experiment ID: 20000264 Result: Down-regulated in Transcription
  misc_feature: MA Experiment 20000264 PARAMETER Experiment Name: At_Open_Flower_P Parameter: Age (day) Value: 21
  misc_feature: MA Experiment 20000264 PARAMETER Experiment Name: At_Open_Flower_P Parameter: Plant Line Value: WS
  misc_feature: MA Experiment 20000264 PARAMETER Experiment Name: At_Open_Flower_P Parameter: Tissue Value: Open Flower vs. Whole Plant
  misc_feature: MA Experiment ID: 20000265 Result: Down-regulated in Transcription
  misc_feature: MA Experiment 20000265 PARAMETER Experiment Name: At_Open_Flower_P Parameter: Age (day) Value: 21
  misc_feature: MA Experiment 20000265 PARAMETER Experiment Name: At_Open_Flower_P Parameter: Plant Line Value: WS
  misc_feature: MA Experiment 20000265 PARAMETER Experiment Name: At_Open_Flower_P Parameter: Tissue Value: Closed Flower vs. Whole Plant
  misc_feature: MA Experiment ID: 20000286 Result: Down-regulated in Transcription
  misc_feature: MA Experiment 20000286 PARAMETER Experiment Name: At_Open_Flower_P Parameter: Age (day) Value: 21
  misc_feature: MA Experiment 20000286 PARAMETER Experiment Name: At_Open_Flower_P Parameter: Plant Line Value: WS
  misc_feature: MA Experiment 20000286 PARAMETER Experiment Name: At_Open_Flower_P Parameter: Tissue Value: Half Open vs. Whole Plant
  misc_feature: MA Experiment ID: 20000436 Result: Up-regulated in Transcription
  misc_feature: MA Experiment 20000436 PARAMETER Experiment Name: At_Drought_P Parameter: Age (day) Value: 7
  misc_feature: MA Experiment 20000436 PARAMETER Experiment Name: At_Drought_P Parameter: Organism Value: A. thaliana
  misc_feature: MA Experiment 20000436 PARAMETER Experiment Name: At_Drought_P Parameter: Plant Line Value: WS
  misc_feature: MA Experiment 20000436 PARAMETER Experiment Name: At_Drought_P Parameter: Timepoint (hr) Value: 12
  misc_feature: MA Experiment 20000436 PARAMETER Experiment Name: At_Drought_P Parameter: Tissue Value: Whole Plant
  misc_feature: MA Experiment 20000436 PARAMETER Experiment Name: At_Drought_P Parameter: Treatment Value: Drought vs. No Drought
  misc_feature: MA Experiment ID: 20000438 Result: Down-regulated in Transcription
  misc_feature: MA Experiment 20000438 PARAMETER Experiment Name: At_Shoots__P Parameter: Age (day) Value: 14
  misc_feature: MA Experiment 20000438 PARAMETER Experiment Name: At_Shoots__P Parameter: Tissue Value: Shoots vs. Whole Plant
  misc_feature: MA Experiment ID: 20000441 Result: Up-regulated in Transcription
  misc_feature: MA Experiment 20000441 PARAMETER Experiment Name: At_1uM_BR-BRZ__P Parameter: Tissue Value: Shoot Apices
  misc_feature: MA Experiment 20000441 PARAMETER Experiment Name: At_1uM_BR-BRZ__P Parameter: Treatment Value: 1uM BR vs. No Treatment
  misc_feature: MA Experiment ID: 20000495 Result: Down-regulated in Transcription
  misc_feature: MA Experiment 20000495 PARAMETER Experiment Name: At_Guard_Cells_P Parameter: Harvest Date Value: 8/2/2002
  misc_feature: MA Experiment 20000495 PARAMETER Experiment Name: At_Guard_Cells_P Parameter: Organism Value: A. thaliana
  misc_feature: MA Experiment 20000495 PARAMETER Experiment Name: At_Guard_Cells_P Parameter: Tissue Value: Guard Cells vs. Leaves
  misc_feature: MA Experiment ID: 20000574 Result: Down-regulated in Transcription
  misc_feature: MA Experiment 20000574 PARAMETER Experiment Name: At_100uM_ABA_Mutants__P Parameter: Organism Value: A. thaliana
  misc_feature: MA Experiment 20000574 PARAMETER Experiment Name: At_100uM_ABA_Mutants__P Parameter: Plant Line Value: CS23 vs. Ler wt
  misc_feature: MA Experiment 20000574 PARAMETER Experiment Name: At_100uM_ABA_Mutants__P Parameter: Timepoint (hr) Value: N/A
  misc_feature: MA Experiment 20000574 PARAMETER Experiment Name: At_100uM_ABA_Mutants__P Parameter: Tissue Value: Whole Plant
  misc_feature: MA Experiment 20000574 PARAMETER Experiment Name: At_100uM_ABA_Mutants__P Parameter: Treatment Value: None
  misc_feature: MA Experiment ID: 20000794 Result: Down-regulated in Transcription
  misc_feature: MA Experiment 20000794 PARAMETER Experiment Name: At_Petals_P Parameter: Age (day) Value: 23-25 days
  misc_feature: MA Experiment 20000794 PARAMETER Experiment Name: At_Petals_P Parameter: Plant Line Value: WS
  misc_feature: MA Experiment 20000794 PARAMETER Experiment Name: At_Petals_P Parameter: Tissue Value: Petals vs. Whole plant
  misc_feature: MA Experiment ID: 20001247 Result: Up-regulated in Transcription
  misc_feature: MA Experiment 20001247 PARAMETER Experiment Name: At_Far-red-induction_P Parameter: Age (day) Value: 7
  misc_feature: MA Experiment 20001247 PARAMETER Experiment Name: At_Far-red-induction_P Parameter: Light Value: Far-red vs. White
  misc_feature: MA Experiment 20001247 PARAMETER Experiment Name: At_Far-red-induction_P Parameter: Organism Value: A. thaliana
  misc_feature: MA Experiment 20001247 PARAMETER Experiment Name: At_Far-red-induction_P Parameter: Plant Line Value: Columbia
  misc_feature: MA Experiment 20001247 PARAMETER Experiment Name: At_Far-red-induction_P Parameter: Timepoint (hr) Value: 1
  misc_feature: MA Experiment 20001247 PARAMETER Experiment Name: At_Far-red-induction_P Parameter: Tissue Value: Whole Plant

SEQ ID NO: 49431 - protein, 222 aa, Arabidopsis thaliana; identical to SEQ ID NO: 35375
  peptide (1)..(222): Ceres Seq. ID no. 13592275
  misc_feature (22)..(86): Pfam Name: AP2 domain Pfam Description: AP2 domain
  misc_feature (22)..(86): Pfam Name: AP2 domain Pfam Description: AP2 domain
  misc_feature (167)..(220): Homolog of NCBI NO: 15218649 NR Description: ethylene responsive element binding factor 11,
  misc_feature (6)..(132): Homolog of NCBI NO: 25403338 NR Description: protein F3M18.20 [imported] - Arabidopsis
  misc_feature (6)..(132): Homolog of NCBI NO: 15218649 NR Description: ethylene responsive element binding factor 11,
  misc_feature (20)..(218): Homolog of NCBI NO: 30526297 NR Description: ethylene response factor 2 [Lycopersicon
  misc_feature (151)..(220): Homolog of NCBI NO: 15219215 NR Description: ethylene responsive element binding factor 8
  misc_feature (167)..(220): Homolog of NCBI NO: 15218649 NR Description: ethylene responsive element binding factor 11,
  misc_feature (6)..(132): Homolog of NCBI NO: 15218649 NR Description: ethylene responsive element binding factor 11,
  misc_feature (151)..(220): Homolog of NCBI NO: 15219215 NR Description: ethylene responsive element binding factor 8
  misc_feature (1)..(222): Homolog of NCBI NO: 15232526 NR Description: ethylene responsive element binding factor 4
  misc_feature (1)..(207): Homolog of NCBI NO: 2281635 NR Description: AP2 domain containing protein RAP2.5 [Arabidopsis
  misc_feature (1)..(153): Homolog of NCBI NO: 20340233 NR Description: ethylene responsive element binding factor 4-like
  misc_feature (179)..(220): Homolog of NCBI NO: 20340233 NR Description: ethylene responsive element binding factor 4-like
  misc_feature (4)..(113): Homolog of NCBI NO: 15219215 NR Description: ethylene responsive element binding factor 8
  misc_feature (20)..(218): Homolog of NCBI NO: 30526297 NR Description: ethylene response factor 2 [Lycopersicon
  misc_feature (6)..(132): Homolog of NCBI NO: 25403338 NR Description: protein F3M18.20 [imported] - Arabidopsis
  misc_feature (4)..(113): Homolog of NCBI NO: 15219215 NR Description: ethylene responsive element binding factor 8
  misc_feature (179)..(220): Homolog of NCBI NO: 20340233 NR Description: ethylene responsive element binding factor 4-like
  misc_feature (1)..(153): Homolog of NCBI NO: 20340233 NR Description: ethylene responsive element binding factor 4-like
  misc_feature (1)..(207): Homolog of NCBI NO: 2281635 NR Description: AP2 domain containing protein RAP2.5 [Arabidopsis
  misc_feature (1)..(222): Homolog of NCBI NO: 15232526 NR Description: ethylene responsive element binding factor 4

SEQ ID NO: 49432 - protein, 219 aa, Arabidopsis thaliana; identical to SEQ ID NO: 35376
  peptide (1)..(219): Ceres Seq. ID no. 13592276
  misc_feature (19)..(83): Pfam Name: AP2 domain Pfam Description: AP2 domain
  misc_feature (19)..(83): Pfam Name: AP2 domain Pfam Description: AP2 domain
  misc_feature (164)..(217): Homolog of NCBI NO: 15218649 NR Description: ethylene responsive element binding factor 11,
  misc_feature (3)..(129): Homolog of NCBI NO: 25403338 NR Description: protein F3M18.20 [imported] - Arabidopsis
  misc_feature (3)..(129): Homolog of NCBI NO: 15218649 NR Description: ethylene responsive element binding factor 11,
  misc_feature (17)..(215): Homolog of NCBI NO: 30526297 NR Description: ethylene response factor 2 [Lycopersicon
  misc_feature (148)..(217): Homolog of NCBI NO: 15219215 NR Description: ethylene responsive element binding factor 8
  misc_feature (164)..(217): Homolog of NCBI NO: 15218649 NR Description: ethylene responsive element binding factor 11,
  misc_feature (3)..(129): Homolog of NCBI NO: 15218649 NR Description: ethylene responsive element binding factor 11,
  misc_feature (148)..(217): Homolog of NCBI NO: 15219215 NR Description: ethylene responsive element binding factor 8
  misc_feature (1)..(219): Homolog of NCBI NO: 15232526 NR Description: ethylene responsive element binding factor 4
  misc_feature (1)..(204): Homolog of NCBI NO: 2281635 NR Description: AP2 domain containing protein RAP2.5 [Arabidopsis
  misc_feature (1)..(150): Homolog of NCBI NO: 20340233 NR Description: ethylene responsive element binding factor 4-like
  misc_feature (176)..(217): Homolog of NCBI NO: 20340233 NR Description: ethylene responsive element binding factor 4-like
  misc_feature (1)..(110): Homolog of NCBI NO: 15219215 NR Description: ethylene responsive element binding factor 8
  misc_feature (17)..(215): Homolog of NCBI NO: 30526297 NR Description: ethylene response factor 2 [Lycopersicon
  misc_feature (3)..(129): Homolog of NCBI NO: 25403338 NR Description: protein F3M18.20 [imported] - Arabidopsis
  misc_feature (1)..(110): Homolog of NCBI NO: 15219215 NR Description: ethylene responsive element binding factor 8
  misc_feature (176)..(217): Homolog of NCBI NO: 20340233 NR Description: ethylene responsive element binding factor 4-like
  misc_feature (1)..(150): Homolog of NCBI NO: 20340233 NR Description: ethylene responsive element binding factor 4-like
  misc_feature (1)..(204): Homolog of NCBI NO: 2281635 NR Description: AP2 domain containing protein RAP2.5 [Arabidopsis
  misc_feature (1)..(219): Homolog of NCBI NO: 15232526 NR Description: ethylene responsive element binding factor 4

SEQ ID NO: 49433 - DNA, 2127 bp, Arabidopsis thaliana; identical to SEQ ID NO: 42669
  misc_feature (1)..(2127): Ceres Seq. ID no. 13646490
  misc_feature: MA Experiment ID: 20000307 Result: Down-regulated in Transcription
  misc_feature: MA Experiment 20000307 PARAMETER Experiment Name: At_Germinating_Seeds_Sub_P Parameter: Age (hr) Value: 24 vs. 0
  misc_feature: MA Experiment 20000307 PARAMETER Experiment Name: At_Germinating_Seeds_Sub_P Parameter: Organism Value: A. thaliana
  misc_feature: MA Experiment 20000307 PARAMETER Experiment Name: At_Germinating_Seeds_Sub_P Parameter: Plant Line Value: WS
  misc_feature: MA Experiment 20000307 PARAMETER Experiment Name: At_Germinating_Seeds_Sub_P Parameter: Tissue Value: Germinating Seeds
  misc_feature: MA Experiment ID: 20000327 Result: Down-regulated in Transcription
  misc_feature: MA Experiment 20000327 PARAMETER Experiment Name: At_42deg_Heat_Sub_P Parameter: Age (day) Value: 14
  misc_feature: MA Experiment 20000327 PARAMETER Experiment Name: At_42deg_Heat_Sub_P Parameter: Organism Value: A. thaliana
  misc_feature: MA Experiment 20000327 PARAMETER Experiment Name: At_42deg_Heat_Sub_P Parameter: Plant Line Value: WS
  misc_feature: MA Experiment 20000327 PARAMETER Experiment Name: At_42deg_Heat_Sub_P Parameter: Temperature (deg C) Value: 42 vs. 22
  misc_feature: MA Experiment 20000327 PARAMETER Experiment Name: At_42deg_Heat_Sub_P Parameter: Timepoint (hr) Value: 1
  misc_feature: MA Experiment 20000327 PARAMETER Experiment Name: At_42deg_Heat_Sub_P Parameter: Tissue Value: Aerial
  misc_feature: MA Experiment ID: 20000328 Result: Down-regulated in Transcription
  misc_feature: MA Experiment 20000328 PARAMETER Experiment Name: At_42deg_Heat_Sub_P Parameter: Age (day) Value: 14
  misc_feature: MA Experiment 20000328 PARAMETER Experiment Name: At_42deg_Heat_Sub_P Parameter: Organism Value: A. thaliana
  misc_feature: MA Experiment 20000328 PARAMETER Experiment Name: At_42deg_Heat_Sub_P Parameter: Plant Line Value: WS
  misc_feature: MA Experiment 20000328 PARAMETER Experiment Name: At_42deg_Heat_Sub_P Parameter: Temperature (deg C) Value: 42 vs. 22
  misc_feature: MA Experiment 20000328 PARAMETER Experiment Name: At_42deg_Heat_Sub_P Parameter: Timepoint (hr) Value: 6
  misc_feature: MA Experiment 20000328 PARAMETER Experiment Name: At_42deg_Heat_Sub_P Parameter: Tissue Value: Aerial
  misc_feature: MA Experiment ID: 20000329 Result: Down-regulated in Transcription
  misc_feature: MA Experiment 20000329 PARAMETER Experiment Name: At_4deg_Cold_Sub_P Parameter: Age (day) Value: 14
  misc_feature: MA Experiment 20000329 PARAMETER Experiment Name: At_4deg_Cold_Sub_P Parameter: Organism Value: A. thaliana
  misc_feature: MA Experiment 20000329 PARAMETER Experiment Name: At_4deg_Cold_Sub_P Parameter: Plant Line Value: WS
  misc_feature: MA Experiment 20000329 PARAMETER Experiment Name: At_4deg_Cold_Sub_P Parameter: Temperature (deg C) Value: 4 vs. 22
  misc_feature: MA Experiment 20000329 PARAMETER Experiment Name: At_4deg_Cold_Sub_P Parameter: Timepoint (hr) Value: 6
  misc_feature: MA Experiment 20000329 PARAMETER Experiment Name: At_4deg_Cold_Sub_P Parameter: Tissue Value: Aerial
  misc_feature: MA Experiment ID: 20000332 Result: Down-regulated in Transcription
  misc_feature: MA Experiment 20000332 PARAMETER Experiment Name: At_4deg_Cold_Sub_P Parameter: Age (day) Value: 14
  misc_feature: MA Experiment 20000332 PARAMETER Experiment Name: At_4deg_Cold_Sub_P Parameter: Organism Value: A. thaliana
  misc_feature: MA Experiment 20000332 PARAMETER Experiment Name: At_4deg_Cold_Sub_P Parameter: Plant Line Value: WS
  misc_feature: MA Experiment 20000332 PARAMETER Experiment Name: At_4deg_Cold_Sub_P Parameter: Temperature (deg C) Value: 4 vs. 22
  misc_feature: MA Experiment 20000332 PARAMETER Experiment Name: At_4deg_Cold_Sub_P Parameter: Timepoint (hr) Value: 2
  misc_feature: MA Experiment 20000332 PARAMETER Experiment Name: At_4deg_Cold_Sub_P Parameter: Tissue Value: Aerial

SEQ ID NO: 49434 - protein, 533 aa, Arabidopsis thaliana; identical to SEQ ID NO: 42670
  peptide (1)..(533): Ceres Seq. ID no. 13646491
  misc_feature (143)..(440): Pfam Name: GRAS family transcription factor Pfam Description: GRAS family transcription factor
  misc_feature (143)..(440): Pfam Name: GRAS family transcription factor Pfam Description: GRAS family transcription factor
  misc_feature (143)..(440): Pfam Name: GRAS family transcription factor Pfam Description: GRAS family transcription factor
  misc_feature (98)..(532): Homolog of NCBI NO: 15529230 NR Description: At2g01570/F2I9.19 [Arabidopsis thaliana]
  misc_feature (1)..(94): Homolog of NCBI NO: 2569940 NR Description: GRS protein [Arabidopsis thaliana]
  misc_feature (98)..(532): Homolog of NCBI NO: 2569940 NR Description: GRS protein [Arabidopsis thaliana]
  misc_feature (1)..(94): Homolog of NCBI NO: 15226311 NR Description: gibberellin response modulator (RGA1)
  misc_feature (98)..(532): Homolog of NCBI NO: 15226311 NR Description: gibberellin response modulator (RGA1)
  misc_feature (98)..(532): Homolog of NCBI NO: 15529230 NR Description: At2g01570/F2I9.19 [Arabidopsis thaliana]
  misc_feature (98)..(532): Homolog of NCBI NO: 2569940 NR Description: GRS protein [Arabidopsis thaliana]
  misc_feature (98)..(532): Homolog of NCBI NO: 15226311 NR Description: gibberellin response modulator (RGA1)
  misc_feature (1)..(94): Homolog of NCBI NO: 15226311 NR Description: gibberellin response modulator (RGA1)
  misc_feature (98)..(532): Homolog of NCBI NO: 2569940 NR Description: GRS protein [Arabidopsis thaliana]
  misc_feature (1)..(94): Homolog of NCBI NO: 2569940 NR Description: GRS protein [Arabidopsis thaliana]
  misc_feature (98)..(532): Homolog of NCBI NO: 15529230 NR Description: At2g01570/F2I9.19 [Arabidopsis thaliana]
  misc_feature (1)..(533): Homolog of NCBI NO: 15223951 NR Description: gibberellin response modulator (GAI/RGA2)
  misc_feature (1)..(533): Homolog of NCBI NO: 2569938 NR Description: GAI [Arabidopsis thaliana]
  misc_feature (1)..(533): Homolog of NCBI NO: 2339980 NR Description: RGA2 protein [Arabidopsis thaliana]
  misc_feature (98)..(532): Homolog of NCBI NO: 2339978 NR Description: RGA1 protein [Arabidopsis thaliana]
  misc_feature (1)..(94): Homolog of NCBI NO: 2339978 NR Description: RGA1 protein [Arabidopsis thaliana]
  misc_feature (1)..(533): Homolog of NCBI NO: 15223951 NR Description: gibberellin response modulator (GAI/RGA2)
  misc_feature (1)..(533): Homolog of NCBI NO: 2569938 NR Description: GAI [Arabidopsis thaliana]
  misc_feature (1)..(533): Homolog of NCBI NO: 2339980 NR Description: RGA2 protein [Arabidopsis thaliana]
  misc_feature (98)..(532): Homolog of NCBI NO: 2339978 NR Description: RGA1 protein [Arabidopsis thaliana]
  misc_feature (1)..(94): Homolog of NCBI NO: 2339978 NR Description: RGA1 protein [Arabidopsis thaliana]
  misc_feature (98)..(532): Homolog of NCBI NO: 15226311 NR Description: gibberellin response modulator (RGA1)
  misc_feature (1)..(94): Homolog of NCBI NO: 15226311 NR Description: gibberellin response modulator (RGA1)
  misc_feature (1)..(94): Homolog of NCBI NO: 2569940 NR Description: GRS protein [Arabidopsis thaliana]
  misc_feature (1)..(94): Homolog of NCBI NO: 2339978 NR Description: RGA1 protein [Arabidopsis thaliana]
  misc_feature (98)..(532): Homolog of NCBI NO: 2339978 NR Description: RGA1 protein [Arabidopsis thaliana]
  misc_feature (1)..(533): Homolog of NCBI NO: 2339980 NR Description: RGA2 protein [Arabidopsis thaliana]
  misc_feature (1)..(533): Homolog of NCBI NO: 2569938 NR Description: GAI [Arabidopsis thaliana]
  misc_feature (1)..(533): Homolog of NCBI NO: 15223951 NR Description: gibberellin response modulator (GAI/RGA2)

SEQ ID NO: 49435 - protein, 518 aa, Arabidopsis thaliana; identical to SEQ ID NO: 42671
  peptide (1)..(518): Ceres Seq. ID no. 13646492
  misc_feature (128)..(425): Pfam Name: GRAS family transcription factor Pfam Description: GRAS family transcription factor
  misc_feature (128)..(425): Pfam Name: GRAS family transcription factor Pfam Description: GRAS family transcription factor
  misc_feature (128)..(425): Pfam Name: GRAS family transcription factor Pfam Description: GRAS family transcription factor
  misc_feature (83)..(517): Homolog of NCBI NO: 15529230 NR Description: At2g01570/F2I9.19 [Arabidopsis thaliana]
  misc_feature (1)..(79): Homolog of NCBI NO: 2569940 NR Description: GRS protein [Arabidopsis thaliana]
  misc_feature (83)..(517): Homolog of NCBI NO: 2569940 NR Description: GRS protein [Arabidopsis thaliana]
  misc_feature (1)..(79): Homolog of NCBI NO: 15226311 NR Description: gibberellin response modulator (RGA1)
  misc_feature (83)..(517): Homolog of NCBI NO: 15226311 NR Description: gibberellin response modulator (RGA1)
  misc_feature (83)..(517): Homolog of NCBI NO: 15529230 NR Description: At2g01570/F2I9.19 [Arabidopsis thaliana]
  misc_feature (83)..(517): Homolog of NCBI NO: 2569940 NR Description: GRS protein [Arabidopsis thaliana]
  misc_feature (83)..(517): Homolog of NCBI NO: 15226311 NR Description: gibberellin response modulator (RGA1)
  misc_feature (1)..(79): Homolog of NCBI NO: 15226311 NR Description: gibberellin response modulator (RGA1)
  misc_feature (83)..(517): Homolog of NCBI NO: 2569940 NR Description: GRS protein [Arabidopsis thaliana]
  misc_feature (1)..(79): Homolog of NCBI NO: 2569940 NR Description: GRS protein [Arabidopsis thaliana]
  misc_feature (83)..(517): Homolog of NCBI NO: 15529230 NR Description: At2g01570/F2I9.19 [Arabidopsis thaliana]
  misc_feature (1)..(518): Homolog of NCBI NO: 15223951 NR Description: gibberellin response modulator (GAI/RGA2)
  misc_feature (1)..(518): Homolog of NCBI NO: 2569938 NR Description: GAI [Arabidopsis thaliana]
  misc_feature (1)..(518): Homolog of NCBI NO: 2339980 NR Description: RGA2 protein [Arabidopsis thaliana]
  misc_feature (83)..(517): Homolog of NCBI NO: 2339978 NR Description: RGA1 protein [Arabidopsis thaliana]
  misc_feature (1)..(79): Homolog of NCBI NO: 2339978 NR Description: RGA1 protein [Arabidopsis thaliana]
  misc_feature (1)..(518): Homolog of NCBI NO: 15223951 NR Description: gibberellin response modulator (GAI/RGA2)
  misc_feature (1)..(518): Homolog of NCBI NO: 2569938 NR Description: GAI [Arabidopsis thaliana]
  misc_feature (1)..(518): Homolog of NCBI NO: 2339980 NR Description: RGA2 protein [Arabidopsis thaliana]
  misc_feature (83)..(517): Homolog of NCBI NO: 2339978 NR Description: RGA1 protein [Arabidopsis thaliana]
  misc_feature (1)..(79): Homolog of NCBI NO: 2339978 NR Description: RGA1 protein [Arabidopsis thaliana]
  misc_feature (83)..(517): Homolog of NCBI NO: 15226311 NR Description: gibberellin response modulator (RGA1)
  misc_feature (1)..(79): Homolog of NCBI NO: 15226311 NR Description: gibberellin response modulator (RGA1)
  misc_feature (1)..(79): Homolog of NCBI NO: 2569940 NR Description: GRS protein [Arabidopsis thaliana]
  misc_feature (1)..(79): Homolog of NCBI NO: 2339978 NR Description: RGA1 protein [Arabidopsis thaliana]
  misc_feature (83)..(517): Homolog of NCBI NO: 2339978 NR Description: RGA1 protein [Arabidopsis thaliana]
  misc_feature (1)..(518): Homolog of NCBI NO: 2339980 NR Description: RGA2 protein [Arabidopsis thaliana]
  misc_feature (1)..(518): Homolog of NCBI NO: 2569938 NR Description: GAI [Arabidopsis thaliana]
  misc_feature (1)..(518): Homolog of NCBI NO: 15223951 NR Description: gibberellin response modulator (GAI/RGA2)

SEQ ID NO: 49436 - protein, 517 aa, Arabidopsis thaliana; identical to SEQ ID NO: 42672
  peptide (1)..(517): Ceres Seq. ID no. 13646493
  misc_feature (127)..(424): Pfam Name: GRAS family transcription factor Pfam Description: GRAS family transcription factor
  misc_feature (127)..(424): Pfam Name: GRAS family transcription factor Pfam Description: GRAS family transcription factor
  misc_feature (127)..(424): Pfam Name: GRAS family transcription factor Pfam Description: GRAS family transcription factor
  misc_feature (82)..(516): Homolog of NCBI NO: 15529230 NR Description: At2g01570/F2I9.19 [Arabidopsis thaliana]
  misc_feature (1)..(78): Homolog of NCBI NO: 2569940 NR Description: GRS protein [Arabidopsis thaliana]
  misc_feature (82)..(516): Homolog of NCBI NO: 2569940 NR Description: GRS protein [Arabidopsis thaliana]
  misc_feature (1)..(78): Homolog of NCBI NO: 15226311 NR Description: gibberellin response modulator (RGA1)
  misc_feature (82)..(516): Homolog of NCBI NO: 15226311 NR Description: gibberellin response modulator (RGA1)
  misc_feature (82)..(516): Homolog of NCBI NO: 15529230 NR Description: At2g01570/F2I9.19 [Arabidopsis thaliana]
  misc_feature (82)..(516): Homolog of NCBI NO: 2569940 NR Description: GRS protein [Arabidopsis thaliana]
  misc_feature (82)..(516): Homolog of NCBI NO: 15226311 NR Description: gibberellin response modulator (RGA1)
  misc_feature (1)..(78): Homolog of NCBI NO: 15226311 NR Description: gibberellin response modulator (RGA1)
  misc_feature (82)..(516): Homolog of NCBI NO: 2569940 NR Description: GRS protein [Arabidopsis thaliana]
  misc_feature (1)..(78): Homolog of NCBI NO: 2569940 NR Description: GRS protein [Arabidopsis thaliana]
  misc_feature (82)..(516): Homolog of NCBI NO: 15529230 NR Description: At2g01570/F2I9.19 [Arabidopsis thaliana]
  misc_feature (1)..(517): Homolog of NCBI NO: 15223951 NR Description: gibberellin response modulator (GAI/RGA2)
  misc_feature (1)..(517): Homolog of NCBI NO: 2569938 NR Description: GAI [Arabidopsis thaliana]
  misc_feature (1)..(517): Homolog of NCBI NO: 2339980 NR Description: RGA2 protein [Arabidopsis thaliana]
  misc_feature (82)..(516): Homolog of NCBI NO: 2339978 NR Description: RGA1 protein [Arabidopsis thaliana]
  misc_feature (1)..(78): Homolog of NCBI NO: 2339978 NR Description: RGA1 protein [Arabidopsis thaliana]
  misc_feature (1)..(517): Homolog of NCBI NO: 15223951 NR Description: gibberellin response modulator (GAI/RGA2)
  misc_feature (1)..(517): Homolog of NCBI NO: 2569938 NR Description: GAI [Arabidopsis thaliana]
  misc_feature (1)..(517): Homolog of NCBI NO: 2339980 NR Description: RGA2 protein [Arabidopsis thaliana]
  misc_feature (82)..(516): Homolog of NCBI NO: 2339978 NR Description: RGA1 protein [Arabidopsis thaliana]
  misc_feature (1)..(78): Homolog of NCBI NO: 2339978 NR Description: RGA1 protein [Arabidopsis thaliana]
  misc_feature (82)..(516): Homolog of NCBI NO: 15226311 NR Description: gibberellin response modulator (RGA1)
  misc_feature (1)..(78): Homolog of NCBI NO: 15226311 NR Description: gibberellin response modulator (RGA1)
  misc_feature (1)..(78): Homolog of NCBI NO: 2569940 NR Description: GRS protein [Arabidopsis thaliana]
  misc_feature (1)..(78): Homolog of NCBI NO: 2339978 NR Description: RGA1 protein [Arabidopsis thaliana]
  misc_feature (82)..(516): Homolog of NCBI NO: 2339978 NR Description: RGA1 protein [Arabidopsis thaliana]
  misc_feature (1)..(517): Homolog of NCBI NO: 2339980 NR Description: RGA2 protein [Arabidopsis thaliana]
  misc_feature (1)..(517): Homolog of NCBI NO: 2569938 NR Description: GAI [Arabidopsis thaliana]
  misc_feature (1)..(517): Homolog of NCBI NO: 15223951 NR Description: gibberellin response modulator (GAI/RGA2)

SEQ ID NO: 49437 - DNA, 1497 bp, Arabidopsis thaliana
  misc_feature (1)..(1497): Ceres Seq. ID no. 12591183
  misc_feature: MA Experiment ID: 20000182 Result: Up-regulated in Transcription
  misc_feature: MA Experiment 20000182 PARAMETER Experiment Name: At_2mM_SA_P Parameter: Age (day) Value: 14
  misc_feature: MA Experiment 20000182 PARAMETER Experiment Name: At_2mM_SA_P Parameter: Organism Value: A. thaliana
  misc_feature: MA Experiment 20000182 PARAMETER Experiment Name: At_2mM_SA_P Parameter: Plant Line Value: WS
  misc_feature: MA Experiment 20000182 PARAMETER Experiment Name: At_2mM_SA_P Parameter: Timepoint (hr) Value: 6
  misc_feature: MA Experiment 20000182 PARAMETER Experiment Name: At_2mM_SA_P Parameter: Tissue Value: Aerial
  misc_feature: MA Experiment 20000182 PARAMETER Experiment Name: At_2mM_SA_P Parameter: Treatment Value: 2mM SA vs. No Treatment
  misc_feature: MA Experiment ID: 20000438 Result: Down-regulated in Transcription
  misc_feature: MA Experiment 20000438 PARAMETER Experiment Name: At_Shoots__P Parameter: Age (day) Value: 14
  misc_feature: MA Experiment 20000438 PARAMETER Experiment Name: At_Shoots__P Parameter: Tissue Value: Shoots vs. Whole Plant
  misc_feature: MA Experiment ID: 20001247 Result: Up-regulated in Transcription
  misc_feature: MA Experiment 20001247 PARAMETER Experiment Name: At_Far-red-induction_P Parameter: Age (day) Value: 7
  misc_feature: MA Experiment 20001247 PARAMETER Experiment Name: At_Far-red-induction_P Parameter: Light Value: Far-red vs. White
  misc_feature: MA Experiment 20001247 PARAMETER Experiment Name: At_Far-red-induction_P Parameter: Organism Value: A. thaliana
  misc_feature: MA Experiment 20001247 PARAMETER Experiment Name: At_Far-red-induction_P Parameter: Plant Line Value: Columbia
  misc_feature: MA Experiment 20001247 PARAMETER Experiment Name: At_Far-red-induction_P Parameter: Timepoint (hr) Value: 1
  misc_feature: MA Experiment 20001247 PARAMETER Experiment Name: At_Far-red-induction_P Parameter: Tissue Value: Whole Plant
  misc_feature: MA Experiment ID: 20001911 Result: Up-regulated in Transcription
  misc_feature: MA Experiment 20001911 PARAMETER Experiment Name: At_Drought_Reproduction_P Parameter: Age (day) Value: 40
  misc_feature: MA Experiment 20001911 PARAMETER Experiment Name: At_Drought_Reproduction_P Parameter: Organism Value: A. thaliana
  misc_feature: MA Experiment 20001911 PARAMETER Experiment Name: At_Drought_Reproduction_P Parameter: Plant Line Value: WS
  misc_feature: MA Experiment 20001911 PARAMETER Experiment Name: At_Drought_Reproduction_P Parameter: Timepoint (day) Value: 10
  misc_feature: MA Experiment 20001911 PARAMETER Experiment Name: At_Drought_Reproduction_P Parameter: Tissue Value: Flowers
  misc_feature: MA Experiment 20001911 PARAMETER Experiment Name: At_Drought_Reproduction_P Parameter: Treatment Value: Drought vs. No Drought
aagtctccgtctcagcctctcttcgccgtctgatgtctgatcttctaggtcacctccacaaattcgaacaagaatttgtctttatgtgcaaaaccaaaatgggagtcaatgcttcagagccaaaacgaacacgatcgcgaccaagtcaatcgcaggggaggcatccgtcgacgagacgatctccgtcaacgagcaacaccggcacaacaacaaccacgacgacatcgaattctaacaaaactggtgcctcctcttcctcctccggtgcggcttcttcctcagtcgctagtcgaacatctctcgctagtctccgagaatccttaccggaaaatcctcacatatacaacgtctccgagattcgtgccgctaccaacaatttcctcgctaatcgcttatcttcctcttcctctaaagcctcctggcgttgcaatttaagagggaaagaagtcgttgtgtttcagagaaagtttaggcgaaggatcgacacggatgagcttagagatcgtctttcagatatttgccggagccaccacggaagcatcattaatctactcggcgcttctgtttccggcggtggaagagtaggaggaggaggaggaggaggaggtgatcacatctacttggtctacgaatacgtcaacggagcatctctagctgattgcttgagaaaccctaagaaccctaaatttacagttctatcgaattggacttcacggattcaaattgcaacagatctagctcatggactcgattacatccacaacaaaaccggattaaagatcgaaaacctagttcacaatcacatcaagagctcggcggtgatcgtgacggagccagatttcaacgctaagatctgtcacttcggaactgcgcagctttgcggcgaaacagatgaaatgtcactggagagagacgaatcgagaaattcaaggcgatctgatagcagagcgatcagattcgaaggagttagaggttacatgtcgccggaatttcaaaatttgggaatcgctactcagaaatcggatgtttacgctttcggagttatgatgttggagcttctctcaggcgaggagccgttgaagtacaggtatgataaagccacaggagatttcgagcggacgtcggtgattgaaacggcgagagcggcgatcgaagatggagatggtgatagagatggaagactgaggaggtggatggatcggagattggaggattcgtttcctgtgacggtggtggagaagttaacgaggctagcgttggattgtgttcaggatgatccagtgaataggccggagatgggaagagtcgccggaaaaatatcacaactgtatttagaatcggaaaaatggtcggcgaatatgaaacggccaacggatatcaccgtctctttcgctcccagatgagggaatcttcttattcctttttttcaaaagatgtaaattcgatagtaggcttattattattttctcccaaattagtgatgatttggatgtaatg

SEQ ID NO: 49438 - protein, 466 aa, Arabidopsis thaliana
  peptide (1)..(466): Ceres Seq. ID no. 12591184
  misc_feature (114)..(291): Homolog of NCBI NO: 15233387 NR Description: serine/threonine kinase-like protein; protein id:
  misc_feature (205)..(446): Homolog of NCBI NO: 34485514 NR Description: LysM domain-containing receptor-like kinase 1
  misc_feature (205)..(292): Homolog of NCBI NO: 38175551 NR Description: receptor protein kinase PERK1-like protein
  misc_feature (318)..(452): Homolog of NCBI NO: 38175551 NR Description: receptor protein kinase PERK1-like protein
  misc_feature (81)..(441): Homolog of NCBI NO: 39545656 NR Description: OJ000114_01.11 [Oryza sativa (japonica
  misc_feature (202)..(450): Homolog of NCBI NO: 5441881 NR Description: Similar to putative receptor kinase. (AC002332)
  misc_feature (307)..(453): Homolog of NCBI NO: 34913770 NR Description: protein kinase-like [Oryza sativa (japonica
  misc_feature (109)..(298): Homolog of NCBI NO: 34913770 NR Description: protein kinase-like [Oryza sativa (japonica
  misc_feature (33)..(466): Homolog of NCBI NO: 11357615 NR Description: hypothetical protein F24I3.200 - Arabidopsis
  misc_feature (11)..(466): Homolog of NCBI NO: 22331831 NR Description: putative protein
VSVSASLRRLMSDLLGHLHKFEQEFVFMCKTKMGVNASEPKRTRSRPSQSQGRHPSTRRSPSTSNTGTTTTTTTSNSNKTGASSSSSGAASSSVASRTSLASLRESLPENPHIYNVSEIRAATNNFLANRLSSSSSKASWRCNLRGKEVVVFQRKFRRRIDTDELRDRLSDICRSHHGSIINLLGASVSGGGRVGGGGGGGGDHIYLVYEYVNGASLADCLRNPKNPKFTVLSNWTSRIQIATDLAHGLDYIHNKTGLKIENLVHNHIKSSAVIVTEPDFNAKICHFGTAQLCGETDEMSLERDESRNSRRSDSRAIRFEGVRGYMSPEFQNLGIATQKSDVYAFGVMMLELLSGEEPLKYRYDKATGDFERTSVIETARAAIEDGDGDRDGRLRRWMDRRLEDSFPVTVVEKLTRLALDCVQDDPVNRPEMGRVAGKISQLYLESEKWSANMKRPTDITVSFAPR

SEQ ID NO: 49439 - protein, 456 aa, Arabidopsis thaliana
  peptide (1)..(456): Ceres Seq. ID no. 12591185
  misc_feature (104)..(281): Homolog of NCBI NO: 15233387 NR Description: serine/threonine kinase-like protein; protein id:
  misc_feature (195)..(436): Homolog of NCBI NO: 34485514 NR Description: LysM domain-containing receptor-like kinase 1
  misc_feature (195)..(282): Homolog of NCBI NO: 38175551 NR Description: receptor protein kinase PERK1-like protein
  misc_feature (308)..(442): Homolog of NCBI NO: 38175551 NR Description: receptor protein kinase PERK1-like protein
  misc_feature (71)..(431): Homolog of NCBI NO: 39545656 NR Description: OJ000114_01.11 [Oryza sativa (japonica
  misc_feature (192)..(440): Homolog of NCBI NO: 5441881 NR Description: Similar to putative receptor kinase. (AC002332)
  misc_feature (297)..(443): Homolog of NCBI NO: 34913770 NR Description: protein kinase-like [Oryza sativa (japonica
  misc_feature (99)..(288): Homolog of NCBI NO: 34913770 NR Description: protein kinase-like [Oryza sativa (japonica
  misc_feature (23)..(456): Homolog of NCBI NO: 11357615 NR Description: hypothetical protein F24I3.200 - Arabidopsis
  misc_feature (1)..(456): Homolog of NCBI NO: 22331831 NR Description: putative protein
MSDLLGHLHKFEQEFVFMCKTKMGVNASEPKRTRSRPSQSQGRHPSTRRSPSTSNTGTTTTTTTSNSNKTGASSSSSGAASSSVASRTSLASLRESLPENPHIYNVSEIRAATNNFLANRLSSSSSKASWRCNLRGKEVVVFQRKFRRRIDTDELRDRLSDICRSHHGSIINLLGASVSGGGRVGGGGGGGGDHIYLVYEYVNGASLADCLRNPKNPKFTVLSNWTSRIQIATDLAHGLDYIHNKTGLKIENLVHNHIKSSAVIVTEPDFNAKICHFGTAQLCGETDEMSLERDESRNSRRSDSRAIRFEGVRGYMSPEFQNLGIATQKSDVYAFGVMMLELLSGEEPLKYRYDKATGDFERTSVIETARAAIEDGDGDRDGRLRRWMDRRLEDSFPVTVVEKLTRLALDCVQDDPVNRPEMGRVAGKISQLYLESEKWSANMKRPTDITVSFAPR

SEQ ID NO: 49440 - protein, 439 aa, Arabidopsis thaliana
  peptide (1)..(439): Ceres Seq. ID no. 12591186
  misc_feature (87)..(264): Homolog of NCBI NO: 15233387 NR Description: serine/threonine kinase-like protein; protein id:
  misc_feature (178)..(419): Homolog of NCBI NO: 34485514 NR Description: LysM domain-containing receptor-like kinase 1
  misc_feature (178)..(265): Homolog of NCBI NO: 38175551 NR Description: receptor protein kinase PERK1-like protein
  misc_feature (291)..(425): Homolog of NCBI NO: 38175551 NR Description: receptor protein kinase PERK1-like protein
  misc_feature (54)..(414): Homolog of NCBI NO: 39545656 NR Description: OJ000114_01.11 [Oryza sativa (japonica
  misc_feature (175)..(423): Homolog of NCBI NO: 5441881 NR Description: Similar to putative receptor kinase. (AC002332)
  misc_feature (280)..(426): Homolog of NCBI NO: 34913770 NR Description: protein kinase-like [Oryza sativa (japonica
  misc_feature (82)..(271): Homolog of NCBI NO: 34913770 NR Description: protein kinase-like [Oryza sativa (japonica
  misc_feature (6)..(439): Homolog of NCBI NO: 11357615 NR Description: hypothetical protein F24I3.200 - Arabidopsis
  misc_feature (1)..(439): Homolog of NCBI NO: 22331831 NR Description: putative protein
MCKTKMGVNASEPKRTRSRPSQSQGRHPSTRRSPSTSNTGTTTTTTTSNSNKTGASSSSSGAASSSVASRTSLASLRESLPENPHIYNVSEIRAATNNFLANRLSSSSSKASWRCNLRGKEVVVFQRKFRRRIDTDELRDRLSDICRSHHGSIINLLGASVSGGGRVGGGGGGGGDHIYLVYEYVNGASLADCLRNPKNPKFTVLSNWTSRIQIATDLAHGLDYIHNKTGLKIENLVHNHIKSSAVIVTEPDFNAKICHFGTAQLCGETDEMSLERDESRNSRRSDSRAIRFEGVRGYMSPEFQNLGIATQKSDVYAFGVMMLELLSGEEPLKYRYDKATGDFERTSVIETARAAIEDGDGDRDGRLRRWMDRRLEDSFPVTVVEKLTRLALDCVQDDPVNRPEMGRVAGKISQLYLESEKWSANMKRPTDITVSFAPR

SEQ ID NO: 49441 - DNA, 1203 bp, Arabidopsis thaliana; identical to SEQ ID NO: 45276
  misc_feature (1)..(1203): Ceres Seq. ID no. 12560595
  misc_feature: MA Experiment ID: 20000437 Result: Up-regulated in Transcription
  misc_feature: MA Experiment 20000437 PARAMETER Experiment Name: At_Drought_P Parameter: Age (day) Value: 8
  misc_feature: MA Experiment 20000437 PARAMETER Experiment Name: At_Drought_P Parameter: Organism Value: A. thaliana
  misc_feature: MA Experiment 20000437 PARAMETER Experiment Name: At_Drought_P Parameter: Plant Line Value: WS
  misc_feature: MA Experiment 20000437 PARAMETER Experiment Name: At_Drought_P Parameter: Timepoint (hr) Value: 24
  misc_feature: MA Experiment 20000437 PARAMETER Experiment Name: At_Drought_P Parameter: Tissue Value: Whole Plant
  misc_feature: MA Experiment 20000437 PARAMETER Experiment Name: At_Drought_P Parameter: Treatment Value: Drought vs. No Drought
  misc_feature: MA Experiment ID: 20000495 Result: Down-regulated in Transcription
  misc_feature: MA Experiment 20000495 PARAMETER Experiment Name: At_Guard_Cells_P Parameter: Harvest Date Value: 8/2/2002
  misc_feature: MA Experiment 20000495 PARAMETER Experiment Name: At_Guard_Cells_P Parameter: Organism Value: A. thaliana
  misc_feature: MA Experiment 20000495 PARAMETER Experiment Name: At_Guard_Cells_P Parameter: Tissue Value: Guard Cells vs. Leaves
  misc_feature: MA Experiment ID: 20000794 Result: Down-regulated in Transcription
  misc_feature: MA Experiment 20000794 PARAMETER Experiment Name: At_Petals_P Parameter: Age (day) Value: 23-25 days
  misc_feature: MA Experiment 20000794 PARAMETER Experiment Name: At_Petals_P Parameter: Plant Line Value: WS
  misc_feature: MA Experiment 20000794 PARAMETER Experiment Name: At_Petals_P Parameter: Tissue Value: Petals vs. Whole plant

SEQ ID NO: 49442 - protein, 314 aa, Arabidopsis thaliana; identical to SEQ ID NO: 45277
  peptide (1)..(314): Ceres Seq. ID no. 12560596
  misc_feature (148)..(295): Pfam Name: Yip1 domain Pfam Description: Yip1 domain
  misc_feature (148)..(295): Pfam Name: Yip1 domain Pfam Description: Yip1 domain
  misc_feature (138)..(311): Homolog of NCBI NO: 26337383 NR Description: unnamed protein product [Mus musculus]
  misc_feature (138)..(311): Homolog of NCBI NO: 28603852 NR Description: hypothetical protein MGC21416 [Homo sapiens]
  misc_feature (123)..(314): Homolog of NCBI NO: 24581631 NR Description: CG3652-PA [Drosophila melanogaster]
  misc_feature (138)..(312): Homolog of NCBI NO: 39580726 NR Description: Hypothetical protein CBG08721 [Caenorhabditis
  misc_feature (138)..(312): Homolog of NCBI NO: 17509487 NR Description: Yeast YIP1 protein like [Caenorhabditis elegans]
  misc_feature (138)..(311): Homolog of NCBI NO: 26337383 NR Description: unnamed protein product [Mus musculus]
  misc_feature (123)..(314): Homolog of NCBI NO: 24581631 NR Description: CG3652-PA [Drosophila melanogaster]
  misc_feature (138)..(312): Homolog of NCBI NO: 17509487 NR Description: Yeast YIP1 protein like [Caenorhabditis elegans]
  misc_feature (1)..(314): Homolog of NCBI NO: 7486761 NR Description: hypothetical protein F9N11.110 - Arabidopsis
  misc_feature (35)..(314): Homolog of NCBI NO: 18417560 NR Description: hypothetical protein common family
  misc_feature (35)..(314): Homolog of NCBI NO: 18398861 NR Description: Expressed protein
  misc_feature (35)..(314): Homolog of NCBI NO: 21553537 NR Description: unknown [Arabidopsis thaliana]
  misc_feature (35)..(302): Homolog of NCBI NO: 34908612 NR Description: P0677H08.6 [Oryza sativa (japonica
  misc_feature (138)..(312): Homolog of NCBI NO: 39580726 NR Description: Hypothetical protein CBG08721 [Caenorhabditis
  misc_feature (138)..(311): Homolog of NCBI NO: 28603852 NR Description: hypothetical protein MGC21416 [Homo sapiens]
  misc_feature (35)..(302): Homolog of NCBI NO: 34908612 NR Description: P0677H08.6 [Oryza sativa (japonica
  misc_feature (35)..(314): Homolog of NCBI NO: 21553537 NR Description: unknown [Arabidopsis thaliana]
  misc_feature (35)..(314): Homolog of NCBI NO: 18398861 NR Description: Expressed protein
  misc_feature (35)..(314): Homolog of NCBI NO: 18417560 NR Description: hypothetical protein common family
  misc_feature (1)..(314): Homolog of NCBI NO: 7486761 NR Description: hypothetical protein F9N11.110 - Arabidopsis

SEQ ID NO: 49443 - protein, 280 aa, Arabidopsis thaliana; identical to SEQ ID NO: 45278
  peptide (1)..(280): Ceres Seq. ID no. 12560597
  misc_feature (114)..(261): Pfam Name: Yip1 domain Pfam Description: Yip1 domain
  misc_feature (114)..(261): Pfam Name: Yip1 domain Pfam Description: Yip1 domain
  misc_feature (104)..(277): Homolog of NCBI NO: 26337383 NR Description: unnamed protein product [Mus musculus]
  misc_feature (104)..(277): Homolog of NCBI NO: 28603852 NR Description: hypothetical protein MGC21416 [Homo sapiens]
  misc_feature (89)..(280): Homolog of NCBI NO: 24581631 NR Description: CG3652-PA [Drosophila melanogaster]
  misc_feature (104)..(278): Homolog of NCBI NO: 39580726 NR Description: Hypothetical protein CBG08721 [Caenorhabditis
  misc_feature (104)..(278): Homolog of NCBI NO: 17509487 NR Description: Yeast YIP1 protein like [Caenorhabditis elegans]
  misc_feature (104)..(277): Homolog of NCBI NO: 26337383 NR Description: unnamed protein product [Mus musculus]
  misc_feature (89)..(280): Homolog of NCBI NO: 24581631 NR Description: CG3652-PA [Drosophila melanogaster]
  misc_feature (104)..(278): Homolog of NCBI NO: 17509487 NR Description: Yeast YIP1 protein like [Caenorhabditis elegans]
  misc_feature (1)..(280): Homolog of NCBI NO: 7486761 NR Description: hypothetical protein F9N11.110 - Arabidopsis
  misc_feature (1)..(280): Homolog of NCBI NO: 18417560 NR Description: hypothetical protein common family
  misc_feature (1)..(280): Homolog of NCBI NO: 18398861 NR Description: Expressed protein
  misc_feature (1)..(280): Homolog of NCBI NO: 21553537 NR Description: unknown [Arabidopsis thaliana]
  misc_feature (1)..(268): Homolog of NCBI NO: 34908612 NR Description: P0677H08.6 [Oryza sativa (japonica
  misc_feature (104)..(278): Homolog of NCBI NO: 39580726 NR Description: Hypothetical protein CBG08721 [Caenorhabditis
  misc_feature (104)..(277): Homolog of NCBI NO: 28603852 NR Description: hypothetical protein MGC21416 [Homo sapiens]
  misc_feature (1)..(268): Homolog of NCBI NO: 34908612 NR Description: P0677H08.6 [Oryza sativa (japonica
  misc_feature (1)..(280): Homolog of NCBI NO: 21553537 NR Description: unknown [Arabidopsis thaliana]
  misc_feature (1)..(280): Homolog of NCBI NO: 18398861 NR Description: Expressed protein
  misc_feature (1)..(280): Homolog of NCBI NO: 18417560 NR Description: hypothetical protein common family
  misc_feature (1)..(280): Homolog of NCBI NO: 7486761 NR Description: hypothetical protein F9N11.110 - Arabidopsis

SEQ ID NO: 49444 - protein, 258 aa, Arabidopsis thaliana; identical to SEQ ID NO: 45279
  peptide (1)..(258): Ceres Seq. ID no. 12560598
  misc_feature (92)..(239): Pfam Name: Yip1 domain Pfam Description: Yip1 domain
  misc_feature (92)..(239): Pfam Name: Yip1 domain Pfam Description: Yip1 domain
  misc_feature (82)..(255): Homolog of NCBI NO: 26337383 NR Description: unnamed protein product [Mus musculus]
  misc_feature (82)..(255): Homolog of NCBI NO: 28603852 NR Description: hypothetical protein MGC21416 [Homo sapiens]
  misc_feature (67)..(258): Homolog of NCBI NO: 24581631 NR Description: CG3652-PA [Drosophila melanogaster]
  misc_feature (82)..(256): Homolog of NCBI NO: 39580726 NR Description: Hypothetical protein CBG08721 [Caenorhabditis
  misc_feature (82)..(256): Homolog of NCBI NO: 17509487 NR Description: Yeast YIP1 protein like [Caenorhabditis elegans]
  misc_feature (82)..(255): Homolog of NCBI NO: 26337383 NR Description: unnamed protein product [Mus musculus]
  misc_feature (67)..(258): Homolog of NCBI NO: 24581631 NR Description: CG3652-PA [Drosophila melanogaster]
  misc_feature (82)..(256): Homolog of NCBI NO: 17509487 NR Description: Yeast YIP1 protein like [Caenorhabditis elegans]
  misc_feature (1)..(258): Homolog of NCBI NO: 7486761 NR Description: hypothetical protein F9N11.110 - Arabidopsis
  misc_feature (1)..(258): Homolog of NCBI NO: 18417560 NR Description: hypothetical protein common family
  misc_feature (1)..(258): Homolog of NCBI NO: 18398861 NR Description: Expressed protein
  misc_feature (1)..(258): Homolog of NCBI NO: 21553537 NR Description: unknown [Arabidopsis thaliana]
  misc_feature (1)..(246): Homolog of NCBI NO: 34908612 NR Description: P0677H08.6 [Oryza sativa (japonica
  misc_feature (82)..(256): Homolog of NCBI NO: 39580726 NR Description: Hypothetical protein CBG08721 [Caenorhabditis
  misc_feature (82)..(255): Homolog of NCBI NO: 28603852 NR Description: hypothetical protein MGC21416 [Homo sapiens]
  misc_feature (1)..(246): Homolog of NCBI NO: 34908612 NR Description: P0677H08.6 [Oryza sativa (japonica
  misc_feature (1)..(258): Homolog of NCBI NO: 21553537 NR Description: unknown [Arabidopsis thaliana]
  misc_feature (1)..(258): Homolog of NCBI NO: 18398861 NR Description: Expressed protein
  misc_feature (1)..(258): Homolog of NCBI NO: 18417560 NR Description: hypothetical protein common family
  misc_feature (1)..(258): Homolog of NCBI NO: 7486761 NR Description: hypothetical protein F9N11.110 - Arabidopsis

SEQ ID NO: 49445 - DNA, 3249 bp, Arabidopsis thaliana; identical to SEQ ID NO: 47098
  misc_feature (1)..(3249): Ceres Seq. ID no. 13578479
  misc_feature: MA Experiment ID: 20000171 Result: Down-regulated in Transcription
  misc_feature: MA Experiment 20000171 PARAMETER Experiment Name: At_42deg_Heat_P Parameter: Age (day) Value: 14
  misc_feature: MA Experiment 20000171 PARAMETER Experiment Name: At_42deg_Heat_P Parameter: Organism Value: A. thaliana
  misc_feature: MA Experiment 20000171 PARAMETER Experiment Name: At_42deg_Heat_P Parameter: Plant Line Value: WS
  misc_feature: MA Experiment 20000171 PARAMETER Experiment Name: At_42deg_Heat_P Parameter: Temperature (deg C) Value: 42 vs. 22
  misc_feature: MA Experiment 20000171 PARAMETER Experiment Name: At_42deg_Heat_P Parameter: Timepoint (hr) Value: 1
  misc_feature: MA Experiment 20000171 PARAMETER Experiment Name: At_42deg_Heat_P Parameter: Tissue Value: Aerial
  misc_feature: MA Experiment ID: 20000173 Result: Down-regulated in Transcription
  misc_feature: MA Experiment 20000173 PARAMETER Experiment Name: At_42deg_Heat_P Parameter: Age (day) Value: 14
  misc_feature: MA Experiment 20000173 PARAMETER Experiment Name: At_42deg_Heat_P Parameter: Organism Value: A. thaliana
  misc_feature: MA Experiment 20000173 PARAMETER Experiment Name: At_42deg_Heat_P Parameter: Plant Line Value: WS
  misc_feature: MA Experiment 20000173 PARAMETER Experiment Name: At_42deg_Heat_P Parameter: Temperature (deg C) Value: 42 vs. 22
  misc_feature: MA Experiment 20000173 PARAMETER Experiment Name: At_42deg_Heat_P Parameter: Timepoint (hr) Value: 6
  misc_feature: MA Experiment 20000173 PARAMETER Experiment Name: At_42deg_Heat_P Parameter: Tissue Value: Aerial
  misc_feature: MA Experiment ID: 20000180 Result: Up-regulated in Transcription
  misc_feature: MA Experiment 20000180 PARAMETER Experiment Name: At_Germinating_Seeds_P Parameter: Age (hr) Value: 24 vs. 0
  misc_feature: MA Experiment 20000180 PARAMETER Experiment Name: At_Germinating_Seeds_P Parameter: Tissue Value: Germinating Seeds
  misc_feature: MA Experiment ID: 20000182 Result: Down-regulated in Transcription
  misc_feature: MA Experiment 20000182 PARAMETER Experiment Name: At_2mM_SA_P Parameter: Age (day) Value: 14
  misc_feature: MA Experiment 20000182 PARAMETER Experiment Name: At_2mM_SA_P Parameter: Organism Value: A. thaliana
  misc_feature: MA Experiment 20000182 PARAMETER Experiment Name: At_2mM_SA_P Parameter: Plant Line Value: WS
  misc_feature: MA Experiment 20000182 PARAMETER Experiment Name: At_2mM_SA_P Parameter: Timepoint (hr) Value: 6
  misc_feature: MA Experiment 20000182 PARAMETER Experiment Name: At_2mM_SA_P Parameter: Tissue Value: Aerial
  misc_feature: MA Experiment 20000182 PARAMETER Experiment Name: At_2mM_SA_P Parameter: Treatment Value: 2mM SA vs. No Treatment
  misc_feature: MA Experiment ID: 20000185 Result: Down-regulated in Transcription
  misc_feature: MA Experiment 20000185 PARAMETER Experiment Name: At_Roots__P Parameter: Age (day) Value: 7 vs. 21
  misc_feature: MA Experiment 20000185 PARAMETER Experiment Name: At_Roots__P Parameter: Organism Value: A. thaliana
  misc_feature: MA Experiment 20000185 PARAMETER Experiment Name: At_Roots__P Parameter: Tissue Value: Roots vs. Whole Plant
  misc_feature: MA Experiment ID: 20000234 Result: Down-regulated in Transcription
  misc_feature: MA Experiment 20000234 PARAMETER Experiment Name: At_Siliques_P Parameter: Age (day) Value: 21
  misc_feature: MA Experiment 20000234 PARAMETER Experiment Name: At_Siliques_P Parameter: Organism Value: A. thaliana
  misc_feature: MA Experiment 20000234 PARAMETER Experiment Name: At_Siliques_P Parameter: Plant Line Value: WS
  misc_feature: MA Experiment 20000234 PARAMETER Experiment Name: At_Siliques_P Parameter: Tissue Value: Less Than 5mm Siliques vs. Whole Plant
  misc_feature: MA Experiment ID: 20000264 Result: Down-regulated in Transcription
  misc_feature: MA Experiment 20000264 PARAMETER Experiment Name: At_Open_Flower_P Parameter: Age (day) Value: 21
  misc_feature: MA Experiment 20000264 PARAMETER Experiment Name: At_Open_Flower_P Parameter: Plant Line Value: WS
  misc_feature: MA Experiment 20000264 PARAMETER Experiment Name: At_Open_Flower_P Parameter: Tissue Value: Open Flower vs. Whole Plant
  misc_feature: MA Experiment ID: 20000265 Result: Down-regulated in Transcription
  misc_feature: MA Experiment 20000265 PARAMETER Experiment Name: At_Open_Flower_P Parameter: Age (day) Value: 21
  misc_feature: MA Experiment 20000265 PARAMETER Experiment Name: At_Open_Flower_P Parameter: Plant Line Value: WS
  misc_feature: MA Experiment 20000265 PARAMETER Experiment Name: At_Open_Flower_P Parameter: Tissue Value: Closed Flower vs. Whole Plant
  misc_feature: MA Experiment ID: 20000286 Result: Down-regulated in Transcription
  misc_feature: MA Experiment 20000286 PARAMETER Experiment Name: At_Open_Flower_P Parameter: Age (day) Value: 21
  misc_feature: MA Experiment 20000286 PARAMETER Experiment Name: At_Open_Flower_P Parameter: Plant Line Value: WS
  misc_feature: MA Experiment 20000286 PARAMETER Experiment Name: At_Open_Flower_P Parameter: Tissue Value: Half Open vs. Whole Plant
  misc_feature: MA Experiment ID: 20000438 Result: Up-regulated in Transcription
  misc_feature: MA Experiment 20000438 PARAMETER Experiment Name: At_Shoots__P Parameter: Age (day) Value: 14
  misc_feature: MA Experiment 20000438 PARAMETER Experiment Name: At_Shoots__P Parameter: Tissue Value: Shoots vs. Whole Plant
  misc_feature: MA Experiment ID: 20000439 Result: Down-regulated in Transcription
  misc_feature: MA Experiment 20000439 PARAMETER Experiment Name: At_Roots__P Parameter: Age (day) Value: 14 vs. 21
  misc_feature: MA Experiment 20000439 PARAMETER Experiment Name: At_Roots__P Parameter: Organism Value: A. thaliana
  misc_feature: MA Experiment 20000439 PARAMETER Experiment Name: At_Roots__P Parameter: Tissue Value: Roots vs. Whole Plant
  misc_feature: MA Experiment ID: 20000794 Result: Down-regulated in Transcription
  misc_feature: MA Experiment 20000794 PARAMETER Experiment Name: At_Petals_P Parameter: Age (day) Value: 23-25 days
  misc_feature: MA Experiment 20000794 PARAMETER Experiment Name: At_Petals_P Parameter: Plant Line Value: WS
  misc_feature: MA Experiment 20000794 PARAMETER Experiment Name: At_Petals_P Parameter: Tissue Value: Petals vs. Whole plant
  misc_feature: MA Experiment ID: 20001450 Result: Up-regulated in Transcription
  misc_feature: MA Experiment 20001450 PARAMETER Experiment Name: At_Far-red-induction_P Parameter: Age (day) Value: 7
  misc_feature: MA Experiment 20001450 PARAMETER Experiment Name: At_Far-red-induction_P Parameter: Light Value: Far-red vs. White
  misc_feature: MA Experiment 20001450 PARAMETER Experiment Name: At_Far-red-induction_P Parameter: Organism Value: A. thaliana
  misc_feature: MA Experiment 20001450 PARAMETER Experiment Name: At_Far-red-induction_P Parameter: Plant Line Value: Columbia
  misc_feature: MA Experiment 20001450 PARAMETER Experiment Name: At_Far-red-induction_P Parameter: Timepoint (hr) Value: 8
  misc_feature: MA Experiment 20001450 PARAMETER Experiment Name: At_Far-red-induction_P Parameter: Tissue Value: Whole Plant
  misc_feature: MA Experiment ID: 20001557 Result: Down-regulated in Transcription
  misc_feature: MA Experiment 20001557 PARAMETER Experiment Name: At_Drought_Soil_Dry_P Parameter: Age (day) Value: 27
  misc_feature: MA Experiment 20001557 PARAMETER Experiment Name: At_Drought_Soil_Dry_P Parameter: Organism Value: A. thaliana
  misc_feature: MA Experiment 20001557 PARAMETER Experiment Name: At_Drought_Soil_Dry_P Parameter: Plant Line Value: WS
  misc_feature: MA Experiment 20001557 PARAMETER Experiment Name: At_Drought_Soil_Dry_P Parameter: Post Timepoint (hr) Value: 3
  misc_feature: MA Experiment 20001557 PARAMETER Experiment Name: At_Drought_Soil_Dry_P Parameter: Post-Treatment Value: Re-Water vs. No Drought
  misc_feature: MA Experiment 20001557 PARAMETER Experiment Name: At_Drought_Soil_Dry_P Parameter: Timepoint (day) Value: 13
  misc_feature: MA Experiment 20001557 PARAMETER Experiment Name: At_Drought_Soil_Dry_P Parameter: Treatment Value: Drought vs. No Drought
  misc_feature: MA Experiment ID: 20001560 Result: Down-regulated in Transcription
  misc_feature: MA Experiment 20001560 PARAMETER Experiment Name: At_Drought_Soil_Dry_P Parameter: Age (day) Value: 28
  misc_feature: MA Experiment 20001560 PARAMETER Experiment Name: At_Drought_Soil_Dry_P Parameter: Organism Value: A. thaliana
  misc_feature: MA Experiment 20001560 PARAMETER Experiment Name: At_Drought_Soil_Dry_P Parameter: Plant Line Value: WS
  misc_feature: MA Experiment 20001560 PARAMETER Experiment Name: At_Drought_Soil_Dry_P Parameter: Post Timepoint (hr) Value: None
  misc_feature: MA Experiment 20001560 PARAMETER Experiment Name: At_Drought_Soil_Dry_P Parameter: Post-Treatment Value: None
  misc_feature: MA Experiment 20001560 PARAMETER Experiment Name: At_Drought_Soil_Dry_P Parameter: Timepoint (day) Value: 14
  misc_feature: MA Experiment 20001560 PARAMETER Experiment Name: At_Drought_Soil_Dry_P Parameter: Treatment Value: Drought vs. No Drought
  misc_feature: MA Experiment ID: 20001904 Result: Down-regulated in Transcription
  misc_feature: MA Experiment 20001904 PARAMETER Experiment Name: At_Drought_Reproduction_P Parameter: Age (day) Value: 37
  misc_feature: MA Experiment 20001904 PARAMETER Experiment Name: At_Drought_Reproduction_P Parameter: Organism Value: A. thaliana
  misc_feature: MA Experiment 20001904 PARAMETER Experiment Name: At_Drought_Reproduction_P Parameter: Plant Line Value: WS
  misc_feature: MA Experiment 20001904 PARAMETER Experiment Name: At_Drought_Reproduction_P Parameter: Timepoint (day) Value: 7
  misc_feature: MA Experiment 20001904 PARAMETER Experiment Name: At_Drought_Reproduction_P Parameter: Tissue Value: Rosettes
  misc_feature: MA Experiment 20001904 PARAMETER Experiment Name: At_Drought_Reproduction_P Parameter: Treatment Value: Drought vs. No Drought

SEQ ID NO: 49446 - protein, 996 aa, Arabidopsis thaliana; identical to SEQ ID NO: 47099
  peptide (1)..(996): Ceres Seq. ID no. 13578480
  misc_feature (663)..(952): Pfam Name: Protein kinase domain Pfam Description: Protein kinase domain
  misc_feature (663)..(952): Pfam Name: Protein kinase domain Pfam Description: Protein kinase domain
  misc_feature (618)..(814): Homolog of NCBI NO: 15238798 NR Description: protein kinase, putative [Arabidopsis thaliana]
  misc_feature (171)..(668): Homolog of NCBI NO: 27807565 NR Description: phytochrome 3 [Onoclea sensibilis]
  misc_feature (172)..(668): Homolog of NCBI NO: 27807561 NR Description: phytochrome 3 [Dryopteris filix-mas]
  misc_feature (29)..(488): Homolog of NCBI NO: 34224025 NR Description: phototropin-like protein [Pisum sativum]
  misc_feature (190)..(961): Homolog of NCBI NO: 7522091 NR Description: PHY3 protein - maidenhair fern
  misc_feature (618)..(814): Homolog of NCBI NO: 15238798 NR Description: protein kinase, putative [Arabidopsis thaliana]
  misc_feature (172)..(668): Homolog of NCBI NO: 27807561 NR Description: phytochrome 3 [Dryopteris filix-mas]
  misc_feature (190)..(961): Homolog of NCBI NO: 7522091 NR Description: PHY3 protein - maidenhair fern
  misc_feature (148)..(972): Homolog of NCBI NO: 7489818 NR Description: serine/threonine protein kinase (EC 2.7.1.-),
  misc_feature (449)..(996): Homolog of NCBI NO: 30697007 NR Description: non phototropic hypocotyl 1-related [Arabidopsis
  misc_feature (62)..(384): Homolog of NCBI NO: 30697007 NR Description: non phototropic hypocotyl 1-related [Arabidopsis
  misc_feature (102)..(985): Homolog of NCBI NO: 7804485 NR Description: phototropin [Adiantum capillus-veneris]
  misc_feature (190)..(961): Homolog of NCBI NO: 19570333 NR Description: PHY3 [Adiantum capillus-veneris]
  misc_feature (29)..(488): Homolog of NCBI NO: 34224025 NR Description: phototropin-like protein [Pisum sativum]
  misc_feature (171)..(668): Homolog of NCBI NO: 27807565 NR Description: phytochrome 3 [Onoclea sensibilis]
  misc_feature (190)..(961): Homolog of NCBI NO: 19570333 NR Description: PHY3 [Adiantum capillus-veneris]
  misc_feature (102)..(985): Homolog of NCBI NO: 7804485 NR Description: phototropin [Adiantum capillus-veneris]
  misc_feature (62)..(384): Homolog of NCBI NO: 30697007 NR Description: non phototropic hypocotyl 1-related [Arabidopsis
  misc_feature (449)..(996): Homolog of NCBI NO: 30697007 NR Description: non phototropic hypocotyl 1-related [Arabidopsis
  misc_feature (148)..(972): Homolog of NCBI NO: 7489818 NR Description: serine/threonine protein kinase (EC 2.7.1.-),

SEQ ID NO: 49447 - protein, 911 aa, Arabidopsis thaliana; identical to SEQ ID NO: 47100
  peptide (1)..(911): Ceres Seq. ID no. 13578481
  misc_feature (578)..(867): Pfam Name: Protein kinase domain Pfam Description: Protein kinase domain
  misc_feature (578)..(867): Pfam Name: Protein kinase domain Pfam Description: Protein kinase domain
  misc_feature (533)..(729): Homolog of NCBI NO: 15238798 NR Description: protein kinase, putative [Arabidopsis thaliana]
  misc_feature (86)..(583): Homolog of NCBI NO: 27807565 NR Description: phytochrome 3 [Onoclea sensibilis]
  misc_feature (87)..(583): Homolog of NCBI NO: 27807561 NR Description: phytochrome 3 [Dryopteris filix-mas]
  misc_feature (1)..(403): Homolog of NCBI NO: 34224025 NR Description: phototropin-like protein [Pisum sativum]
  misc_feature (105)..(876): Homolog of NCBI NO: 7522091 NR Description: PHY3 protein - maidenhair fern
  misc_feature (533)..(729): Homolog of NCBI NO: 15238798 NR Description: protein kinase, putative [Arabidopsis thaliana]
  misc_feature (87)..(583): Homolog of NCBI NO: 27807561 NR Description: phytochrome 3 [Dryopteris filix-mas]
  misc_feature (105)..(876): Homolog of NCBI NO: 7522091 NR Description: PHY3 protein - maidenhair fern
  misc_feature (63)..(887): Homolog of NCBI NO: 7489818 NR Description: serine/threonine protein kinase (EC 2.7.1.-),
  misc_feature (364)..(911): Homolog of NCBI NO: 30697007 NR Description: non phototropic hypocotyl 1-related [Arabidopsis
  misc_feature (1)..(299): Homolog of NCBI NO: 30697007 NR Description: non phototropic hypocotyl 1-related [Arabidopsis
  misc_feature (17)..(900): Homolog of NCBI NO: 7804485 NR Description: phototropin [Adiantum capillus-veneris]
  misc_feature (105)..(876): Homolog of NCBI NO: 19570333 NR Description: PHY3 [Adiantum capillus-veneris]
  misc_feature (1)..(403): Homolog of NCBI NO: 34224025 NR Description: phototropin-like protein [Pisum sativum]
  misc_feature (86)..(583): Homolog of NCBI NO: 27807565 NR Description: phytochrome 3 [Onoclea sensibilis]
  misc_feature (105)..(876): Homolog of NCBI NO: 19570333 NR Description: PHY3 [Adiantum capillus-veneris]
  misc_feature (17)..(900): Homolog of NCBI NO: 7804485 NR Description: phototropin [Adiantum capillus-veneris]
  misc_feature (1)..(299): Homolog of NCBI NO: 30697007 NR Description: non phototropic hypocotyl 1-related [Arabidopsis
  misc_feature (364)..(911): Homolog of NCBI NO: 30697007 NR Description: non phototropic hypocotyl 1-related [Arabidopsis
  misc_feature (63)..(887): Homolog of NCBI NO: 7489818 NR Description: serine/threonine protein kinase (EC 2.7.1.-),

SEQ ID NO: 49448 - protein, 828 aa, Arabidopsis thaliana; identical to SEQ ID NO: 47101
  peptide (1)..(828): Ceres Seq. ID no. 13578482
  misc_feature (495)..(784): Pfam Name: Protein kinase domain Pfam Description: Protein kinase domain
  misc_feature (495)..(784): Pfam Name: Protein kinase domain Pfam Description: Protein kinase domain
  misc_feature (450)..(646): Homolog of NCBI NO: 15238798 NR Description: protein kinase, putative [Arabidopsis thaliana]
  misc_feature (3)..(500): Homolog of NCBI NO: 27807565 NR Description: phytochrome 3 [Onoclea sensibilis]
  misc_feature (4)..(500): Homolog of NCBI NO: 27807561 NR Description: phytochrome 3 [Dryopteris filix-mas]
  misc_feature (1)..(320): Homolog of NCBI NO: 34224025 NR Description: phototropin-like protein [Pisum sativum]
  misc_feature (22)..(793): Homolog of NCBI NO: 7522091 NR Description: PHY3 protein - maidenhair fern
  misc_feature (450)..(646): Homolog of NCBI NO: 15238798 NR Description: protein kinase, putative [Arabidopsis thaliana]
  misc_feature (4)..(500): Homolog of NCBI NO: 27807561 NR Description: phytochrome 3 [Dryopteris filix-mas]
  misc_feature (22)..(793): Homolog of NCBI NO: 7522091 NR Description: PHY3 protein - maidenhair fern
  misc_feature (1)..(804): Homolog of NCBI NO: 7489818 NR Description: serine/threonine protein kinase (EC 2.7.1.-),
  misc_feature (281)..(828): Homolog of NCBI NO: 30697007 NR Description: non phototropic hypocotyl 1-related [Arabidopsis
  misc_feature (1)..(216): Homolog of NCBI NO: 30697007 NR Description: non phototropic hypocotyl 1-related [Arabidopsis
  misc_feature (1)..(817): Homolog of NCBI NO: 7804485 NR Description: phototropin [Adiantum capillus-veneris]
  misc_feature (22)..(793): Homolog of NCBI NO: 19570333 NR Description: PHY3 [Adiantum capillus-veneris]
  misc_feature (1)..(320): Homolog of NCBI NO: 34224025 NR Description: phototropin-like protein [Pisum sativum]
  misc_feature (3)..(500): Homolog of NCBI NO: 27807565 NR Description: phytochrome 3 [Onoclea sensibilis]
  misc_feature (22)..(793): Homolog of NCBI NO: 19570333 NR Description: PHY3 [Adiantum capillus-veneris]
  misc_feature (1)..(817): Homolog of NCBI NO: 7804485 NR Description: phototropin [Adiantum capillus-veneris]
  misc_feature (1)..(216): Homolog of NCBI NO: 30697007 NR Description: non phototropic hypocotyl 1-related [Arabidopsis
  misc_feature (281)..(828): Homolog of NCBI NO: 30697007 NR Description: non phototropic hypocotyl 1-related [Arabidopsis
  misc_feature (1)..(804): Homolog of NCBI NO: 7489818 NR Description: serine/threonine protein kinase (EC 2.7.1.-),

SEQ ID NO: 49449 - DNA, 2957 bp, Arabidopsis thaliana; identical to SEQ ID NO: 38468
  misc_feature (1)..(2957): Ceres Seq. ID no. 12560451
  misc_feature: MA Experiment ID: 20000171 Result: Down-regulated in Transcription
  misc_feature: MA Experiment 20000171 PARAMETER Experiment Name: At_42deg_Heat_P Parameter: Age (day) Value: 14
  misc_feature: MA Experiment 20000171 PARAMETER Experiment Name: At_42deg_Heat_P Parameter: Organism Value: A. thaliana
  misc_feature: MA Experiment 20000171 PARAMETER Experiment Name: At_42deg_Heat_P Parameter: Plant Line Value: WS
  misc_feature: MA Experiment 20000171 PARAMETER Experiment Name: At_42deg_Heat_P Parameter: Temperature (deg C) Value: 42 vs. 22
  misc_feature: MA Experiment 20000171 PARAMETER Experiment Name: At_42deg_Heat_P Parameter: Timepoint (hr) Value: 1
  misc_feature: MA Experiment 20000171 PARAMETER Experiment Name: At_42deg_Heat_P Parameter: Tissue Value: Aerial
  misc_feature: MA Experiment ID: 20000173 Result: Down-regulated in Transcription
  misc_feature: MA Experiment 20000173 PARAMETER Experiment Name: At_42deg_Heat_P Parameter: Age (day) Value: 14
  misc_feature: MA Experiment 20000173 PARAMETER Experiment Name: At_42deg_Heat_P Parameter: Organism Value: A. thaliana
  misc_feature: MA Experiment 20000173 PARAMETER Experiment Name: At_42deg_Heat_P Parameter: Plant Line Value: WS
  misc_feature: MA Experiment 20000173 PARAMETER Experiment Name: At_42deg_Heat_P Parameter: Temperature (deg C) Value: 42 vs. 22
  misc_feature: MA Experiment 20000173 PARAMETER Experiment Name: At_42deg_Heat_P Parameter: Timepoint (hr) Value: 6
  misc_feature: MA Experiment 20000173 PARAMETER Experiment Name: At_42deg_Heat_P Parameter: Tissue Value: Aerial
  misc_feature: MA Experiment ID: 20000286 Result: Up-regulated in Transcription
  misc_feature: MA Experiment 20000286 PARAMETER Experiment Name: At_Open_Flower_P Parameter: Age (day) Value: 21
  misc_feature: MA Experiment 20000286 PARAMETER Experiment Name: At_Open_Flower_P Parameter: Plant Line Value: WS
  misc_feature: MA Experiment 20000286 PARAMETER Experiment Name: At_Open_Flower_P Parameter: Tissue Value: Half Open vs. Whole Plant
  misc_feature: MA Experiment ID: 20000495 Result: Down-regulated in Transcription
  misc_feature: MA Experiment 20000495 PARAMETER Experiment Name: At_Guard_Cells_P Parameter: Harvest Date Value: 8/2/2002
  misc_feature: MA Experiment 20000495 PARAMETER Experiment Name: At_Guard_Cells_P Parameter: Organism Value: A. thaliana
  misc_feature: MA Experiment 20000495 PARAMETER Experiment Name: At_Guard_Cells_P Parameter: Tissue Value: Guard Cells vs. Leaves
  misc_feature: MA Experiment ID: 20000794 Result: Up-regulated in Transcription
  misc_feature: MA Experiment 20000794 PARAMETER Experiment Name: At_Petals_P Parameter: Age (day) Value: 23-25 days
  misc_feature: MA Experiment 20000794 PARAMETER Experiment Name: At_Petals_P Parameter: Plant Line Value: WS
  misc_feature: MA Experiment 20000794 PARAMETER Experiment Name: At_Petals_P Parameter: Tissue Value: Petals vs. Whole plant

SEQ ID NO: 49450 - protein, 809 aa, Arabidopsis thaliana; identical to SEQ ID NO: 38469
  peptide (1)..(809): Ceres Seq. ID no. 12560452
  misc_feature (552)..(756): Pfam Name: Peptidase family M41 Pfam Description: Peptidase family M41
  misc_feature (552)..(756): Pfam Name: Peptidase family M41 Pfam Description: Peptidase family M41
  misc_feature (552)..(756): Pfam Name: Peptidase family M41 Pfam Description: Peptidase family M41
  misc_feature (100)..(809): Homolog of NCBI NO: 12082993 NR Description: matrix AAA protease MAP-1 [Neurospora crassa]
  misc_feature (209)..(785): Homolog of NCBI NO: 16905099 NR Description: AFG3(ATPase family gene 3)-like 1 (yeast) [Mus
  misc_feature (115)..(187): Homolog of NCBI NO: 28574878 NR Description: CG6512-PA [Drosophila melanogaster]
  misc_feature (221)..(784): Homolog of NCBI NO: 28574878 NR Description: CG6512-PA [Drosophila melanogaster]
  misc_feature (210)..(785): Homolog of NCBI NO: 18999411 NR Description: Similar to AFG3 ATPase family gene 3-like 2
  misc_feature (100)..(809): Homolog of NCBI NO: 12082993 NR Description: matrix AAA protease MAP-1 [Neurospora crassa]
  misc_feature (115)..(187): Homolog of NCBI NO: 28574878 NR Description: CG6512-PA [Drosophila melanogaster]
  misc_feature (210)..(785): Homolog of NCBI NO: 18999411 NR Description: Similar to AFG3 ATPase family gene 3-like 2
  misc_feature (221)..(784): Homolog of NCBI NO: 28574878 NR Description: CG6512-PA [Drosophila melanogaster]
  misc_feature (115)..(187): Homolog of NCBI NO: 28574878 NR Description: CG6512-PA [Drosophila melanogaster]
  misc_feature (209)..(785): Homolog of NCBI NO: 16905099 NR Description: AFG3(ATPase family gene 3)-like 1 (yeast) [Mus
  misc_feature (100)..(809): Homolog of NCBI NO: 12082993 NR Description: matrix AAA protease MAP-1 [Neurospora crassa]
  misc_feature (7)..(783): Homolog of NCBI NO: 25406980 NR Description: protein F22G5.10 [imported] - Arabidopsis
  misc_feature (7)..(786): Homolog of NCBI NO: 34908198 NR Description: putative AAA-metalloprotease
  misc_feature (206)..(789): Homolog of NCBI NO: 6539504 NR Description: FtsH2 [Cyanidioschyzon merolae]
  misc_feature (152)..(192): Homolog of NCBI NO: 6539504 NR Description: FtsH2 [Cyanidioschyzon merolae]
  misc_feature (210)..(785): Homolog of NCBI NO: 5802970 NR Description: AFG3 ATPase family gene 3-like 2
  misc_feature (7)..(783): Homolog of NCBI NO: 25406980 NR Description: protein F22G5.10 [imported] - Arabidopsis
  misc_feature (7)..(786): Homolog of NCBI NO: 34908198 NR Description: putative AAA-metalloprotease
  misc_feature (206)..(789): Homolog of NCBI NO: 6539504 NR Description: FtsH2 [Cyanidioschyzon merolae]
  misc_feature (152)..(192): Homolog of NCBI NO: 6539504 NR Description: FtsH2 [Cyanidioschyzon merolae]
  misc_feature (210)..(785): Homolog of NCBI NO: 5802970 NR Description: AFG3 ATPase family gene 3-like 2
  misc_feature (210)..(785): Homolog of NCBI NO: 18999411 NR Description: Similar to AFG3 ATPase family gene 3-like 2
  misc_feature (221)..(784): Homolog of NCBI NO: 28574878 NR Description: CG6512-PA [Drosophila melanogaster]
  misc_feature (209)..(785): Homolog of NCBI NO: 16905099 NR Description: AFG3(ATPase family gene 3)-like 1 (yeast) [Mus
  misc_feature (210)..(785): Homolog of NCBI NO: 5802970 NR Description: AFG3 ATPase family gene 3-like 2
  misc_feature (152)..(192): Homolog of NCBI NO: 6539504 NR Description: FtsH2 [Cyanidioschyzon merolae]
  misc_feature (206)..(789): Homolog of NCBI NO: 6539504 NR Description: FtsH2 [Cyanidioschyzon merolae]
  misc_feature (7)..(786): Homolog of NCBI NO: 34908198 NR Description: putative AAA-metalloprotease
  misc_feature (7)..(783): Homolog of NCBI NO: 25406980 NR Description: protein F22G5.10 [imported] - Arabidopsis

SEQ ID NO: 49451 - protein, 807 aa, Arabidopsis thaliana; identical to SEQ ID NO: 38470
  peptide (1)..(807): Ceres Seq. ID no. 12560453
  misc_feature (550)..(754): Pfam Name: Peptidase family M41 Pfam Description: Peptidase family M41
  misc_feature (550)..(754): Pfam Name: Peptidase family M41 Pfam Description: Peptidase family M41
  misc_feature (550)..(754): Pfam Name: Peptidase family M41 Pfam Description: Peptidase family M41
  misc_feature (98)..(807): Homolog of NCBI NO: 12082993 NR Description: matrix AAA protease MAP-1 [Neurospora crassa]
  misc_feature (207)..(783): Homolog of NCBI NO: 16905099 NR Description: AFG3(ATPase family gene 3)-like 1 (yeast) [Mus
  misc_feature (113)..(185): Homolog of NCBI NO: 28574878 NR Description: CG6512-PA [Drosophila melanogaster]
  misc_feature (219)..(782): Homolog of NCBI NO: 28574878 NR Description: CG6512-PA [Drosophila melanogaster]
  misc_feature (208)..(783): Homolog of NCBI NO: 18999411 NR Description: Similar to AFG3 ATPase family gene 3-like 2
  misc_feature (98)..(807): Homolog of NCBI NO: 12082993 NR Description: matrix AAA protease MAP-1 [Neurospora crassa]
  misc_feature (113)..(185): Homolog of NCBI NO: 28574878 NR Description: CG6512-PA [Drosophila melanogaster]
  misc_feature (208)..(783): Homolog of NCBI NO: 18999411 NR Description: Similar to AFG3 ATPase family gene 3-like 2
  misc_feature (219)..(782): Homolog of NCBI NO: 28574878 NR Description: CG6512-PA [Drosophila melanogaster]
  misc_feature (113)..(185): Homolog of NCBI NO: 28574878 NR Description: CG6512-PA [Drosophila melanogaster]
  misc_feature (207)..(783): Homolog of NCBI NO: 16905099 NR Description: AFG3(ATPase family gene 3)-like 1 (yeast) [Mus
  misc_feature (98)..(807): Homolog of NCBI NO: 12082993 NR Description: matrix AAA protease MAP-1 [Neurospora crassa]
  misc_feature (5)..(781): Homolog of NCBI NO: 25406980 NR Description: protein F22G5.10 [imported] - Arabidopsis
  misc_feature (5)..(784): Homolog of NCBI NO: 34908198 NR Description: putative AAA-metalloprotease
  misc_feature (204)..(787): Homolog of NCBI NO: 6539504 NR Description: FtsH2 [Cyanidioschyzon merolae]
  misc_feature (150)..(190): Homolog of NCBI NO: 6539504 NR Description: FtsH2 [Cyanidioschyzon merolae]
  misc_feature (208)..(783): Homolog of NCBI NO: 5802970 NR Description: AFG3 ATPase family gene 3-like 2
  misc_feature (5)..(781): Homolog of NCBI NO: 25406980 NR Description: protein F22G5.10 [imported] - Arabidopsis
  misc_feature (5)..(784): Homolog of NCBI NO: 34908198 NR Description: putative AAA-metalloprotease
  misc_feature (204)..(787): Homolog of NCBI NO: 6539504 NR Description: FtsH2 [Cyanidioschyzon merolae]
  misc_feature (150)..(190): Homolog of NCBI NO: 6539504 NR Description: FtsH2 [Cyanidioschyzon merolae]
  misc_feature (208)..(783): Homolog of NCBI NO: 5802970 NR Description: AFG3 ATPase family gene 3-like 2
  misc_feature (208)..(783): Homolog of NCBI NO: 18999411 NR Description: Similar to AFG3 ATPase family gene 3-like 2
  misc_feature (219)..(782): Homolog of NCBI NO: 28574878 NR Description: CG6512-PA [Drosophila melanogaster]
  misc_feature (207)..(783): Homolog of NCBI NO: 16905099 NR Description: AFG3(ATPase family gene 3)-like 1 (yeast) [Mus
  misc_feature (208)..(783): Homolog of NCBI NO: 5802970 NR Description: AFG3 ATPase family gene 3-like 2
  misc_feature (150)..(190): Homolog of NCBI NO: 6539504 NR Description: FtsH2 [Cyanidioschyzon merolae]
  misc_feature (204)..(787): Homolog of NCBI NO: 6539504 NR Description: FtsH2 [Cyanidioschyzon merolae]
  misc_feature (5)..(784): Homolog of NCBI NO: 34908198 NR Description: putative AAA-metalloprotease
  misc_feature (5)..(781): Homolog of NCBI NO: 25406980 NR Description: protein F22G5.10 [imported] - Arabidopsis

SEQ ID NO: 49452 - protein, 683 aa, Arabidopsis thaliana; identical to SEQ ID NO: 38471
  peptide (1)..(683): Ceres Seq. ID no. 12560454
  misc_feature (426)..(630): Pfam Name: Peptidase family M41 Pfam Description: Peptidase family M41
  misc_feature (426)..(630): Pfam Name: Peptidase family M41 Pfam Description: Peptidase family M41
  misc_feature (426)..(630): Pfam Name: Peptidase family M41 Pfam Description: Peptidase family M41
  misc_feature (1)..(683): Homolog of NCBI NO: 12082993 NR Description: matrix AAA protease MAP-1 [Neurospora crassa]
  misc_feature (83)..(659): Homolog of NCBI NO: 16905099 NR Description: AFG3(ATPase family gene 3)-like 1 (yeast) [Mus
  misc_feature (1)..(61): Homolog of NCBI NO: 28574878 NR Description: CG6512-PA [Drosophila melanogaster]
  misc_feature (95)..(658): Homolog of NCBI NO: 28574878 NR Description: CG6512-PA [Drosophila melanogaster]
  misc_feature (84)..(659): Homolog of NCBI NO: 18999411 NR Description: Similar to AFG3 ATPase family gene 3-like 2
  misc_feature (1)..(683): Homolog of NCBI NO: 12082993 NR Description: matrix AAA protease MAP-1 [Neurospora crassa]
  misc_feature (1)..(61): Homolog of NCBI NO: 28574878 NR Description: CG6512-PA [Drosophila melanogaster]
  misc_feature (84)..(659): Homolog of NCBI NO: 18999411 NR Description: Similar to AFG3 ATPase family gene 3-like 2
  misc_feature (95)..(658): Homolog of NCBI NO: 28574878 NR Description: CG6512-PA [Drosophila melanogaster]
  misc_feature (1)..(61): Homolog of NCBI NO: 28574878 NR Description: CG6512-PA [Drosophila melanogaster]
  misc_feature (83)..(659): Homolog of NCBI NO: 16905099 NR Description: AFG3(ATPase family gene 3)-like 1 (yeast) [Mus
  misc_feature (1)..(683): Homolog of NCBI NO: 12082993 NR Description: matrix AAA protease MAP-1 [Neurospora crassa]
  misc_feature (1)..(657): Homolog of NCBI NO: 25406980 NR Description: protein F22G5.10 [imported] - Arabidopsis
  misc_feature (1)..(660): Homolog of NCBI NO: 34908198 NR Description: putative AAA-metalloprotease
  misc_feature (80)..(663): Homolog of NCBI NO: 6539504 NR Description: FtsH2 [Cyanidioschyzon merolae]
  misc_feature (26)..(66): Homolog of NCBI NO: 6539504 NR Description: FtsH2 [Cyanidioschyzon merolae]
  misc_feature (84)..(659): Homolog of NCBI NO: 5802970 NR Description: AFG3 ATPase family gene 3-like 2
  misc_feature (1)..(657): Homolog of NCBI NO: 25406980 NR Description: protein F22G5.10 [imported] - Arabidopsis
  misc_feature (1)..(660): Homolog of NCBI NO: 34908198 NR Description: putative AAA-metalloprotease
  misc_feature (80)..(663): Homolog of NCBI NO: 6539504 NR Description: FtsH2 [Cyanidioschyzon merolae]
  misc_feature (26)..(66): Homolog of NCBI NO: 6539504 NR Description: FtsH2 [Cyanidioschyzon merolae]
  misc_feature (84)..(659): Homolog of NCBI NO: 5802970 NR Description: AFG3 ATPase family gene 3-like 2
  misc_feature (84)..(659): Homolog of NCBI NO: 18999411 NR Description: Similar to AFG3 ATPase family gene 3-like 2
  misc_feature (95)..(658): Homolog of NCBI NO: 28574878 NR Description: CG6512-PA [Drosophila melanogaster]
  misc_feature (83)..(659): Homolog of NCBI NO: 16905099 NR Description: AFG3(ATPase family gene 3)-like 1 (yeast) [Mus
  misc_feature (84)..(659): Homolog of NCBI NO: 5802970 NR Description: AFG3 ATPase family gene 3-like 2
  misc_feature (26)..(66): Homolog of NCBI NO: 6539504 NR Description: FtsH2 [Cyanidioschyzon merolae]
  misc_feature (80)..(663): Homolog of NCBI NO: 6539504 NR Description: FtsH2 [Cyanidioschyzon merolae]
  misc_feature (1)..(660): Homolog of NCBI NO: 34908198 NR Description: putative AAA-metalloprotease
  misc_feature (1)..(657): Homolog of NCBI NO: 25406980 NR Description: protein F22G5.10 [imported] - Arabidopsis

SEQ ID NO: 49453 - DNA, 2226 bp, Arabidopsis thaliana
  misc_feature (1)..(2226): Ceres Seq. ID no. 12592115
  misc_feature: MA Experiment ID: 20001451 Result: Up-regulated in Transcription
  misc_feature: MA Experiment 20001451 PARAMETER Experiment Name: At_Far-red-induction_P Parameter: Age (day) Value: 7
  misc_feature: MA Experiment 20001451 PARAMETER Experiment Name: At_Far-red-induction_P Parameter: Light Value: Far-red vs. White
  misc_feature: MA Experiment 20001451 PARAMETER Experiment Name: At_Far-red-induction_P Parameter: Organism Value: A. thaliana
  misc_feature: MA Experiment 20001451 PARAMETER Experiment Name: At_Far-red-induction_P Parameter: Plant Line Value: Columbia
  misc_feature: MA Experiment 20001451 PARAMETER Experiment Name: At_Far-red-induction_P Parameter: Timepoint (hr) Value: 24
  misc_feature: MA Experiment 20001451 PARAMETER Experiment Name: At_Far-red-induction_P Parameter: Tissue Value: Whole Plant
atggacgagattgtagaagactcgagcagagtcatggagatagaaggacagaatgatgatctggaccggtgcgtggtggaggaggttgagctaaccgttccaaaaaccgatgatccaacgttaccggttctcacatttcgaatgtggactttaggtcttggtgcgtgtatcatactctcgttcataaaccagtttttctggtacagacagatgccgttaaccattagcggaatctcggctcagattgcggtcgtgccacttggtcacctgatggctaaggttcttcctacaaggatgttcttggaaggatcaaagtgggagttttctatgaatccaggtccttttaatgtcaaggaacatgtattgatcacgatttttgctaattcgggagctggaacggtttatgcgactcatatacttagtgcaattaagctctattataagagatctcttccatttctaccggcttttctccttatgatcacaacgcagtttctcggatttgggtgggctggtctattccgtaaacatcttgttgagcctggtgaaatgtggtggccaagcaatctagttcaagtgtctctcttcagtgccttgcacgagaaggaaaagaagaaaaagggaggcatgacccgaatccaattcttcctcattgtccttgttaccagttttgcatactacattctccctggttatttattcacaatgataacttccatctcatggatctgttggcttggtcccaaatcggttttggttcaccaactcggttcaggtgaacaaggtcttggtattggcgcaattggtattgactgggctacaattagctcttacctcggtagcccactcgcgagtcccttattcgctacaatcaatgtaaccatcggttttgtggtgatcatgtatgtcgccactccaatttgctattggctaaatatttacaaagccaaaacatatcccatcttctcaagtgggcttttcatgggcaatggctcgtcctatgatgttttaagcatcattgataagaagtttcatctcgaccgagatatatatgcaaagactggtcctatcaatatgagcactttctttgcagtcacatatggtcttgggtttgctactttgtccgcaactattgtccatgttttactcttcaacggaagggatttatggaaacaaacaagaggtgcttttcagaggaacaagaaaatggatttccacacgagaatcatgaagaaaaactatagggaagttcctatgtggtggttttatgtgatcctcgtactcaacattgcgctcatcatgttcatatcattctactacaatgcaaccgtgcagctaccttggtggggagtgttgctagcttgtgccattgctgtcttcttcactccgcttatcggtgttatcgccgccaccactaatcaggaaccgggtttgaacgtcattacggaatatgtaatcgggtatctctatccagaacgtccggttgctaacatgtgctttaaagtatatggatacatcagcatgactcaggctctaacattcatccaagacttcaaactcggactctacatgaagattcctcctagaagcatgttcatggcacaggtggttgggacgcttgtgtctgtggtagtgtacacaggaactgcttggtggttaatggtagacattcctcatctatgtgacaaatctttgcttcctccagatagcgaatggacatgtcccatggaccgtgtcttctttgatgcttcagttatttggggacttgtaggaccacgtagaatgttcggtaacttaggagaatacgcagccataaactggttcttcctcgtaggtgcaatcgctcctttctttgtctggctagcgaccaaagcattcccagctcataaatggatctcgaagattcattttccggtcattttaggagcaacctcgatgatgccacccgcgatggcggttaacttcacgagttggtgcatcgttgcatttgtgtttggacactttttgtataagtacaagagacagtggtggaaaaagtataactacgttttgtcgggtggtttagacgcgggcactgcgtttatgacaatacttatattcctatcggttggacgcaaaggaattggattgttgtggtggggaaacgctgatgatagcacaaactgtagcctcgcgtcttgtcctaccgctaaaggcgttattatgcatggatgtccagttttatga

SEQ ID NO: 49454 - protein, 741 aa, Arabidopsis thaliana
  peptide (1)..(741): Ceres Seq. ID no. 12592116
  misc_feature (81)..(616): Homolog of NCBI NO: 18414644 NR Description: isp4 like protein
  misc_feature (18)..(47): Homolog of NCBI NO: 7485100 NR Description: hypothetical protein - Arabidopsis thaliana
  misc_feature (81)..(616): Homolog of NCBI NO: 7485100 NR Description: hypothetical protein - Arabidopsis thaliana
  misc_feature (81)..(740): Homolog of NCBI NO: 30722286 NR Description: glutathione transporter GT1 [Brassica juncea]
  misc_feature (7)..(741): Homolog of NCBI NO: 34912940 NR Description: putative sexual differentiation process protein
  misc_feature (13)..(740): Homolog of NCBI NO: 15218331 NR Description: unknown protein; protein id: At1g09930.1
  misc_feature (26)..(740): Homolog of NCBI NO: 25553564 NR Description: putative isp4 protein [Oryza sativa (japonica
  misc_feature (2)..(740): Homolog of NCBI NO: 15236912 NR Description: putative oligopeptide transporter
  misc_feature (26)..(740): Homolog of NCBI NO: 34898010 NR Description: EST D25093(R3139) corresponds to a region of the
  misc_feature (15)..(740): Homolog of NCBI NO: 15238763 NR Description: isp4 protein; protein id: At5g53520.1
MDEIVEDSSRVMEIEGQNDDLDRCVVEEVELTVPKTDDPTLPVLTFRMWTLGLGACIILSFINQFFWYRQMPLTISGISAQIAVVPLGHLMAKVLPTRMFLEGSKWEFSMNPGPFNVKEHVLITIFANSGAGTVYATHILSAIKLYYKRSLPFLPAFLLMITTQFLGFGWAGLFRKHLVEPGEMWWPSNLVQVSLFSALHEKEKKKKGGMTRIQFFLIVLVTSFAYYILPGYLFTMITSISWICWLGPKSVLVHQLGSGEQGLGIGAIGIDWATISSYLGSPLASPLFATINVTIGFVVIMYVATPICYWLNIYKAKTYPIFSSGLFMGNGSSYDVLSIIDKKFHLDRDIYAKTGPINMSTFFAVTYGLGFATLSATIVHVLLFNGRDLWKQTRGAFQRNKKMDFHTRIMKKNYREVPMWWFYVILVLNIALIMFISFYYNATVQLPWWGVLLACAIAVFFTPLIGVIAATTNQEPGLNVITEYVIGYLYPERPVANMCFKVYGYISMTQALTFIQDFKLGLYMKIPPRSMFMAQVVGTLVSVVVYTGTAWWLMVDIPHLCDKSLLPPDSEWTCPMDRVFFDASVIWGLVGPRRMFGNLGEYAAINWFFLVGAIAPFFVWLATKAFPAHKWISKIHFPVILGATSMMPPAMAVNFTSWCIVAFVFGHFLYKYKRQWWKKYNYVLSGGLDAGTAFMTILIFLSVGRKGIGLLWWGNADDSTNCSLASCPTAKGVIMHGCPVL

SEQ ID NO: 49455 - protein, 730 aa, Arabidopsis thaliana
  peptide (1)..(730): Ceres Seq. ID no. 12592117
  misc_feature (70)..(605): Homolog of NCBI NO: 18414644 NR Description: isp4 like protein
  misc_feature (7)..(36): Homolog of NCBI NO: 7485100 NR Description: hypothetical protein - Arabidopsis thaliana
  misc_feature (70)..(605): Homolog of NCBI NO: 7485100 NR Description: hypothetical protein - Arabidopsis thaliana
  misc_feature (70)..(729): Homolog of NCBI NO: 30722286 NR Description: glutathione transporter GT1 [Brassica juncea]
  misc_feature (1)..(730): Homolog of NCBI NO: 34912940 NR Description: putative sexual differentiation process protein
  misc_feature (2)..(729): Homolog of NCBI NO: 15218331 NR Description: unknown protein; protein id: At1g09930.1
  misc_feature (15)..(729): Homolog of NCBI NO: 25553564 NR Description: putative isp4 protein [Oryza sativa (japonica
  misc_feature (1)..(729): Homolog of NCBI NO: 15236912 NR Description: putative oligopeptide transporter
  misc_feature (15)..(729): Homolog of NCBI NO: 34898010 NR Description: EST D25093(R3139) corresponds to a region of the
  misc_feature (4)..(729): Homolog of NCBI NO: 15238763 NR Description: isp4 protein; protein id: At5g53520.1
MEIEGQNDDLDRCVVEEVELTVPKTDDPTLPVLTFRMWTLGLGACIILSFINQFFWYRQMPLTISGISAQIAVVPLGHLMAKVLPTRMFLEGSKWEFSMNPGPFNVKEHVLITIFANSGAGTVYATHILSAIKLYYKRSLPFLPAFLLMITTQFLGFGWAGLFRKHLVEPGEMWWPSNLVQVSLFSALHEKEKKKKGGMTRIQFFLIVLVTSFAYYILPGYLFTMITSISWICWLGPKSVLVHQLGSGEQGLGIGAIGIDWATISSYLGSPLASPLFATINVTIGFVVIMYVATPICYWLNIYKAKTYPIFSSGLFMGNGSSYDVLSIIDKKFHLDRDIYAKTGPINMSTFFAVTYGLGFATLSATIVHVLLFNGRDLWKQTRGAFQRNKKMDFHTRIMKKNYREVPMWWFYVILVLNIALIMFISFYYNATVQLPWWGVLLACAIAVFFTPLIGVIAATTNQEPGLNVITEYVIGYLYPERPVANMCFKVYGYISMTQALTFIQDFKLGLYMKIPPRSMFMAQVVGTLVSVVVYTGTAWWLMVDIPHLCDKSLLPPDSEWTCPMDRVFFDASVIWGLVGPRRMFGNLGEYAAINWFFLVGAIAPFFVWLATKAFPAHKWISKIHFPVILGATSMMPPAMAVNFTSWCIVAFVFGHFLYKYKRQWWKKYNYVLSGGLDAGTAFMTILIFLSVGRKGIGLLWWGNADDSTNCSLASCPTAKGVIMHGCPVL

SEQ ID NO: 49456 - protein, 694 aa, Arabidopsis thaliana
  peptide (1)..(694): Ceres Seq. ID no. 12592118
  misc_feature (1)..(668): Homolog of NCBI NO: 32420327 NR Description: hypothetical protein [Neurospora crassa]
  misc_feature (34)..(569): Homolog of NCBI NO: 18414644 NR Description: isp4 like protein
  misc_feature (34)..(569): Homolog of NCBI NO: 7485100 NR Description: hypothetical protein - Arabidopsis thaliana
  misc_feature (34)..(693): Homolog of NCBI NO: 30722286 NR Description: glutathione transporter GT1 [Brassica juncea]
  misc_feature (1)..(694): Homolog of NCBI NO: 34912940 NR Description: putative sexual differentiation process protein
  misc_feature (1)..(693): Homolog of NCBI NO: 15218331 NR Description: unknown protein; protein id: At1g09930.1
  misc_feature (1)..(693): Homolog of NCBI NO: 25553564 NR Description: putative isp4 protein [Oryza sativa (japonica
  misc_feature (1)..(693): Homolog of NCBI NO: 15236912 NR Description: putative oligopeptide transporter
  misc_feature (1)..(693): Homolog of NCBI NO: 34898010 NR Description: EST D25093(R3139) corresponds to a region of the
  misc_feature (1)..(693): Homolog of NCBI NO: 15238763 NR Description: isp4 protein; protein id: At5g53520.1
MWTLGLGACIILSFINQFFWYRQMPLTISGISAQIAVVPLGHLMAKVLPTRMFLEGSKWEFSMNPGPFNVKEHVLITIFANSGAGTVYATHILSAIKLYYKRSLPFLPAFLLMITTQFLGFGWAGLFRKHLVEPGEMWWPSNLVQVSLFSALHEKEKKKKGGMTRIQFFLIVLVTSFAYYILPGYLFTMITSISWICWLGPKSVLVHQLGSGEQGLGIGAIGIDWATISSYLGSPLASPLFATINVTIGFVVIMYVATPICYWLNIYKAKTYPIFSSGLFMGNGSSYDVLSIIDKKFHLDRDIYAKTGPINMSTFFAVTYGLGFATLSATIVHVLLFNGRDLWKQTRGAFQRNKKMDFHTRIMKKNYREVPMWWFYVILVLNIALIMFISFYYNATVQLPWWGVLLACAIAVFFTPLIGVIAATTNQEPGLNVITEYVIGYLYPERPVANMCFKVYGYISMTQALTFIQDFKLGLYMKIPPRSMFMAQVVGTLVSVVVYTGTAWWLMVDIPHLCDKSLLPPDSEWTCPMDRVFFDASVIWGLVGPRRMFGNLGEYAAINWFFLVGAIAPFFVWLATKAFPAHKWISKIHFPVILGATSMMPPAMAVNFTSWCIVAFVFGHFLYKYKRQWWKKYNYVLSGGLDAGTAFMTILIFLSVGRKGIGLLWWGNADDSTNCSLASCPTAKGVIMHGCPVL

SEQ ID NO: 49457 - DNA, 3240 bp, Arabidopsis thaliana
  misc_feature (1)..(3240): Ceres Seq. ID no. 13593697
  misc_feature: MA Experiment ID: 20000173 Result: Down-regulated in Transcription
  misc_feature: MA Experiment 20000173 PARAMETER Experiment Name: At_42deg_Heat_P Parameter: Age (day) Value: 14
  misc_feature: MA Experiment 20000173 PARAMETER Experiment Name: At_42deg_Heat_P Parameter: Organism Value: A. thaliana
  misc_feature: MA Experiment 20000173 PARAMETER Experiment Name: At_42deg_Heat_P Parameter: Plant Line Value: WS
  misc_feature: MA Experiment 20000173 PARAMETER Experiment Name: At_42deg_Heat_P Parameter: Temperature (deg C) Value: 42 vs. 22
  misc_feature: MA Experiment 20000173 PARAMETER Experiment Name: At_42deg_Heat_P Parameter: Timepoint (hr) Value: 6
  misc_feature: MA Experiment 20000173 PARAMETER Experiment Name: At_42deg_Heat_P Parameter: Tissue Value: Aerial
  misc_feature: MA Experiment ID: 20000182 Result: Up-regulated in Transcription
  misc_feature: MA Experiment 20000182 PARAMETER Experiment Name: At_2mM_SA_P Parameter: Age (day) Value: 14
  misc_feature: MA Experiment 20000182 PARAMETER Experiment Name: At_2mM_SA_P Parameter: Organism Value: A. thaliana
  misc_feature: MA Experiment 20000182 PARAMETER Experiment Name: At_2mM_SA_P Parameter: Plant Line Value: WS
  misc_feature: MA Experiment 20000182 PARAMETER Experiment Name: At_2mM_SA_P Parameter: Timepoint (hr) Value: 6
  misc_feature: MA Experiment 20000182 PARAMETER Experiment Name: At_2mM_SA_P Parameter: Tissue Value: Aerial
  misc_feature: MA Experiment 20000182 PARAMETER Experiment Name: At_2mM_SA_P Parameter: Treatment Value: 2mM SA vs. No Treatment
gtgtgttctgccaaagtttctctgcagcttctcctcttctcagaaattagggttccgtctcaaattacgagcagatctcgtactctctgatgtctgaagatccggagtaccgttgcttcattggtgggcttgcttggacaacgtctgatcgtggtctcagagatgcctttgagaagtatggtcacctcgttgaggccaaggtggttcttgacaagttttctggtcgctcccgtggttttggattcatcactttcgatgagaaaaaagctatggatgaagctattgcagcaatgaatggaatggatttggatgggcgaactatcactgttgataaagctcagcctcatcagggtggtgcaggcagagataatgatggtgaccgtggtcgagaccgtggatatgatcgtgatcgcagtcgtccctctggtgggcgaggtggtggagattgctttaaatgtggcaagcctggacattttgcaagagagtgtccttctgaaagtagtagagatggtggtggaaggttcagctcaaaggatgataggtacagttcgaaggacgataggtatggtgcaaaagatgataggtatggtgcaaaggaggataggtatggtgcaaaggatgataggtacagctccaaggatgataggtacagctccaaggatgataggtatggtagtagggatggtggaggtagtcgctatggacctgatcgcagtggtgaacgcgctggaggacgcagccgggatggtggcagccgtggagctccaggaggtgagaggcacagtcgtgctccatatgaccgccccagagctggtggtttccactagaattctactccaaaggttaaagaagttgaaggtttctgctttcagctcgtgtcaagtcaaagttacgcttgatggtctattttcttcaatgtatttggatagctcgagaaagaagatgtgttctctattttggccctaaactcaagagtcgactatgttcctaaagtgctctctctccttttgatatgttgatccctatggaaaccttgtgcttggttggtttgagacaatttgagatgtgctactttatgcttatcgtaatgaatgcgtgggttatcccccaacaccaaatatgcaaaagcctcaggatggtctgatactcgggtttagccgtgaaaattaaagactgatctataaaacttgtgatgggattgggaaatatacattgctgattgatacttggctactggaactcaaacatcccttcatgagcaacaaattgtcattttcaggaaaaagattgactttgtgcaattttagatcttggcaagtcaaatccaatagttttcttcaactagggaaatttctacagccaaatggtctctggttggctcgtctagtatagctcactgggtttatcttcgatctattctttgtgggttcttcgtgcctcttcgtctactttgtttcttgctcgtgacctctacctctgcctttgattctcaagctctaaactccaggaattgggaaatggtgttaatgtatatatagttaatatacgcttgaataggtatccttactttgataatttgttgaaattgcatacataaataggtcacacgagttatgtcgggaaaacactgacttgattattttatacaagtgaatagtatatgtatggttagaacttagatgcatgactagttcgttcaccttctttcacaattttgtattgcatacatacatacattgcttaggtgaatatataatcaatttaccataaataaatgactttgtaagtctcataatttaagactttgtttctaacataaagaaagactttgtagaacatatgagttggtgtatagcttaaacgttgactcaattatttgatagaaatcgaatagcatagctattcgacgccactattcggttactcgtacctcgaccacaccaaattaagaacacttaccggaagaagataaaaggagaaaatggaaactaatctcttgttggtaaagtgtgtcttattagcatcatgtctcatacatccccgtgcttgctctccttcttgcaatttcccggcgatattcaacttcggcgactctaactccgacacaggtggcctttctgcctctttcggacaagccccttacccaaatggccaaaccttcttccactccccttccggtcgtttctcagatggtcgactcatcattgacttcatagcggaggagttaggtttaccatacctaaatgctttcttagactccatcggttcaaacttcagccatggtgccaatttcgccaccgctggctccaccgtccggccaccaaacgcaaccatcgctcagagcggtgtgagtccaatctctctcgacgttcaattggtccaattctccgatttcatcacacgatcacaactcattcgcaatcgaggtggagtgtttaagaaattgcttcccaagaaagagtatttctctcaagcattgtacacattcgacatcggtcagaacgatctcaccgctggactaaaacttaacatgacttcagatcaaatcaaggcttatataccagatgttcatgatcagctctctaacgtcattcgtaaggtgtatagtaaaggaggaagaagattttggatacacaacacagctccacttggttgtttaccttatgttttagaccggttcccagtaccggcttctcaaatcgacaatcacggttgtgcaattccgcgtaatgagattgctcgatactataactctgaacttaaaagaagagtgattgagttgagaaaagagctctctgaagctgcgtttacttatgttgatatctactctatcaagcttactctcatcactcaagccaagaaactcggttttaggtatcctttggtggcttgttgtggacatggtgggaagtacaatttcaacaagcttattaaatgtggagctaaagttatgatcaaagggaaagagattgtgcttgctaagtcttgtaacgatgtgtcgtttagagttagctgggacggtatacatttcactgaaacgacaaacagttggatctttcagcaaataaacgacggggcgttttcggatcctcctcttcctgtgaagtctgcctgcaccagatagaagaacttagggaatcatatgaccaaagtgtccttgaaaatggggacaaataaaagttctttggaatatttgttttttgtcaagttctaagaaaattctcatgaaagtgaaatcat

SEQ ID NO: 49458 - protein, 380 aa, Arabidopsis thaliana
  peptide (1)..(380): Ceres Seq. ID no. 15221229
  misc_feature (32)..(362): Pfam Name: GDSL-like Lipase/Acylhydrolase Pfam Description: GDSL-like Lipase/Acylhydrolase
  misc_feature (1)..(380): Homolog of NCBI NO: 25457244 NR Description: early nodule-specific protein ENOD8 [imported] -
  misc_feature (1)..(380): Homolog of NCBI NO: 18390045 NR Description: Enod8.1 [Medicago truncatula]
  misc_feature (2)..(380): Homolog of NCBI NO: 30909057 NR Description: ENSP-like protein [Hevea brasiliensis]
  misc_feature (296)..(380): Homolog of NCBI NO: 34901120 NR Description: contains ESTs
  misc_feature (5)..(306): Homolog of NCBI NO: 34901120 NR Description: contains ESTs
  misc_feature (5)..(380): Homolog of NCBI NO: 33147015 NR Description: putative early nodulin 8 precursor
  misc_feature (22)..(378): Homolog of NCBI NO: 34901122 NR Description: contains ESTs
  misc_feature (12)..(365): Homolog of NCBI NO: 15220550 NR Description: GDSL-motif lipase/hydrolase protein [Arabidopsis
  misc_feature (22)..(378): Homolog of NCBI NO: 33147016 NR Description: putative early nodulin 8 precursor
  misc_feature (1)..(380): Homolog of NCBI NO: 15231558 NR Description: GDSL-motif lipase/hydrolase protein [Arabidopsis
METNLLLVKCVLLASCLIHPRACSPSCNFPAIFNFGDSNSDTGGLSASFGQAPYPNGQTFFHSPSGRFSDGRLIIDFIAEELGLPYLNAFLDSIGSNFSHGANFATAGSTVRPPNATIAQSGVSPISLDVQLVQFSDFITRSQLIRNRGGVFKKLLPKKEYFSQALYTFDIGQNDLTAGLKLNMTSDQIKAYIPDVHDQLSNVIRKVYSKGGRRFWIHNTAPLGCLPYVLDRFPVPASQIDNHGCAIPRNEIARYYNSELKRRVIELRKELSEAAFTYVDIYSIKLTLITQAKKLGFRYPLVACCGHGGKYNFNKLIKCGAKVMIKGKEIVLAKSCNDVSFRVSWDGIHFTETTNSWIFQQINDGAFSDPPLPVKSACTR

SEQ ID NO: 49459 - protein, 245 aa, Arabidopsis thaliana
  peptide (1)..(245): Ceres Seq. ID no. 15221230
  misc_feature (9)..(80): Pfam Name: RNA recognition motif. (a.k.a. RRM, RBD, or RNP domain) Pfam Description: RNA recognition motif. (a.k.a. RRM, RBD, or RNP
  misc_feature (2)..(231): Homolog of NCBI NO: 25152876 NR Description: RNA recognition motif containing protein (36.4
  misc_feature (8)..(214): Homolog of NCBI NO: 15822705 NR Description: RNA-binding protein precursor [Solanum tuberosum]
  misc_feature (2)..(239): Homolog of NCBI NO: 16944647 NR Description: conserved hypothetical protein [Neurospora crassa]
  misc_feature (6)..(143): Homolog of NCBI NO: 28173040 NR Description: hyperosmotic glycine rich protein [Salmo salar]
  misc_feature (1)..(118): Homolog of NCBI NO: 7439994 NR Description: glycine-rich RNA-binding protein - garden pea
  misc_feature (1)..(118): Homolog of NCBI NO: 18103931 NR Description: glycine rich RNA binding protein [Oryza sativa]
  misc_feature (6)..(212): Homolog of NCBI NO: 18406831 NR Description: glycine-rich RNA-binding protein, putative
  misc_feature (1)..(143): Homolog of NCBI NO: 1346180 NR Description: Glycine-rich RNA-binding protein GRP1A
  misc_feature (8)..(241): Homolog of NCBI NO: 15237666 NR Description: glycine-rich RNA-binding protein [Arabidopsis
  misc_feature (1)..(245): Homolog of NCBI NO: 15231557 NR Description: glycine-rich RNA-binding protein [Arabidopsis
MSEDPEYRCFIGGLAWTTSDRGLRDAFEKYGHLVEAKVVLDKFSGRSRGFGFITFDEKKAMDEAIAAMNGMDLDGRTITVDKAQPHQGGAGRDNDGDRGRDRGYDRDRSRPSGGRGGGDCFKCGKPGHFARECPSESSRDGGGRFSSKDDRYSSKDDRYGAKDDRYGAKEDRYGAKDDRYSSKDDRYSSKDDRYGSRDGGGSRYGPDRSGERAGGRSRDGGSRGAPGGERHSRAPYDRPRAGGFH

SEQ ID NO: 49460 - protein, 223 aa, Arabidopsis thaliana
  peptide (1)..(223): Ceres Seq. ID no. 15221231
MEWIWMGELSLLIKLSLIRVVQAEIMMVTVVETVDMIVIAVVPLVGEVVEIALNVASLDILQESVLLKVVEMVVEGSAQRMIGTVRRTIGMVQKMIGMVQRRIGMVQRMIGTAPRMIGTAPRMIGMVVGMVEVVAMDLIAVVNALEDAAGMVAAVELQEVRGTVVLHMTAPELVVSTRILLQRLKKLKVSAFSSCQVKVTLDGLFSSMYLDSSRKKMCSLFWP

SEQ ID NO: 49461 - DNA, 1488 bp, Arabidopsis thaliana
  misc_feature (1)..(1488): Ceres Seq. ID no. 13592593
  misc_feature: MA Experiment ID: 20000265 Result: Up-regulated in Transcription
  misc_feature: MA Experiment 20000265 PARAMETER Experiment Name: At_Open_Flower_P Parameter: Age (day) Value: 21
  misc_feature: MA Experiment 20000265 PARAMETER Experiment Name: At_Open_Flower_P Parameter: Plant Line Value: WS
  misc_feature: MA Experiment 20000265 PARAMETER Experiment Name: At_Open_Flower_P Parameter: Tissue Value: Closed Flower vs. Whole Plant
  misc_feature: MA Experiment ID: 20000286 Result: Up-regulated in Transcription
  misc_feature: MA Experiment 20000286 PARAMETER Experiment Name: At_Open_Flower_P Parameter: Age (day) Value: 21
  misc_feature: MA Experiment 20000286 PARAMETER Experiment Name: At_Open_Flower_P Parameter: Plant Line Value: WS
  misc_feature: MA Experiment 20000286 PARAMETER Experiment Name: At_Open_Flower_P Parameter: Tissue Value: Half Open vs. Whole Plant
  misc_feature: MA Experiment ID: 20000709 Result: Down-regulated in Transcription
  misc_feature: MA Experiment 20000709 PARAMETER Experiment Name: At_15mM_NH4NO3_L-to-H_P Parameter: Age (hr) Value: 14
  misc_feature: MA Experiment 20000709 PARAMETER Experiment Name: At_15mM_NH4NO3_L-to-H_P Parameter: Organism Value: A. thaliana
  misc_feature: MA Experiment 20000709 PARAMETER Experiment Name: At_15mM_NH4NO3_L-to-H_P Parameter: Plant Line Value: WS
  misc_feature: MA Experiment 20000709 PARAMETER Experiment Name: At_15mM_NH4NO3_L-to-H_P Parameter: Timepoint (hr) Value: 4
  misc_feature: MA Experiment 20000709 PARAMETER Experiment Name: At_15mM_NH4NO3_L-to-H_P Parameter: Tissue Value: Aerial
  misc_feature: MA Experiment 20000709 PARAMETER Experiment Name: At_15mM_NH4NO3_L-to-H_P Parameter: Treatment Value: 15mM NH4NO3 vs. 30mM Mannitol
  misc_feature: MA Experiment ID: 20001760 Result: Up-regulated in Transcription
  misc_feature: MA Experiment 20001760 PARAMETER Experiment Name: At_50mM_NH4NO3_L-to-H_P Parameter: Timepoint (hr) Value: 2
  misc_feature: MA Experiment 20001760 PARAMETER Experiment Name: At_50mM_NH4NO3_L-to-H_P Parameter: Tissue Value: Siliques
  misc_feature: MA Experiment 20001760 PARAMETER Experiment Name: At_50mM_NH4NO3_L-to-H_P Parameter: Treatment Value: 50mM NH4NO3 vs 100mM Mannitol
  misc_feature: MA Experiment ID: 20001910 Result: Down-regulated in Transcription
  misc_feature: MA Experiment 20001910 PARAMETER Experiment Name: At_Drought_Reproduction_P Parameter: Age (day) Value: 37
  misc_feature: MA Experiment 20001910 PARAMETER Experiment Name: At_Drought_Reproduction_P Parameter: Organism Value: A. thaliana
  misc_feature: MA Experiment 20001910 PARAMETER Experiment Name: At_Drought_Reproduction_P Parameter: Plant Line Value: WS
  misc_feature: MA Experiment 20001910 PARAMETER Experiment Name: At_Drought_Reproduction_P Parameter: Timepoint (day) Value: 7
  misc_feature: MA Experiment 20001910 PARAMETER Experiment Name: At_Drought_Reproduction_P Parameter: Tissue Value: Flowers
  misc_feature: MA Experiment 20001910 PARAMETER Experiment Name: At_Drought_Reproduction_P Parameter: Treatment Value: Drought vs. No Drought
gaaagagaaaaagaaagggggtttgtgttatggctcccataacttttagaaaatcttacactatagtaccggccgaaccaacgtggagcggtaggtttcccttagccgagtgggatcaagttggtacaattactcacattcccaccctttacttttacgacaagccatctgaatctttccaaggcaatgtagtcgaaatcctaaaaacctcgttgagccgtgtgctagtccatttttaccctatggctggccgtctcagatggctccctcggggacggttcgagctcaattgtaacgccgagggagtggaattcattgaagcggaatctgaggggaagctttcggatttcaaagacttctctcctacgccggaattcgagaatcttatgccgcaagtaaactataaaaaccctatcgaaacgattcctctatttttagctcaggtaaccaaattcaaatgcggtggaataagccttagcgtcaacgtttcccacgcgatcgtagatggccaaagcgcgcttcacttaatatcggaatggggaagactcgcgcgcggtgaaccgttagaaaccgttccatttctagaccggaaaatcctctgggctggtgaaccgctcccaccgtttgtgtcgcccccaaagttcgaccacaaagagtttgatcagccaccgtttttgatcggagaaacggacaatgtagaagagagaaagaagaaaacgattgtggtgatgctaccactgagcacatctcagctgcagaagctacgaagtaaagccaacggaagcaaacactctgacccggcgaaagggtttacaaggtacgagaccgtcaccggacacgtgtggaggtgcgcgtgtaaagcacgtggccactctccggagcaaccaacggctctaggaatctgtatagatactcgtagtcggatggagccacctctgccacgcggctacttcggcaatgctactcttgacgtggtcgcagcaagcacctcaggtgaactgatatcgaatgaattgggtttcgcggcgagtttaatcagtaaagccataaagaatgtaacaaacgaatacgtgatgattgggatagagtatcttaagaaccaaaaagatctgaagaagtttcaagatctacatgccttgggaagcacggaaggtccattctacggaaacccaaatcttggagtggtgagctggttaactttgccaatgtacggccttgatttcggatggggcaaagagttctacacgggaccaggcacgcatgactttgacggcgactcgctgatcttgccggatcaaaacgaagatggctcggtgattctcgcgacgtgtctacaggtggctcacatggaggccttcaagaaacacttttatgaagatatctaggccttatatgttttttatatacatgacgtatacaaatatttatgcactttcatttgaattctacttatattgtagtgattattgaattgtaataacagattct

SEQ ID NO: 49462 - protein, 460 aa, Arabidopsis thaliana
  peptide (1)..(460): Ceres Seq. ID no. 13592594
  misc_feature (11)..(459): Pfam Name: Transferase family Pfam Description: Transferase family
  misc_feature (17)..(458): Homolog of NCBI NO: 15242883 NR Description: hydroxycinnamoyl/benzoyltransferase family
  misc_feature (13)..(458): Homolog of NCBI NO: 7484691 NR Description: anthranilate N-benzoyltransferase (EC 2.3.1.144)
  misc_feature (13)..(458): Homolog of NCBI NO: 7484692 NR Description: anthranilate N-benzoyltransferase (EC 2.3.1.144)
  misc_feature (10)..(370): Homolog of NCBI NO: 40644899 NR Description: hydroxycinnamoyl CoA quinate transferase
  misc_feature (13)..(372): Homolog of NCBI NO: 6469032 NR Description: N-hydroxycinnamoyl/benzoyltransferase [Ipomoea
  misc_feature (13)..(458): Homolog of NCBI NO: 15239747 NR Description: anthranilate
  misc_feature (13)..(458): Homolog of NCBI NO: 21536883 NR Description: anthranilate N-benzoyltransferase [Arabidopsis
  misc_feature (13)..(458): Homolog of NCBI NO: 38345030 NR Description: OSJNBa0029H02.14 [Oryza sativa (japonica
  misc_feature (13)..(458): Homolog of NCBI NO: 27475616 NR Description: hydroxycinnamoyl transferase [Nicotiana tabacum]
  misc_feature (10)..(460): Homolog of NCBI NO: 15224709 NR Description: hydroxycinnamoyl/benzoyltransferase family
KRKRKGVCVMAPITFRKSYTIVPAEPTWSGRFPLAEWDQVGTITHIPTLYFYDKPSESFQGNVVEILKTSLSRVLVHFYPMAGRLRWLPRGRFELNCNAEGVEFIEAESEGKLSDFKDFSPTPEFENLMPQVNYKNPIETIPLFLAQVTKFKCGGISLSVNVSHAIVDGQSALHLISEWGRLARGEPLETVPFLDRKILWAGEPLPPFVSPPKFDHKEFDQPPFLIGETDNVEERKKKTIVVMLPLSTSQLQKLRSKANGSKHSDPAKGFTRYETVTGHVWRCACKARGHSPEQPTALGICIDTRSRMEPPLPRGYFGNATLDVVAASTSGELISNELGFAASLISKAIKNVTNEYVMIGIEYLKNQKDLKKFQDLHALGSTEGPFYGNPNLGVVSWLTLPMYGLDFGWGKEFYTGPGTHDFDGDSLILPDQNEDGSVILATCLQVAHMEAFKKHFYEDI

SEQ ID NO: 49463 - protein, 451 aa, Arabidopsis thaliana
  peptide (1)..(451): Ceres Seq. ID no. 13592595
  misc_feature (2)..(450): Pfam Name: Transferase family Pfam Description: Transferase family
  misc_feature (8)..(449): Homolog of NCBI NO: 15242883 NR Description: hydroxycinnamoyl/benzoyltransferase family
  misc_feature (4)..(449): Homolog of NCBI NO: 7484691 NR Description: anthranilate N-benzoyltransferase (EC 2.3.1.144)
  misc_feature (4)..(449): Homolog of NCBI NO: 7484692 NR Description: anthranilate N-benzoyltransferase (EC 2.3.1.144)
  misc_feature (1)..(361): Homolog of NCBI NO: 40644899 NR Description: hydroxycinnamoyl CoA quinate transferase
  misc_feature (4)..(363): Homolog of NCBI NO: 6469032 NR Description: N-hydroxycinnamoyl/benzoyltransferase [Ipomoea
  misc_feature (4)..(449): Homolog of NCBI NO: 15239747 NR Description: anthranilate
  misc_feature (4)..(449): Homolog of NCBI NO: 21536883 NR Description: anthranilate N-benzoyltransferase [Arabidopsis
  misc_feature (4)..(449): Homolog of NCBI NO: 38345030 NR Description: OSJNBa0029H02.14 [Oryza sativa (japonica
  misc_feature (4)..(449): Homolog of NCBI NO: 27475616 NR Description: hydroxycinnamoyl transferase [Nicotiana tabacum]
  misc_feature (1)..(451): Homolog of NCBI NO: 15224709 NR Description: hydroxycinnamoyl/benzoyltransferase family
MAPITFRKSYTIVPAEPTWSGRFPLAEWDQVGTITHIPTLYFYDKPSESFQGNVVEILKTSLSRVLVHFYPMAGRLRWLPRGRFELNCNAEGVEFIEAESEGKLSDFKDFSPTPEFENLMPQVNYKNPIETIPLFLAQVTKFKCGGISLSVNVSHAIVDGQSALHLISEWGRLARGEPLETVPFLDRKILWAGEPLPPFVSPPKFDHKEFDQPPFLIGETDNVEERKKKTIVVMLPLSTSQLQKLRSKANGSKHSDPAKGFTRYETVTGHVWRCACKARGHSPEQPTALGICIDTRSRMEPPLPRGYFGNATLDVVAASTSGELISNELGFAASLISKAIKNVTNEYVMIGIEYLKNQKDLKKFQDLHALGSTEGPFYGNPNLGVVSWLTLPMYGLDFGWGKEFYTGPGTHDFDGDSLILPDQNEDGSVILATCLQVAHMEAFKKHFYEDI

SEQ ID NO: 49464 - protein, 380 aa, Arabidopsis thaliana
  peptide (1)..(380): Ceres Seq. ID no. 13592596
  misc_feature (1)..(379): Pfam Name: Transferase family Pfam Description: Transferase family
  misc_feature (1)..(378): Homolog of NCBI NO: 15242883 NR Description: hydroxycinnamoyl/benzoyltransferase family
  misc_feature (1)..(378): Homolog of NCBI NO: 7484691 NR Description: anthranilate N-benzoyltransferase (EC 2.3.1.144)
  misc_feature (1)..(378): Homolog of NCBI NO: 7484692 NR Description: anthranilate N-benzoyltransferase (EC 2.3.1.144)
  misc_feature (1)..(290): Homolog of NCBI NO: 40644899 NR Description: hydroxycinnamoyl CoA quinate transferase
  misc_feature (1)..(292): Homolog of NCBI NO: 6469032 NR Description: N-hydroxycinnamoyl/benzoyltransferase [Ipomoea
  misc_feature (1)..(378): Homolog of NCBI NO: 15239747 NR Description: anthranilate
  misc_feature (1)..(378): Homolog of NCBI NO: 21536883 NR Description: anthranilate N-benzoyltransferase [Arabidopsis
  misc_feature (1)..(378): Homolog of NCBI NO: 38345030 NR Description: OSJNBa0029H02.14 [Oryza sativa (japonica
  misc_feature (1)..(378): Homolog of NCBI NO: 27475616 NR Description: hydroxycinnamoyl transferase [Nicotiana tabacum]
  misc_feature (1)..(380): Homolog of NCBI NO: 15224709 NR Description: hydroxycinnamoyl/benzoyltransferase family
MAGRLRWLPRGRFELNCNAEGVEFIEAESEGKLSDFKDFSPTPEFENLMPQVNYKNPIETIPLFLAQVTKFKCGGISLSVNVSHAIVDGQSALHLISEWGRLARGEPLETVPFLDRKILWAGEPLPPFVSPPKFDHKEFDQPPFLIGETDNVEERKKKTIVVMLPLSTSQLQKLRSKANGSKHSDPAKGFTRYETVTGHVWRCACKARGHSPEQPTALGICIDTRSRMEPPLPRGYFGNATLDVVAASTSGELISNELGFAASLISKAIKNVTNEYVMIGIEYLKNQKDLKKFQDLHALGSTEGPFYGNPNLGVVSWLTLPMYGLDFGWGKEFYTGPGTHDFDGDSLILPDQNEDGSVILATCLQVAHMEAFKKHFYEDI

SEQ ID NO: 49465 - DNA, 682 bp, Arabidopsis thaliana; identical to SEQ ID NO: 47245
  misc_feature (1)..(682): Ceres Seq. ID no. 12601843
  misc_feature: MA Experiment ID: 20000306 Result: Up-regulated in Transcription
  misc_feature: MA Experiment 20000306 PARAMETER Experiment Name: At_Germinating_Seeds_Sub_P Parameter: Age (hr) Value: 6 vs. 0
  misc_feature: MA Experiment 20000306 PARAMETER Experiment Name: At_Germinating_Seeds_Sub_P Parameter: Organism Value: A. thaliana
  misc_feature: MA Experiment 20000306 PARAMETER Experiment Name: At_Germinating_Seeds_Sub_P Parameter: Plant Line Value: WS
  misc_feature: MA Experiment 20000306 PARAMETER Experiment Name: At_Germinating_Seeds_Sub_P Parameter: Tissue Value: Germinating Seeds
  misc_feature: MA Experiment ID: 20000307 Result: Up-regulated in Transcription
  misc_feature: MA Experiment 20000307 PARAMETER Experiment Name: At_Germinating_Seeds_Sub_P Parameter: Age (hr) Value: 24 vs. 0
  misc_feature: MA Experiment 20000307 PARAMETER Experiment Name: At_Germinating_Seeds_Sub_P Parameter: Organism Value: A. thaliana
  misc_feature: MA Experiment 20000307 PARAMETER Experiment Name: At_Germinating_Seeds_Sub_P Parameter: Plant Line Value: WS
  misc_feature: MA Experiment 20000307 PARAMETER Experiment Name: At_Germinating_Seeds_Sub_P Parameter: Tissue Value: Germinating Seeds
  misc_feature: MA Experiment ID: 20000314 Result: Down-regulated in Transcription
  misc_feature: MA Experiment 20000314 PARAMETER Experiment Name: At_14day_Shoots-Roots_Sub_P Parameter: Age (day) Value: 14
  misc_feature: MA Experiment 20000314 PARAMETER Experiment Name: At_14day_Shoots-Roots_Sub_P Parameter: Organism Value: A. thaliana
  misc_feature: MA Experiment 20000314 PARAMETER Experiment Name: At_14day_Shoots-Roots_Sub_P Parameter: Plant Line Value: WS
  misc_feature: MA Experiment 20000314 PARAMETER Experiment Name: At_14day_Shoots-Roots_Sub_P Parameter: Tissue Value: Roots vs. Whole Plant
  misc_feature: MA Experiment ID: 20000315 Result: Up-regulated in Transcription
  misc_feature: MA Experiment 20000315 PARAMETER Experiment Name: At_14day_Shoots-Roots_Sub_P Parameter: Age (day) Value: 14
  misc_feature: MA Experiment 20000315 PARAMETER Experiment Name: At_14day_Shoots-Roots_Sub_P Parameter: Organism Value: A. thaliana
  misc_feature: MA Experiment 20000315 PARAMETER Experiment Name: At_14day_Shoots-Roots_Sub_P Parameter: Plant Line Value: WS
  misc_feature: MA Experiment 20000315 PARAMETER Experiment Name: At_14day_Shoots-Roots_Sub_P Parameter: Tissue Value: Shoots vs. Whole Plant
  misc_feature: MA Experiment ID: 20000328 Result: Up-regulated in Transcription
  misc_feature: MA Experiment 20000328 PARAMETER Experiment Name: At_42deg_Heat_Sub_P Parameter: Age (day) Value: 14
  misc_feature: MA Experiment 20000328 PARAMETER Experiment Name: At_42deg_Heat_Sub_P Parameter: Organism Value: A. thaliana
  misc_feature: MA Experiment 20000328 PARAMETER Experiment Name: At_42deg_Heat_Sub_P Parameter: Plant Line Value: WS
  misc_feature: MA Experiment 20000328 PARAMETER Experiment Name: At_42deg_Heat_Sub_P Parameter: Temperature (deg C) Value: 42 vs. 22
  misc_feature: MA Experiment 20000328 PARAMETER Experiment Name: At_42deg_Heat_Sub_P Parameter: Timepoint (hr) Value: 6
  misc_feature: MA Experiment 20000328 PARAMETER Experiment Name: At_42deg_Heat_Sub_P Parameter: Tissue Value: Aerial
  misc_feature: MA Experiment ID: 20001807 Result: Up-regulated in Transcription
  misc_feature: MA Experiment 20001807 PARAMETER Experiment Name: At_50mM_NH4NO3_L-to-H_Sub_P Parameter: Timepoint (hr) Value: 6
  misc_feature: MA Experiment 20001807 PARAMETER Experiment Name: At_50mM_NH4NO3_L-to-H_Sub_P Parameter: Tissue Value: Leaf
  misc_feature: MA Experiment 20001807 PARAMETER Experiment Name: At_50mM_NH4NO3_L-to-H_Sub_P Parameter: Treatment Value: 50mM NH4NO3 vs 100mM Mannitol

SEQ ID NO: 49466 - protein, 181 aa, Arabidopsis thaliana; identical to SEQ ID NO: 47246
  peptide (1)..(181): Ceres Seq. ID no. 12601844
  misc_feature (1)..(179): Homolog of NCBI NO: 68063 NR Description: ribulose-bisphosphate carboxylase (EC 4.1.1.39)
  misc_feature (1)..(179): Homolog of NCBI NO: 15219826 NR Description: ribulose-bisphosphate carboxylase small unit,
  misc_feature (1)..(181): Homolog of NCBI NO: 132154 NR Description: Ribulose bisphosphate carboxylase small chain,
  misc_feature (1)..(181): Homolog of NCBI NO: 266891 NR Description: Ribulose bisphosphate carboxylase small chain,
  misc_feature (1)..(181): Homolog of NCBI NO: 132091 NR Description: Ribulose bisphosphate carboxylase small chain F1,
  misc_feature (1)..(181): Homolog of NCBI NO: 15240901 NR Description: ribulose bisphosphate carboxylase small chain 3b
  misc_feature (1)..(181): Homolog of NCBI NO: 68060 NR Description: ribulose-bisphosphate carboxylase (EC 4.1.1.39)
  misc_feature (1)..(181): Homolog of NCBI NO: 15240912 NR Description: ribulose bisphosphate carboxylase small chain 1b
  misc_feature (1)..(181): Homolog of NCBI NO: 15240903 NR Description: ribulose bisphosphate carboxylase small chain 2b
  misc_feature (1)..(181): Homolog of NCBI NO: 68061 NR Description: ribulose-bisphosphate carboxylase (EC 4.1.1.39)
  misc_feature (1)..(179): Homolog of NCBI NO: 68063 NR Description: ribulose-bisphosphate carboxylase (EC 4.1.1.39)
  misc_feature (1)..(179): Homolog of NCBI NO: 15219826 NR Description: ribulose-bisphosphate carboxylase small unit,
  misc_feature (1)..(181): Homolog of NCBI NO: 132154 NR Description: Ribulose bisphosphate carboxylase small chain,
  misc_feature (1)..(181): Homolog of NCBI NO: 266891 NR Description: Ribulose bisphosphate carboxylase small chain,
  misc_feature (1)..(181): Homolog of NCBI NO: 132091 NR Description: Ribulose bisphosphate carboxylase small chain F1,
  misc_feature (1)..(181): Homolog of NCBI NO: 15240901 NR Description: ribulose bisphosphate carboxylase small chain 3b
  misc_feature (1)..(181): Homolog of NCBI NO: 68060 NR Description: ribulose-bisphosphate carboxylase (EC 4.1.1.39)
  misc_feature (1)..(181): Homolog of NCBI NO: 15240912 NR Description: ribulose bisphosphate carboxylase small chain 1b
  misc_feature (1)..(181): Homolog of NCBI NO: 15240903 NR Description: ribulose bisphosphate carboxylase small chain 2b
  misc_feature (1)..(181): Homolog of NCBI NO: 68061 NR Description: ribulose-bisphosphate carboxylase (EC 4.1.1.39)
  misc_feature (1)..(179): Homolog of NCBI NO: 68063 NR Description: ribulose-bisphosphate carboxylase (EC 4.1.1.39)
  misc_feature (1)..(179): Homolog of NCBI NO: 15219826 NR Description: ribulose-bisphosphate carboxylase small unit,
  misc_feature (1)..(181): Homolog of NCBI NO: 132154 NR Description: Ribulose bisphosphate carboxylase small chain,
  misc_feature (1)..(181): Homolog of NCBI NO: 266891 NR Description: Ribulose bisphosphate carboxylase small chain,
  misc_feature (1)..(181): Homolog of NCBI NO: 132091 NR Description: Ribulose bisphosphate carboxylase small chain F1,
  misc_feature (1)..(181): Homolog of NCBI NO: 15240901 NR Description: ribulose bisphosphate carboxylase small chain 3b
  misc_feature (1)..(181): Homolog of NCBI NO: 68060 NR Description: ribulose-bisphosphate carboxylase (EC 4.1.1.39)
  misc_feature (1)..(181): Homolog of NCBI NO: 15240912 NR Description: ribulose bisphosphate carboxylase small chain 1b
  misc_feature (1)..(181): Homolog of NCBI NO: 15240903 NR Description: ribulose bisphosphate carboxylase small chain 2b
  misc_feature (1)..(181): Homolog of NCBI NO: 68061 NR Description: ribulose-bisphosphate carboxylase (EC 4.1.1.39)

SEQ ID NO: 49467 - protein, 177 aa, Arabidopsis thaliana; identical to SEQ ID NO: 47247
  peptide (1)..(177): Ceres Seq. ID no. 12601845
  misc_feature (1)..(175): Homolog of NCBI NO: 68063 NR Description: ribulose-bisphosphate carboxylase (EC 4.1.1.39)
  misc_feature (1)..(175): Homolog of NCBI NO: 15219826 NR Description: ribulose-bisphosphate carboxylase small unit,
  misc_feature (1)..(177): Homolog of NCBI NO: 132154 NR Description: Ribulose bisphosphate carboxylase small chain,
  misc_feature (1)..(177): Homolog of NCBI NO: 266891 NR Description: Ribulose bisphosphate carboxylase small chain,
  misc_feature (1)..(177): Homolog of NCBI NO: 132091 NR Description: Ribulose bisphosphate carboxylase small chain F1,
  misc_feature (1)..(177): Homolog of NCBI NO: 15240901 NR Description: ribulose bisphosphate carboxylase small chain 3b
  misc_feature (1)..(177): Homolog of NCBI NO: 68060 NR Description: ribulose-bisphosphate carboxylase (EC 4.1.1.39)
  misc_feature (1)..(177): Homolog of NCBI NO: 15240912 NR Description: ribulose bisphosphate carboxylase small chain 1b
  misc_feature (1)..(177): Homolog of NCBI NO: 15240903 NR Description: ribulose bisphosphate carboxylase small chain 2b
  misc_feature (1)..(177): Homolog of NCBI NO: 68061 NR Description: ribulose-bisphosphate carboxylase (EC 4.1.1.39)
  misc_feature (1)..(175): Homolog of NCBI NO: 68063 NR Description: ribulose-bisphosphate carboxylase (EC 4.1.1.39)
  misc_feature (1)..(175): Homolog of NCBI NO: 15219826 NR Description: ribulose-bisphosphate carboxylase small unit,
  misc_feature (1)..(177): Homolog of NCBI NO: 132154 NR Description: Ribulose bisphosphate carboxylase small chain,
  misc_feature (1)..(177): Homolog of NCBI NO: 266891 NR Description: Ribulose bisphosphate carboxylase small chain,
  misc_feature (1)..(177): Homolog of NCBI NO: 132091 NR Description: Ribulose bisphosphate carboxylase small chain F1,
  misc_feature (1)..(177): Homolog of NCBI NO: 15240901 NR Description: ribulose bisphosphate carboxylase small chain 3b
  misc_feature (1)..(177): Homolog of NCBI NO: 68060 NR Description: ribulose-bisphosphate carboxylase (EC 4.1.1.39)
  misc_feature (1)..(177): Homolog of NCBI NO: 15240912 NR Description: ribulose bisphosphate carboxylase small chain 1b
  misc_feature (1)..(177): Homolog of NCBI NO: 15240903 NR Description: ribulose bisphosphate carboxylase small chain 2b
  misc_feature (1)..(177): Homolog of NCBI NO: 68061 NR Description: ribulose-bisphosphate carboxylase (EC 4.1.1.39)
  misc_feature (1)..(175): Homolog of NCBI NO: 68063 NR Description: ribulose-bisphosphate carboxylase (EC 4.1.1.39)
  misc_feature (1)..(175): Homolog of NCBI NO: 15219826 NR Description: ribulose-bisphosphate carboxylase small unit,
  misc_feature (1)..(177): Homolog of NCBI NO: 132154 NR Description: Ribulose bisphosphate carboxylase small chain,
  misc_feature (1)..(177): Homolog of NCBI NO: 266891 NR Description: Ribulose bisphosphate carboxylase small chain,
  misc_feature (1)..(177): Homolog of NCBI NO: 132091 NR Description: Ribulose bisphosphate carboxylase small chain F1,
  misc_feature (1)..(177): Homolog of NCBI NO: 15240901 NR Description: ribulose bisphosphate carboxylase small chain 3b
  misc_feature (1)..(177): Homolog of NCBI NO: 68060 NR Description: ribulose-bisphosphate carboxylase (EC 4.1.1.39)
  misc_feature (1)..(177): Homolog of NCBI NO: 15240912 NR Description: ribulose bisphosphate carboxylase small chain 1b
  misc_feature (1)..(177): Homolog of NCBI NO: 15240903 NR Description: ribulose bisphosphate carboxylase small chain 2b
  misc_feature (1)..(177): Homolog of NCBI NO: 68061 NR Description: ribulose-bisphosphate carboxylase (EC 4.1.1.39)

SEQ ID NO: 49468 - protein, 162 aa, Arabidopsis thaliana; identical to SEQ ID NO: 47248
  peptide (1)..(162): Ceres Seq. ID no. 12601846
  misc_feature (1)..(160): Homolog of NCBI NO: 68063 NR Description: ribulose-bisphosphate carboxylase (EC 4.1.1.39)
  misc_feature (1)..(160): Homolog of NCBI NO: 15219826 NR Description: ribulose-bisphosphate carboxylase small unit,
  misc_feature (1)..(162): Homolog of NCBI NO: 132154 NR Description: Ribulose bisphosphate carboxylase small chain,
  misc_feature (1)..(162): Homolog of NCBI NO: 266891 NR Description: Ribulose bisphosphate carboxylase small chain,
  misc_feature (1)..(162): Homolog of NCBI NO: 132091 NR Description: Ribulose bisphosphate carboxylase small chain F1,
  misc_feature (1)..(162): Homolog of NCBI NO: 15240901 NR Description: ribulose bisphosphate carboxylase small chain 3b
  misc_feature (1)..(162): Homolog of NCBI NO: 68060 NR Description: ribulose-bisphosphate carboxylase (EC 4.1.1.39)
  misc_feature (1)..(162): Homolog of NCBI NO: 15240912 NR Description: ribulose bisphosphate carboxylase small chain 1b
  misc_feature (1)..(162): Homolog of NCBI NO: 15240903 NR Description: ribulose bisphosphate carboxylase small chain 2b
  misc_feature (1)..(162): Homolog of NCBI NO: 68061 NR Description: ribulose-bisphosphate carboxylase (EC 4.1.1.39)
  misc_feature (1)..(160): Homolog of NCBI NO: 68063 NR Description: ribulose-bisphosphate carboxylase (EC 4.1.1.39)
  misc_feature (1)..(160): Homolog of NCBI NO: 15219826 NR Description: ribulose-bisphosphate carboxylase small unit,
  misc_feature (1)..(162): Homolog of NCBI NO: 132154 NR Description: Ribulose bisphosphate carboxylase small chain,
  misc_feature (1)..(162): Homolog of NCBI NO: 266891 NR Description: Ribulose bisphosphate carboxylase small chain,
  misc_feature (1)..(162): Homolog of NCBI NO: 132091 NR Description: Ribulose bisphosphate carboxylase small chain F1,
  misc_feature (1)..(162): Homolog of NCBI NO: 15240901 NR Description: ribulose bisphosphate carboxylase small chain 3b
  misc_feature (1)..(162): Homolog of NCBI NO: 68060 NR Description: ribulose-bisphosphate carboxylase (EC 4.1.1.39)
  misc_feature (1)..(162): Homolog of NCBI NO: 15240912 NR Description: ribulose bisphosphate carboxylase small chain 1b
  misc_feature (1)..(162): Homolog of NCBI NO: 15240903 NR Description: ribulose bisphosphate carboxylase small chain 2b
  misc_feature (1)..(162): Homolog of NCBI NO: 68061 NR Description: ribulose-bisphosphate carboxylase (EC 4.1.1.39)
  misc_feature (1)..(160): Homolog of NCBI NO: 68063 NR Description: ribulose-bisphosphate carboxylase (EC 4.1.1.39)
  misc_feature (1)..(160): Homolog of NCBI NO: 15219826 NR Description: ribulose-bisphosphate carboxylase small unit,
  misc_feature (1)..(162): Homolog of NCBI NO: 132154 NR Description: Ribulose bisphosphate carboxylase small chain,
  misc_feature (1)..(162): Homolog of NCBI NO: 266891 NR Description: Ribulose bisphosphate carboxylase small chain,
  misc_feature (1)..(162): Homolog of NCBI NO: 132091 NR Description: Ribulose bisphosphate carboxylase small chain F1,
  misc_feature (1)..(162): Homolog of NCBI NO: 15240901 NR Description: ribulose bisphosphate carboxylase small chain 3b
  misc_feature (1)..(162): Homolog of NCBI NO: 68060 NR Description: ribulose-bisphosphate carboxylase (EC 4.1.1.39)
  misc_feature (1)..(162): Homolog of NCBI NO: 15240912 NR Description: ribulose bisphosphate carboxylase small chain 1b
  misc_feature (1)..(162): Homolog of NCBI NO: 15240903 NR Description: ribulose bisphosphate carboxylase small chain 2b
  misc_feature (1)..(162): Homolog of NCBI NO: 68061 NR Description: ribulose-bisphosphate carboxylase (EC 4.1.1.39)

SEQ ID NO: 49469 - DNA, 1545 bp, Arabidopsis thaliana
  misc_feature (1)..(1545): Ceres Seq. ID no. 12591195
  misc_feature: MA Experiment ID: 108434 Result: Down-regulated in Transcription
  misc_feature: MA Experiment 108434 PARAMETER Experiment Name: At_Root_Tips_cDNA_P Parameter: Tissue Value: Root Tips
  misc_feature: MA Experiment ID: 108435 Result: Down-regulated in Transcription
  misc_feature: MA Experiment 108435 PARAMETER Experiment Name: At_stm_Mutants_cDNA_P Parameter: Plant Line Value: wt Landsburg vs stm
  misc_feature: MA Experiment 108435 PARAMETER Experiment Name: At_stm_Mutants_cDNA_P Parameter: Tissue Value: Shoot Apical Meristem Region
  misc_feature: MA Experiment ID: 108461 Result: Up-regulated in Transcription
  misc_feature: MA Experiment 108461 PARAMETER Experiment Name: At_Germinating_Seeds_cDNA_P Parameter: Age (day) Value: 1 vs. 0
  misc_feature: MA Experiment 108461 PARAMETER Experiment Name: At_Germinating_Seeds_cDNA_P Parameter: Tissue Value: Germinating Seeds
  misc_feature: MA Experiment ID: 108462 Result: Up-regulated in Transcription
  misc_feature: MA Experiment 108462 PARAMETER Experiment Name: At_Germinating_Seeds_cDNA_P Parameter: Age (day) Value: 2 vs. 0
  misc_feature: MA Experiment 108462 PARAMETER Experiment Name: At_Germinating_Seeds_cDNA_P Parameter: Tissue Value: Germinating Seeds
  misc_feature: MA Experiment ID: 108463 Result: Up-regulated in Transcription
  misc_feature: MA Experiment 108463 PARAMETER Experiment Name: At_Germinating_Seeds_cDNA_P Parameter: Age (day) Value: 3 vs. 0
  misc_feature: MA Experiment 108463 PARAMETER Experiment Name: At_Germinating_Seeds_cDNA_P Parameter: Tissue Value: Germinating Seeds
  misc_feature: MA Experiment ID: 108464 Result: Up-regulated in Transcription
  misc_feature: MA Experiment 108464 PARAMETER Experiment Name: At_Germinating_Seeds_cDNA_P Parameter: Age (day) Value: 4 vs. 0
  misc_feature: MA Experiment 108464 PARAMETER Experiment Name: At_Germinating_Seeds_cDNA_P Parameter: Tissue Value: Germinating Seeds
  misc_feature: MA Experiment ID: 108577 Result: Down-regulated in Transcription
  misc_feature: MA Experiment 108577 PARAMETER Experiment Name: At_42deg_Heat_cDNA_P Parameter: Temperature (deg C) Value: 42 vs. 22
  misc_feature: MA Experiment 108577 PARAMETER Experiment Name: At_42deg_Heat_cDNA_P Parameter: Timepoint (hr) Value: 6
  misc_feature: MA Experiment 108577 PARAMETER Experiment Name: At_42deg_Heat_cDNA_P Parameter: Tissue Value: Aerial
  misc_feature: MA Experiment ID: 108594 Result: Up-regulated in Transcription
  misc_feature: MA Experiment 108594 PARAMETER Experiment Name: At_Ler-rhl_Root_cDNA_P Parameter: Plant Line Value: null
  misc_feature: MA Experiment ID: 108595 Result: Down-regulated in Transcription
  misc_feature: MA Experiment 108595 PARAMETER Experiment Name: At_Ler-pi_Ovule_cDNA_P Parameter: Plant Line Value: null
  misc_feature: MA Experiment ID: 108605 Result: Down-regulated in Transcription
  misc_feature: MA Experiment 108605 PARAMETER Experiment Name: At_100uM_ABA_cDNA_P Parameter: Timepoint (hr) Value: 6
  misc_feature: MA Experiment 108605 PARAMETER Experiment Name: At_100uM_ABA_cDNA_P Parameter: Tissue Value: Aerial
  misc_feature: MA Experiment 108605 PARAMETER Experiment Name: At_100uM_ABA_cDNA_P Parameter: Treatment Value: 100uM ABA vs. No Treatment
  misc_feature: MA Experiment ID: 108607 Result: Down-regulated in Transcription
  misc_feature: MA Experiment 108607 PARAMETER Experiment Name: At_100uM_ABA_cDNA_P Parameter: Timepoint (hr) Value: 4
  misc_feature: MA Experiment 108607 PARAMETER Experiment Name: At_100uM_ABA_cDNA_P Parameter: Tissue Value: Aerial
  misc_feature: MA Experiment 108607 PARAMETER Experiment Name: At_100uM_ABA_cDNA_P Parameter: Treatment Value: 100uM ABA vs. No Treatment
  misc_feature: MA Experiment ID: 108609 Result: Down-regulated in Transcription
  misc_feature: MA Experiment 108609 PARAMETER Experiment Name: At_100uM_ABA_cDNA_P Parameter: Timepoint (hr) Value: 24
  misc_feature: MA Experiment 108609 PARAMETER Experiment Name: At_100uM_ABA_cDNA_P Parameter: Tissue Value: Aerial
  misc_feature: MA Experiment 108609 PARAMETER Experiment Name: At_100uM_ABA_cDNA_P Parameter: Treatment Value: 100uM ABA vs. No Treatment
  misc_feature: MA Experiment ID: 20000070 Result: Down-regulated in Transcription
  misc_feature: MA Experiment 20000070 PARAMETER Experiment Name: At_100uM_ABA_Mutants_cDNA_P Parameter: Plant Line Value: CS24
  misc_feature: MA Experiment 20000070 PARAMETER Experiment Name: At_100uM_ABA_Mutants_cDNA_P Parameter: Timepoint (hr) Value: 6
  misc_feature: MA Experiment 20000070 PARAMETER Experiment Name: At_100uM_ABA_Mutants_cDNA_P Parameter: Tissue Value: Aerial
  misc_feature: MA Experiment 20000070 PARAMETER Experiment Name: At_100uM_ABA_Mutants_cDNA_P Parameter: Treatment Value: 100uM ABA vs. No Treatment
  misc_feature: MA Experiment ID: 20000111 Result: Down-regulated in Transcription
  misc_feature: MA Experiment 20000111 PARAMETER Experiment Name: At_42deg_Heat_cDNA_P Parameter: Temperature (deg C) Value: 42 vs. 22
  misc_feature: MA Experiment 20000111 PARAMETER Experiment Name: At_42deg_Heat_cDNA_P Parameter: Timepoint (hr) Value: 6
  misc_feature: MA Experiment 20000111 PARAMETER Experiment Name: At_42deg_Heat_cDNA_P Parameter: Tissue Value: Aerial
  misc_feature: MA Experiment ID: 20000144 Result: Down-regulated in Transcription
  misc_feature: MA Experiment 20000144 PARAMETER Experiment Name: At_42deg_Heat_cDNA_P Parameter: Temperature (deg C) Value: 42 vs. 22
  misc_feature: MA Experiment 20000144 PARAMETER Experiment Name: At_42deg_Heat_cDNA_P Parameter: Timepoint (hr) Value: 1
  misc_feature: MA Experiment 20000144 PARAMETER Experiment Name: At_42deg_Heat_cDNA_P Parameter: Tissue Value: Aerial
  misc_feature: MA Experiment ID: 20000214 Result: Up-regulated in Transcription
  misc_feature: MA Experiment 20000214 PARAMETER Experiment Name: At_4deg_Cold_P Parameter: Timepoint (hr) Value: 6
  misc_feature: MA Experiment ID: 20000224 Result: Down-regulated in Transcription
  misc_feature: MA Experiment ID: 20000234 Result: Down-regulated in Transcription
  misc_feature: MA Experiment 20000234 PARAMETER Experiment Name: At_Siliques_P Parameter: Age (day) Value: 21
  misc_feature: MA Experiment 20000234 PARAMETER Experiment Name: At_Siliques_P Parameter: Organism Value: A. thaliana
  misc_feature: MA Experiment 20000234 PARAMETER Experiment Name: At_Siliques_P Parameter: Plant Line Value: WS
  misc_feature: MA Experiment 20000234 PARAMETER Experiment Name: At_Siliques_P Parameter: Tissue Value: Less Than 5mm Siliques vs. Whole Plant
  misc_feature: MA Experiment ID: 20000235 Result: Down-regulated in Transcription
  misc_feature: MA Experiment 20000235 PARAMETER Experiment Name: At_Siliques_P Parameter: Age (day) Value: 21
  misc_feature: MA Experiment 20000235 PARAMETER Experiment Name: At_Siliques_P Parameter: Organism Value: A. thaliana
  misc_feature: MA Experiment 20000235 PARAMETER Experiment Name: At_Siliques_P Parameter: Plant Line Value: WS
  misc_feature: MA Experiment 20000235 PARAMETER Experiment Name: At_Siliques_P Parameter: Tissue Value: 5-10mm Siliques vs. Whole Plant
  misc_feature: MA Experiment ID: 20000264 Result: Down-regulated in Transcription
  misc_feature: MA Experiment 20000264 PARAMETER Experiment Name: At_Open_Flower_P Parameter: Age (day) Value: 21
  misc_feature: MA Experiment 20000264 PARAMETER Experiment Name: At_Open_Flower_P Parameter: Plant Line Value: WS
  misc_feature: MA Experiment 20000264 PARAMETER Experiment Name: At_Open_Flower_P Parameter: Tissue Value: Open Flower vs. Whole Plant
  misc_feature: MA Experiment ID: 20000265 Result: Down-regulated in Transcription
  misc_feature: MA Experiment 20000265 PARAMETER Experiment Name: At_Open_Flower_P Parameter: Age (day) Value: 21
  misc_feature: MA Experiment 20000265 PARAMETER Experiment Name: At_Open_Flower_P Parameter: Plant Line Value: WS
  misc_feature: MA Experiment 20000265 PARAMETER Experiment Name: At_Open_Flower_P Parameter: Tissue Value: Closed Flower vs. Whole Plant
  misc_feature: MA Experiment ID: 20000268 Result: Down-regulated in Transcription
  misc_feature: MA Experiment 20000268 PARAMETER Experiment Name: At_100mM_NaCl__P Parameter: Age (day) Value: 14
  misc_feature: MA Experiment 20000268 PARAMETER Experiment Name: At_100mM_NaCl__P Parameter: Organism Value: A. thaliana
  misc_feature: MA Experiment 20000268 PARAMETER Experiment Name: At_100mM_NaCl__P Parameter: Plant Line Value: WS
  misc_feature: MA Experiment 20000268 PARAMETER Experiment Name: At_100mM_NaCl__P Parameter: Timepoint (hr) Value: 6
  misc_feature: MA Experiment 20000268 PARAMETER Experiment Name: At_100mM_NaCl__P Parameter: Tissue Value: Whole Plant
  misc_feature: MA Experiment 20000268 PARAMETER Experiment Name: At_100mM_NaCl__P Parameter: Treatment Value: 100mM NaCl vs. No Treatment
  misc_feature: MA Experiment ID: 20000286 Result: Down-regulated in Transcription
  misc_feature: MA Experiment 20000286 PARAMETER Experiment Name: At_Open_Flower_P Parameter: Age (day) Value: 21
  misc_feature: MA Experiment 20000286 PARAMETER Experiment Name: At_Open_Flower_P Parameter: Plant Line Value: WS
  misc_feature: MA Experiment 20000286 PARAMETER Experiment Name: At_Open_Flower_P Parameter: Tissue Value: Half Open vs. Whole Plant
  misc_feature: MA Experiment ID: 20000308 Result: Down-regulated in Transcription
  misc_feature: MA Experiment 20000308 PARAMETER Experiment Name: At_100mM_NaCl__P Parameter: Age (day) Value: 17
  misc_feature: MA Experiment 20000308 PARAMETER Experiment Name: At_100mM_NaCl__P Parameter: Organism Value: A. thaliana
  misc_feature: MA Experiment 20000308 PARAMETER Experiment Name: At_100mM_NaCl__P Parameter: Plant Line Value: WS
  misc_feature: MA Experiment 20000308 PARAMETER Experiment Name: At_100mM_NaCl__P Parameter: Timepoint (hr) Value: 72
  misc_feature: MA Experiment 20000308 PARAMETER Experiment Name: At_100mM_NaCl__P Parameter: Tissue Value: Whole Plant
  misc_feature: MA Experiment 20000308 PARAMETER Experiment Name: At_100mM_NaCl__P Parameter: Treatment Value: 100mM NaCl vs. No Treatment
  misc_feature: MA Experiment ID: 20000439 Result: Down-regulated in Transcription
  misc_feature: MA Experiment 20000439 PARAMETER Experiment Name: At_Roots__P Parameter: Age (day) Value: 14 vs. 21
  misc_feature: MA Experiment 20000439 PARAMETER Experiment Name: At_Roots__P Parameter: Organism Value: A. thaliana
  misc_feature: MA Experiment 20000439 PARAMETER Experiment Name: At_Roots__P Parameter: Tissue Value: Roots vs. Whole Plant
  misc_feature: MA Experiment ID: 20000441 Result: Up-regulated in Transcription
  misc_feature: MA Experiment 20000441 PARAMETER Experiment Name: At_1uM_BR-BRZ__P Parameter: Tissue Value: Shoot Apices
  misc_feature: MA Experiment 20000441 PARAMETER Experiment Name: At_1uM_BR-BRZ__P Parameter: Treatment Value: 1uM BR vs. No Treatment
  misc_feature: MA Experiment ID: 20000455 Result: Down-regulated in Transcription
  misc_feature: MA Experiment 20000455 PARAMETER Experiment Name: At_100uM_ABA_P Parameter: Age (day) Value: 16
  misc_feature: MA Experiment 20000455 PARAMETER Experiment Name: At_100uM_ABA_P Parameter: Organism Value: A. thaliana
  misc_feature: MA Experiment 20000455 PARAMETER Experiment Name: At_100uM_ABA_P Parameter: Plant Line Value: WS
  misc_feature: MA Experiment 20000455 PARAMETER Experiment Name: At_100uM_ABA_P Parameter: Timepoint (hr) Value: 48
  misc_feature: MA Experiment 20000455 PARAMETER Experiment Name: At_100uM_ABA_P Parameter: Tissue Value: Aerial
  misc_feature: MA Experiment 20000455 PARAMETER Experiment Name: At_100uM_ABA_P Parameter: Treatment Value: 100uM ABA vs. No Treatment
  misc_feature: MA Experiment ID: 20000495 Result: Down-regulated in Transcription
  misc_feature: MA Experiment 20000495 PARAMETER Experiment Name: At_Guard_Cells_P Parameter: Harvest Date Value: 8/2/2002
  misc_feature: MA Experiment 20000495 PARAMETER Experiment Name: At_Guard_Cells_P Parameter: Organism Value: A. thaliana
  misc_feature: MA Experiment 20000495 PARAMETER Experiment Name: At_Guard_Cells_P Parameter: Tissue Value: Guard Cells vs. Leaves
  misc_feature: MA Experiment ID: 20000574 Result: Down-regulated in Transcription
  misc_feature: MA Experiment 20000574 PARAMETER Experiment Name: At_100uM_ABA_Mutants__P Parameter: Organism Value: A. thaliana
  misc_feature: MA Experiment 20000574 PARAMETER Experiment Name: At_100uM_ABA_Mutants__P Parameter: Plant Line Value: CS23 vs. Ler wt
  misc_feature: MA Experiment 20000574 PARAMETER Experiment Name: At_100uM_ABA_Mutants__P Parameter: Timepoint (hr) Value: N/A
  misc_feature: MA Experiment 20000574 PARAMETER Experiment Name: At_100uM_ABA_Mutants__P Parameter: Tissue Value: Whole Plant
  misc_feature: MA Experiment 20000574 PARAMETER Experiment Name: At_100uM_ABA_Mutants__P Parameter: Treatment Value: None
  misc_feature: MA Experiment ID: 20000794 Result: Down-regulated in Transcription
  misc_feature: MA Experiment 20000794 PARAMETER Experiment Name: At_Petals_P Parameter: Age (day) Value: 23-25 days
  misc_feature: MA Experiment 20000794 PARAMETER Experiment Name: At_Petals_P Parameter: Plant Line Value: WS
  misc_feature: MA Experiment 20000794 PARAMETER Experiment Name: At_Petals_P Parameter: Tissue Value: Petals vs. Whole plant
  misc_feature: MA Experiment ID: 20001247 Result: Up-regulated in Transcription
  misc_feature: MA Experiment 20001247 PARAMETER Experiment Name: At_Far-red-induction_P Parameter: Age (day) Value: 7
  misc_feature: MA Experiment 20001247 PARAMETER Experiment Name: At_Far-red-induction_P Parameter: Light Value: Far-red vs. White
  misc_feature: MA Experiment 20001247 PARAMETER Experiment Name: At_Far-red-induction_P Parameter: Organism Value: A. thaliana
  misc_feature: MA Experiment 20001247 PARAMETER Experiment Name: At_Far-red-induction_P Parameter: Plant Line Value: Columbia
  misc_feature: MA Experiment 20001247 PARAMETER Experiment Name: At_Far-red-induction_P Parameter: Timepoint (hr) Value: 1
  misc_feature: MA Experiment 20001247 PARAMETER Experiment Name: At_Far-red-induction_P Parameter: Tissue Value: Whole Plant
  misc_feature: MA Experiment ID: 20001248 Result: Up-regulated in Transcription
  misc_feature: MA Experiment 20001248 PARAMETER Experiment Name: At_Far-red-induction_P Parameter: Age (day) Value: 7
  misc_feature: MA Experiment 20001248 PARAMETER Experiment Name: At_Far-red-induction_P Parameter: Light Value: Far-red vs. White
  misc_feature: MA Experiment 20001248 PARAMETER Experiment Name: At_Far-red-induction_P Parameter: Organism Value: A. thaliana
  misc_feature: MA Experiment 20001248 PARAMETER Experiment Name: At_Far-red-induction_P Parameter: Plant Line Value: Columbia
  misc_feature: MA Experiment 20001248 PARAMETER Experiment Name: At_Far-red-induction_P Parameter: Timepoint (hr) Value: 4
  misc_feature: MA Experiment 20001248 PARAMETER Experiment Name: At_Far-red-induction_P Parameter: Tissue Value: Whole Plant
  misc_feature: MA Experiment ID: 20001450 Result: Up-regulated in Transcription
  misc_feature: MA Experiment 20001450 PARAMETER Experiment Name: At_Far-red-induction_P Parameter: Age (day) Value: 7
  misc_feature: MA Experiment 20001450 PARAMETER Experiment Name: At_Far-red-induction_P Parameter: Light Value: Far-red vs. White
  misc_feature: MA Experiment 20001450 PARAMETER Experiment Name: At_Far-red-induction_P Parameter: Organism Value: A. thaliana
  misc_feature: MA Experiment 20001450 PARAMETER Experiment Name: At_Far-red-induction_P Parameter: Plant Line Value: Columbia
  misc_feature: MA Experiment 20001450 PARAMETER Experiment Name: At_Far-red-induction_P Parameter: Timepoint (hr) Value: 8
  misc_feature: MA Experiment 20001450 PARAMETER Experiment Name: At_Far-red-induction_P Parameter: Tissue Value: Whole Plant
  misc_feature: MA Experiment ID: 20001554 Result: Down-regulated in Transcription
  misc_feature: MA Experiment 20001554 PARAMETER Experiment Name: At_Drought_Soil_Dry_P Parameter: Age (day) Value: 21
  misc_feature: MA Experiment 20001554 PARAMETER Experiment Name: At_Drought_Soil_Dry_P Parameter: Organism Value: A. thaliana
  misc_feature: MA Experiment 20001554 PARAMETER Experiment Name: At_Drought_Soil_Dry_P Parameter: Plant Line Value: WS
  misc_feature: MA Experiment 20001554 PARAMETER Experiment Name: At_Drought_Soil_Dry_P Parameter: Post Timepoint (hr) Value: None
  misc_feature: MA Experiment 20001554 PARAMETER Experiment Name: At_Drought_Soil_Dry_P Parameter: Post-Treatment Value: None
  misc_feature: MA Experiment 20001554 PARAMETER Experiment Name: At_Drought_Soil_Dry_P Parameter: Timepoint (day) Value: 7
  misc_feature: MA Experiment 20001554 PARAMETER Experiment Name: At_Drought_Soil_Dry_P Parameter: Treatment Value: Drought vs. No Drought
  misc_feature: MA Experiment ID: 20001555 Result: Down-regulated in Transcription
  misc_feature: MA Experiment 20001555 PARAMETER Experiment Name: At_Drought_Soil_Dry_P Parameter: Age (day) Value: 24
  misc_feature: MA Experiment 20001555 PARAMETER Experiment Name: At_Drought_Soil_Dry_P Parameter: Organism Value: A. thaliana
  misc_feature: MA Experiment 20001555 PARAMETER Experiment Name: At_Drought_Soil_Dry_P Parameter: Plant Line Value: WS
  misc_feature: MA Experiment 20001555 PARAMETER Experiment Name: At_Drought_Soil_Dry_P Parameter: Post Timepoint (hr) Value: None
  misc_feature: MA Experiment 20001555 PARAMETER Experiment Name: At_Drought_Soil_Dry_P Parameter: Post-Treatment Value: None
  misc_feature: MA Experiment 20001555 PARAMETER Experiment Name: At_Drought_Soil_Dry_P Parameter: Timepoint (day) Value: 10
  misc_feature: MA Experiment 20001555 PARAMETER Experiment Name: At_Drought_Soil_Dry_P Parameter: Treatment Value: Drought vs. No Drought
  misc_feature: MA Experiment ID: 20001556 Result: Down-regulated in Transcription
  misc_feature: MA Experiment 20001556 PARAMETER Experiment Name: At_Drought_Soil_Dry_P Parameter: Age (day) Value: 26
  misc_feature: MA Experiment 20001556 PARAMETER Experiment Name: At_Drought_Soil_Dry_P Parameter: Organism Value: A. thaliana
  misc_feature: MA Experiment 20001556 PARAMETER Experiment Name: At_Drought_Soil_Dry_P Parameter: Plant Line Value: WS
  misc_feature: MA Experiment 20001556 PARAMETER Experiment Name: At_Drought_Soil_Dry_P Parameter: Post Timepoint (hr) Value: None
  misc_feature: MA Experiment 20001556 PARAMETER Experiment Name: At_Drought_Soil_Dry_P Parameter: Post-Treatment Value: None
  misc_feature: MA Experiment 20001556 PARAMETER Experiment Name: At_Drought_Soil_Dry_P Parameter: Timepoint (day) Value: 12
  misc_feature: MA Experiment 20001556 PARAMETER Experiment Name: At_Drought_Soil_Dry_P Parameter: Treatment Value: Drought vs. No Drought
  misc_feature: MA Experiment ID: 20001557 Result: Down-regulated in Transcription
  misc_feature: MA Experiment 20001557 PARAMETER Experiment Name: At_Drought_Soil_Dry_P Parameter: Age (day) Value: 27
  misc_feature: MA Experiment 20001557 PARAMETER Experiment Name: At_Drought_Soil_Dry_P Parameter: Organism Value: A. thaliana
  misc_feature: MA Experiment 20001557 PARAMETER Experiment Name: At_Drought_Soil_Dry_P Parameter: Plant Line Value: WS
  misc_feature: MA Experiment 20001557 PARAMETER Experiment Name: At_Drought_Soil_Dry_P Parameter: Post Timepoint (hr) Value: 3
  misc_feature: MA Experiment 20001557 PARAMETER Experiment Name: At_Drought_Soil_Dry_P Parameter: Post-Treatment Value: Re-Water vs. No Drought
  misc_feature: MA Experiment 20001557 PARAMETER Experiment Name: At_Drought_Soil_Dry_P Parameter: Timepoint (day) Value: 13
  misc_feature: MA Experiment 20001557 PARAMETER Experiment Name: At_Drought_Soil_Dry_P Parameter: Treatment Value: Drought vs. No Drought
  misc_feature: MA Experiment ID: 20001558 Result: Down-regulated in Transcription
  misc_feature: MA Experiment 20001558 PARAMETER Experiment Name: At_Drought_Soil_Dry_P Parameter: Age (day) Value: 27
  misc_feature: MA Experiment 20001558 PARAMETER Experiment Name: At_Drought_Soil_Dry_P Parameter: Organism Value: A. thaliana
  misc_feature: MA Experiment 20001558 PARAMETER Experiment Name: At_Drought_Soil_Dry_P Parameter: Plant Line Value: WS
  misc_feature: MA Experiment 20001558 PARAMETER Experiment Name: At_Drought_Soil_Dry_P Parameter: Post Timepoint (hr) Value: 6
  misc_feature: MA Experiment 20001558 PARAMETER Experiment Name: At_Drought_Soil_Dry_P Parameter: Post-Treatment Value: Re-Water vs. No Drought
  misc_feature: MA Experiment 20001558 PARAMETER Experiment Name: At_Drought_Soil_Dry_P Parameter: Timepoint (day) Value: 13
  misc_feature: MA Experiment 20001558 PARAMETER Experiment Name: At_Drought_Soil_Dry_P Parameter: Treatment Value: Drought vs. No Drought
  misc_feature: MA Experiment ID: 20001559 Result: Down-regulated in Transcription
  misc_feature: MA Experiment 20001559 PARAMETER Experiment Name: At_Drought_Soil_Dry_P Parameter: Age (day) Value: 28
  misc_feature: MA Experiment 20001559 PARAMETER Experiment Name: At_Drought_Soil_Dry_P Parameter: Organism Value: A. thaliana
  misc_feature: MA Experiment 20001559 PARAMETER Experiment Name: At_Drought_Soil_Dry_P Parameter: Plant Line Value: WS
  misc_feature: MA Experiment 20001559 PARAMETER Experiment Name: At_Drought_Soil_Dry_P Parameter: Post Timepoint (hr) Value: 29
  misc_feature: MA Experiment 20001559 PARAMETER Experiment Name: At_Drought_Soil_Dry_P Parameter: Post-Treatment Value: Re-Water vs. No Drought
  misc_feature: MA Experiment 20001559 PARAMETER Experiment Name: At_Drought_Soil_Dry_P Parameter: Timepoint (day) Value: 14
  misc_feature: MA Experiment 20001559 PARAMETER Experiment Name: At_Drought_Soil_Dry_P Parameter: Treatment Value: Drought vs. No Drought
  misc_feature: MA Experiment ID: 20001560 Result: Down-regulated in Transcription
  misc_feature: MA Experiment 20001560 PARAMETER Experiment Name: At_Drought_Soil_Dry_P Parameter: Age (day) Value: 28
  misc_feature: MA Experiment 20001560 PARAMETER Experiment Name: At_Drought_Soil_Dry_P Parameter: Organism Value: A. thaliana
  misc_feature: MA Experiment 20001560 PARAMETER Experiment Name: At_Drought_Soil_Dry_P Parameter: Plant Line Value: WS
  misc_feature: MA Experiment 20001560 PARAMETER Experiment Name: At_Drought_Soil_Dry_P Parameter: Post Timepoint (hr) Value: None
  misc_feature: MA Experiment 20001560 PARAMETER Experiment Name: At_Drought_Soil_Dry_P Parameter: Post-Treatment Value: None
  misc_feature: MA Experiment 20001560 PARAMETER Experiment Name: At_Drought_Soil_Dry_P Parameter: Timepoint (day) Value: 14
  misc_feature: MA Experiment 20001560 PARAMETER Experiment Name: At_Drought_Soil_Dry_P Parameter: Treatment Value: Drought vs. No Drought
  misc_feature: MA Experiment ID: 20001774 Result: Down-regulated in Transcription
  misc_feature: MA Experiment 20001774 PARAMETER Experiment Name: At_Far-red-enriched-adult_P Parameter: Age (day) Value: 31
  misc_feature: MA Experiment 20001774 PARAMETER Experiment Name: At_Far-red-enriched-adult_P Parameter: Light Value: Far-red enriched vs. White
  misc_feature: MA Experiment 20001774 PARAMETER Experiment Name: At_Far-red-enriched-adult_P Parameter: Organism Value: A. thaliana
  misc_feature: MA Experiment 20001774 PARAMETER Experiment Name: At_Far-red-enriched-adult_P Parameter: Plant Line Value: Columbia
  misc_feature: MA Experiment 20001774 PARAMETER Experiment Name: At_Far-red-enriched-adult_P Parameter: Timepoint (hr) Value: 72
  misc_feature: MA Experiment 20001774 PARAMETER Experiment Name: At_Far-red-enriched-adult_P Parameter: Tissue Value: Aerial
  misc_feature: MA Experiment ID: 20001906 Result: Down-regulated in Transcription
  misc_feature: MA Experiment 20001906 PARAMETER Experiment Name: At_Drought_Reproduction_P Parameter: Age (day) Value: 35
  misc_feature: MA Experiment 20001906 PARAMETER Experiment Name: At_Drought_Reproduction_P Parameter: Organism Value: A. thaliana
  misc_feature: MA Experiment 20001906 PARAMETER Experiment Name: At_Drought_Reproduction_P Parameter: Plant Line Value: WS
  misc_feature: MA Experiment 20001906 PARAMETER Experiment Name: At_Drought_Reproduction_P Parameter: Timepoint (day) Value: 5
  misc_feature: MA Experiment 20001906 PARAMETER Experiment Name: At_Drought_Reproduction_P Parameter: Tissue Value: Siliques
  misc_feature: MA Experiment 20001906 PARAMETER Experiment Name: At_Drought_Reproduction_P Parameter: Treatment Value: Drought vs. No Drought
  misc_feature: MA Experiment ID: 20001907 Result: Down-regulated in Transcription
  misc_feature: MA Experiment 20001907 PARAMETER Experiment Name: At_Drought_Reproduction_P Parameter: Age (day) Value: 37
  misc_feature: MA Experiment 20001907 PARAMETER Experiment Name: At_Drought_Reproduction_P Parameter: Organism Value: A. thaliana
  misc_feature: MA Experiment 20001907 PARAMETER Experiment Name: At_Drought_Reproduction_P Parameter: Plant Line Value: WS
  misc_feature: MA Experiment 20001907 PARAMETER Experiment Name: At_Drought_Reproduction_P Parameter: Timepoint (day) Value: 7
  misc_feature: MA Experiment 20001907 PARAMETER Experiment Name: At_Drought_Reproduction_P Parameter: Tissue Value: Siliques
  misc_feature: MA Experiment 20001907 PARAMETER Experiment Name: At_Drought_Reproduction_P Parameter: Treatment Value: Drought vs. No Drought
  misc_feature: MA Experiment ID: 20001910 Result: Down-regulated in Transcription
  misc_feature: MA Experiment 20001910 PARAMETER Experiment Name: At_Drought_Reproduction_P Parameter: Age (day) Value: 37
  misc_feature: MA Experiment 20001910 PARAMETER Experiment Name: At_Drought_Reproduction_P Parameter: Organism Value: A. thaliana
  misc_feature: MA Experiment 20001910 PARAMETER Experiment Name: At_Drought_Reproduction_P Parameter: Plant Line Value: WS
  misc_feature: MA Experiment 20001910 PARAMETER Experiment Name: At_Drought_Reproduction_P Parameter: Timepoint (day) Value: 7
  misc_feature: MA Experiment 20001910 PARAMETER Experiment Name: At_Drought_Reproduction_P Parameter: Tissue Value: Flowers
  misc_feature: MA Experiment 20001910 PARAMETER Experiment Name: At_Drought_Reproduction_P Parameter: Treatment Value: Drought vs. No Drought
  misc_feature: MA Experiment ID: 20001911 Result: Down-regulated in Transcription
  misc_feature: MA Experiment 20001911 PARAMETER Experiment Name: At_Drought_Reproduction_P Parameter: Age (day) Value: 40
  misc_feature: MA Experiment 20001911 PARAMETER Experiment Name: At_Drought_Reproduction_P Parameter: Organism Value: A. thaliana
  misc_feature: MA Experiment 20001911 PARAMETER Experiment Name: At_Drought_Reproduction_P Parameter: Plant Line Value: WS
  misc_feature: MA Experiment 20001911 PARAMETER Experiment Name: At_Drought_Reproduction_P Parameter: Timepoint (day) Value: 10
  misc_feature: MA Experiment 20001911 PARAMETER Experiment Name: At_Drought_Reproduction_P Parameter: Tissue Value: Flowers
  misc_feature: MA Experiment 20001911 PARAMETER Experiment Name: At_Drought_Reproduction_P Parameter: Treatment Value: Drought vs. No Drought
atacacaacataattcacaacacaacacaaacacatttctgttttctccattgtttcaaaccataaaaaaaaacacagattaaatggaatcgagtagcgttgatgagagtactacaagtacaggttccatctgtgaaaccccggcgataactccggcgaaaaagtcgtcggtaggtaacttatacaggatgggaagcggatcaagcgttgtgttagattcagagaacggcgtagaagctgaatctaggaagcttccgtcgtcaaaatacaaaggtgtggtgccacaaccaaacggaagatggggagctcagatttacgagaaacaccagcgcgtgtggctcgggacattcaacgaagaagacgaagccgctcgtgcctacgacgtcgcggttcacaggttccgtcgccgtgacgccgtcacaaatttcaaagacgtgaagatggacgaagacgaggtcgatttcttgaattctcattcgaaatctgagatcgttgatatgttgaggaaacatacttataacgaagagttagagcagagtaaacggcgtcgtaatggtaacggaaacatgactaggacgttgttaacgtcggggttgagtaatgatggtgtttctacgacggggtttagatcggcggaggcactgtttgagaaagcggtaacgccaagcgacgttgggaagctaaaccgtttggttataccgaaacatcacgcagagaaacattttccgttaccgtcaagtaacgtttccgtgaaaggagtgttgttgaactttgaggacgttaacgggaaagtgtggaggttccgttactcgtattggaacagtagtcagagttatgttttgactaaaggttggagcaggttcgttaaggagaagaatctacgtgctggtgacgtggttagtttcagtagatctaacggtcaggatcaacagttgtacattgggtggaagtcgagatccgggtcagatttagatgcgggtcgggttttgagattgttcggagttaacatttcaccggagagttcaagaaacgacgtcgtaggaaacaaaagagtgaacgatactgagatgttatcgttggtgtgtagcaagaagcaacgcatctttcacgcctcgtaacaactcttcttcctttttttttcttttgttgttttaataatttttaaaaactccattttcgttttctttatttgcatcggtttctttcttcttgtttaccaaaggttcatgagttgtttttgttgtattgatgaactgtaaattttatttataggataaattttaaaaagggttacttaaaaaaaaaaaaaaaaaaaaaaaaaaaaaaaaaaaaaaaaaaaaaaaaaaaaaaaaaaaaaaaaaaaaaaaaaaaaaaaaaaaaaaaaaaaaaacaaaaatcccccgggggggggcggggaaaccctttcccccaaaggggggggttattaaaattccggggggcgtttttaaaaaacggggggggggaaaaaccccggggtaccccaatataaccccctgggaaaaaaccccccttttccaagggggg

SEQ ID NO: 49470 - protein, 344 aa, Arabidopsis thaliana
  peptide (1)..(344): Ceres Seq. ID no. 12591196
  misc_feature (187)..(294): Pfam Name: B3 DNA binding domain Pfam Description: B3 DNA binding domain
  misc_feature (61)..(274): Homolog of NCBI NO: 15223618 NR Description: RAV-like DNA-binding protein, putative; protein
  misc_feature (58)..(315): Homolog of NCBI NO: 34895676 NR Description: putative DNA binding protein RAV2
  misc_feature (37)..(289): Homolog of NCBI NO: 34911404 NR Description: DNA-binding protein RAV2-like
  misc_feature (22)..(343): Homolog of NCBI NO: 2281641 NR Description: AP2 domain containing protein RAP2.8 [Arabidopsis
  misc_feature (1)..(342): Homolog of NCBI NO: 15222622 NR Description: DNA-binding protein RAV2, putative
  misc_feature (1)..(343): Homolog of NCBI NO: 21554039 NR Description: putative RAV2-like DNA-binding protein
  misc_feature (1)..(343): Homolog of NCBI NO: 18409138 NR Description: AP2 domain protein RAP2.8 (RAV2)
  misc_feature (4)..(340): Homolog of NCBI NO: 21593532 NR Description: AP2 domain transcription factor [Arabidopsis
  misc_feature (4)..(340): Homolog of NCBI NO: 15230871 NR Description: AP2 domain transcription factor RAV, putative
  misc_feature (1)..(344): Homolog of NCBI NO: 15222217 NR Description: DNA-binding protein (RAV1)
MESSSVDESTTSTGSICETPAITPAKKSSVGNLYRMGSGSSVVLDSENGVEAESRKLPSSKYKGVVPQPNGRWGAQIYEKHQRVWLGTFNEEDEAARAYDVAVHRFRRRDAVTNFKDVKMDEDEVDFLNSHSKSEIVDMLRKHTYNEELEQSKRRRNGNGNMTRTLLTSGLSNDGVSTTGFRSAEALFEKAVTPSDVGKLNRLVIPKHHAEKHFPLPSSNVSVKGVLLNFEDVNGKVWRFRYSYWNSSQSYVLTKGWSRFVKEKNLRAGDVVSFSRSNGQDQQLYIGWKSRSGSDLDAGRVLRLFGVNISPESSRNDVVGNKRVNDTEMLSLVCSKKQRIFHAS

SEQ ID NO: 49471 - protein, 309 aa, Arabidopsis thaliana
  peptide (1)..(309): Ceres Seq. ID no. 12591197
  misc_feature (152)..(259): Pfam Name: B3 DNA binding domain Pfam Description: B3 DNA binding domain
  misc_feature (26)..(239): Homolog of NCBI NO: 15223618 NR Description: RAV-like DNA-binding protein, putative; protein
  misc_feature (23)..(280): Homolog of NCBI NO: 34895676 NR Description: putative DNA binding protein RAV2
  misc_feature (2)..(254): Homolog of NCBI NO: 34911404 NR Description: DNA-binding protein RAV2-like
  misc_feature (1)..(308): Homolog of NCBI NO: 2281641 NR Description: AP2 domain containing protein RAP2.8 [Arabidopsis
  misc_feature (1)..(307): Homolog of NCBI NO: 15222622 NR Description: DNA-binding protein RAV2, putative
  misc_feature (1)..(308): Homolog of NCBI NO: 21554039 NR Description: putative RAV2-like DNA-binding protein
  misc_feature (1)..(308): Homolog of NCBI NO: 18409138 NR Description: AP2 domain protein RAP2.8 (RAV2)
  misc_feature (1)..(305): Homolog of NCBI NO: 21593532 NR Description: AP2 domain transcription factor [Arabidopsis
  misc_feature (1)..(305): Homolog of NCBI NO: 15230871 NR Description: AP2 domain transcription factor RAV, putative
  misc_feature (1)..(309): Homolog of NCBI NO: 15222217 NR Description: DNA-binding protein (RAV1)
MGSGSSVVLDSENGVEAESRKLPSSKYKGVVPQPNGRWGAQIYEKHQRVWLGTFNEEDEAARAYDVAVHRFRRRDAVTNFKDVKMDEDEVDFLNSHSKSEIVDMLRKHTYNEELEQSKRRRNGNGNMTRTLLTSGLSNDGVSTTGFRSAEALFEKAVTPSDVGKLNRLVIPKHHAEKHFPLPSSNVSVKGVLLNFEDVNGKVWRFRYSYWNSSQSYVLTKGWSRFVKEKNLRAGDVVSFSRSNGQDQQLYIGWKSRSGSDLDAGRVLRLFGVNISPESSRNDVVGNKRVNDTEMLSLVCSKKQRIFHAS

SEQ ID NO: 49472 - protein, 225 aa, Arabidopsis thaliana
  peptide (1)..(225): Ceres Seq. ID no. 12591198
  misc_feature (68)..(175): Pfam Name: B3 DNA binding domain Pfam Description: B3 DNA binding domain
  misc_feature (1)..(155): Homolog of NCBI NO: 15223618 NR Description: RAV-like DNA-binding protein, putative; protein
  misc_feature (1)..(196): Homolog of NCBI NO: 34895676 NR Description: putative DNA binding protein RAV2
  misc_feature (1)..(170): Homolog of NCBI NO: 34911404 NR Description: DNA-binding protein RAV2-like
  misc_feature (1)..(224): Homolog of NCBI NO: 2281641 NR Description: AP2 domain containing protein RAP2.8 [Arabidopsis
  misc_feature (1)..(223): Homolog of NCBI NO: 15222622 NR Description: DNA-binding protein RAV2, putative
  misc_feature (1)..(224): Homolog of NCBI NO: 21554039 NR Description: putative RAV2-like DNA-binding protein
  misc_feature (1)..(224): Homolog of NCBI NO: 18409138 NR Description: AP2 domain protein RAP2.8 (RAV2)
  misc_feature (1)..(221): Homolog of NCBI NO: 21593532 NR Description: AP2 domain transcription factor [Arabidopsis
  misc_feature (1)..(221): Homolog of NCBI NO: 15230871 NR Description: AP2 domain transcription factor RAV, putative
  misc_feature (1)..(225): Homolog of NCBI NO: 15222217 NR Description: DNA-binding protein (RAV1)
MDEDEVDFLNSHSKSEIVDMLRKHTYNEELEQSKRRRNGNGNMTRTLLTSGLSNDGVSTTGFRSAEALFEKAVTPSDVGKLNRLVIPKHHAEKHFPLPSSNVSVKGVLLNFEDVNGKVWRFRYSYWNSSQSYVLTKGWSRFVKEKNLRAGDVVSFSRSNGQDQQLYIGWKSRSGSDLDAGRVLRLFGVNISPESSRNDVVGNKRVNDTEMLSLVCSKKQRIFHAS

SEQ ID NO: 49473 - DNA, 830 bp, Arabidopsis thaliana
  misc_feature (1)..(830): Ceres Seq. ID no. 13592647
  misc_feature: MA Experiment ID: 20000179 Result: Up-regulated in Transcription
  misc_feature: MA Experiment 20000179 PARAMETER Experiment Name: At_Germinating_Seeds_P Parameter: Age (hr) Value: 6 vs. 0
  misc_feature: MA Experiment 20000179 PARAMETER Experiment Name: At_Germinating_Seeds_P Parameter: Tissue Value: Germinating Seeds
  misc_feature: MA Experiment ID: 20000180 Result: Up-regulated in Transcription
  misc_feature: MA Experiment 20000180 PARAMETER Experiment Name: At_Germinating_Seeds_P Parameter: Age (hr) Value: 24 vs. 0
  misc_feature: MA Experiment 20000180 PARAMETER Experiment Name: At_Germinating_Seeds_P Parameter: Tissue Value: Germinating Seeds
  misc_feature: MA Experiment ID: 20000184 Result: Down-regulated in Transcription
  misc_feature: MA Experiment 20000184 PARAMETER Experiment Name: At_Shoots__P Parameter: Age (day) Value: 7
  misc_feature: MA Experiment 20000184 PARAMETER Experiment Name: At_Shoots__P Parameter: Tissue Value: Shoots vs. Whole Plant
  misc_feature: MA Experiment ID: 20000264 Result: Down-regulated in Transcription
  misc_feature: MA Experiment 20000264 PARAMETER Experiment Name: At_Open_Flower_P Parameter: Age (day) Value: 21
  misc_feature: MA Experiment 20000264 PARAMETER Experiment Name: At_Open_Flower_P Parameter: Plant Line Value: WS
  misc_feature: MA Experiment 20000264 PARAMETER Experiment Name: At_Open_Flower_P Parameter: Tissue Value: Open Flower vs. Whole Plant
  misc_feature: MA Experiment ID: 20000265 Result: Down-regulated in Transcription
  misc_feature: MA Experiment 20000265 PARAMETER Experiment Name: At_Open_Flower_P Parameter: Age (day) Value: 21
  misc_feature: MA Experiment 20000265 PARAMETER Experiment Name: At_Open_Flower_P Parameter: Plant Line Value: WS
  misc_feature: MA Experiment 20000265 PARAMETER Experiment Name: At_Open_Flower_P Parameter: Tissue Value: Closed Flower vs. Whole Plant
  misc_feature: MA Experiment ID: 20000437 Result: Up-regulated in Transcription
  misc_feature: MA Experiment 20000437 PARAMETER Experiment Name: At_Drought_P Parameter: Age (day) Value: 8
  misc_feature: MA Experiment 20000437 PARAMETER Experiment Name: At_Drought_P Parameter: Organism Value: A. thaliana
  misc_feature: MA Experiment 20000437 PARAMETER Experiment Name: At_Drought_P Parameter: Plant Line Value: WS
  misc_feature: MA Experiment 20000437 PARAMETER Experiment Name: At_Drought_P Parameter: Timepoint (hr) Value: 24
  misc_feature: MA Experiment 20000437 PARAMETER Experiment Name: At_Drought_P Parameter: Tissue Value: Whole Plant
  misc_feature: MA Experiment 20000437 PARAMETER Experiment Name: At_Drought_P Parameter: Treatment Value: Drought vs. No Drought
  misc_feature: MA Experiment ID: 20001757 Result: Up-regulated in Transcription
  misc_feature: MA Experiment 20001757 PARAMETER Experiment Name: At_50mM_NH4NO3_L-to-H_P Parameter: Timepoint (hr) Value: 6
  misc_feature: MA Experiment 20001757 PARAMETER Experiment Name: At_50mM_NH4NO3_L-to-H_P Parameter: Tissue Value: Leaf
  misc_feature: MA Experiment 20001757 PARAMETER Experiment Name: At_50mM_NH4NO3_L-to-H_P Parameter: Treatment Value: 50mM NH4NO3 vs 100mM Mannitol
gaagaagtcgagagacaaagttaaaagtagagaagaaaatgagtgaggaggagaggaagcaacacgtcgttctagtacatggtgcttgccatggcgcctggtgctggtacaaggttaagccgcagctcgaggcttctggccaccgcgtaaccgccgtagatctagctgcctccggtatagacatgaccaggtcaatcacagatatatccacatgcgaacaatactcagagccattgatgcagctaatgacctcactaccagatgatgagaaggttgtgcttgttggtcatagcttaggaggtttgagtttagctatggccatggatatgtttccgaccaaaatctctgtttctgtctttgtgactgctatgatgccagacaccaaacactcaccatccttcgtatgggataagctaagaaaagaaacttcacgagaggaatggttagacaccgtgtttacgagcgagaaacctgattttcctagcgagttttggatttttggaccagaattcatggccaagaacttgtatcagttgtctccagtccaagatcttgaattggcgaaaatgttggtgagggcaaacccattgattaagaaagatatggcagagagaagaagcttcagtgaggaaggatacggatccgttacacgtatatttattgtatgcggaaaggatcttgtgtcacccgaagattaccagcgatcgatgatcagcaactttcccccaaaagaagtaatggagatcaaagacgcagatcatatgccaatgttctccaagcctcaacaactatgtgctcttctcttggagattgcaaataaatatgcctaa

SEQ ID NO: 49474 - protein, 275 aa, Arabidopsis thaliana
  peptide (1)..(275): Ceres Seq. ID no. 13592648
  misc_feature (47)..(269): Pfam Name: alpha/beta hydrolase fold Pfam Description: alpha/beta hydrolase fold
  misc_feature (87)..(274): Homolog of NCBI NO: 30682119 NR Description: hydrolase, alpha/beta fold family [Arabidopsis
  misc_feature (11)..(274): Homolog of NCBI NO: 28393451 NR Description: putative acetone-cyanohydrin lyase [Arabidopsis
  misc_feature (13)..(274): Homolog of NCBI NO: 15227863 NR Description: hydrolase, alpha/beta fold family [Arabidopsis
  misc_feature (13)..(275): Homolog of NCBI NO: 21554666 NR Description: putative acetone-cyanohydrin lyase [Arabidopsis
  misc_feature (7)..(274): Homolog of NCBI NO: 15227850 NR Description: hydrolase, alpha/beta fold family [Arabidopsis
  misc_feature (15)..(275): Homolog of NCBI NO: 15227851 NR Description: hydrolase, alpha/beta fold family [Arabidopsis
  misc_feature (13)..(274): Homolog of NCBI NO: 27754457 NR Description: putative acetone-cyanohydrin lyase [Arabidopsis
  misc_feature (13)..(274): Homolog of NCBI NO: 15227867 NR Description: esterase, putative [Arabidopsis thaliana]
  misc_feature (15)..(275): Homolog of NCBI NO: 15227859 NR Description: hydrolase, alpha/beta fold family [Arabidopsis
  misc_feature (13)..(275): Homolog of NCBI NO: 15227865 NR Description: esterase, putative [Arabidopsis thaliana]
RSRETKLKVEKKMSEEERKQHVVLVHGACHGAWCWYKVKPQLEASGHRVTAVDLAASGIDMTRSITDISTCEQYSEPLMQLMTSLPDDEKVVLVGHSLGGLSLAMAMDMFPTKISVSVFVTAMMPDTKHSPSFVWDKLRKETSREEWLDTVFTSEKPDFPSEFWIFGPEFMAKNLYQLSPVQDLELAKMLVRANPLIKKDMAERRSFSEEGYGSVTRIFIVCGKDLVSPEDYQRSMISNFPPKEVMEIKDADHMPMFSKPQQLCALLLEIANKYA

SEQ ID NO: 49475 - protein, 263 aa, Arabidopsis thaliana
  peptide (1)..(263): Ceres Seq. ID no. 13592649
  misc_feature (35)..(257): Pfam Name: alpha/beta hydrolase fold Pfam Description: alpha/beta hydrolase fold
  misc_feature (75)..(262): Homolog of NCBI NO: 30682119 NR Description: hydrolase, alpha/beta fold family [Arabidopsis
  misc_feature (1)..(262): Homolog of NCBI NO: 28393451 NR Description: putative acetone-cyanohydrin lyase [Arabidopsis
  misc_feature (1)..(262): Homolog of NCBI NO: 15227863 NR Description: hydrolase, alpha/beta fold family [Arabidopsis
  misc_feature (1)..(263): Homolog of NCBI NO: 21554666 NR Description: putative acetone-cyanohydrin lyase [Arabidopsis
  misc_feature (1)..(262): Homolog of NCBI NO: 15227850 NR Description: hydrolase, alpha/beta fold family [Arabidopsis
  misc_feature (3)..(263): Homolog of NCBI NO: 15227851 NR Description: hydrolase, alpha/beta fold family [Arabidopsis
  misc_feature (1)..(262): Homolog of NCBI NO: 27754457 NR Description: putative acetone-cyanohydrin lyase [Arabidopsis
  misc_feature (1)..(262): Homolog of NCBI NO: 15227867 NR Description: esterase, putative [Arabidopsis thaliana]
  misc_feature (3)..(263): Homolog of NCBI NO: 15227859 NR Description: hydrolase, alpha/beta fold family [Arabidopsis
  misc_feature (1)..(263): Homolog of NCBI NO: 15227865 NR Description: esterase, putative [Arabidopsis thaliana]
MSEEERKQHVVLVHGACHGAWCWYKVKPQLEASGHRVTAVDLAASGIDMTRSITDISTCEQYSEPLMQLMTSLPDDEKVVLVGHSLGGLSLAMAMDMFPTKISVSVFVTAMMPDTKHSPSFVWDKLRKETSREEWLDTVFTSEKPDFPSEFWIFGPEFMAKNLYQLSPVQDLELAKMLVRANPLIKKDMAERRSFSEEGYGSVTRIFIVCGKDLVSPEDYQRSMISNFPPKEVMEIKDADHMPMFSKPQQLCALLLEIANKYA

SEQ ID NO: 49476 - protein, 215 aa, Arabidopsis thaliana
  peptide (1)..(215): Ceres Seq. ID no. 13592650
  misc_feature (1)..(209): Pfam Name: alpha/beta hydrolase fold Pfam Description: alpha/beta hydrolase fold
  misc_feature (27)..(214): Homolog of NCBI NO: 30682119 NR Description: hydrolase, alpha/beta fold family [Arabidopsis
  misc_feature (1)..(214): Homolog of NCBI NO: 28393451 NR Description: putative acetone-cyanohydrin lyase [Arabidopsis
  misc_feature (1)..(214): Homolog of NCBI NO: 15227863 NR Description: hydrolase, alpha/beta fold family [Arabidopsis
  misc_feature (1)..(215): Homolog of NCBI NO: 21554666 NR Description: putative acetone-cyanohydrin lyase [Arabidopsis
  misc_feature (1)..(214): Homolog of NCBI NO: 15227850 NR Description: hydrolase, alpha/beta fold family [Arabidopsis
  misc_feature (1)..(215): Homolog of NCBI NO: 15227851 NR Description: hydrolase, alpha/beta fold family [Arabidopsis
  misc_feature (1)..(214): Homolog of NCBI NO: 27754457 NR Description: putative acetone-cyanohydrin lyase [Arabidopsis
  misc_feature (1)..(214): Homolog of NCBI NO: 15227867 NR Description: esterase, putative [Arabidopsis thaliana]
  misc_feature (1)..(215): Homolog of NCBI NO: 15227859 NR Description: hydrolase, alpha/beta fold family [Arabidopsis
  misc_feature (1)..(215): Homolog of NCBI NO: 15227865 NR Description: esterase, putative [Arabidopsis thaliana]
MTRSITDISTCEQYSEPLMQLMTSLPDDEKVVLVGHSLGGLSLAMAMDMFPTKISVSVFVTAMMPDTKHSPSFVWDKLRKETSREEWLDTVFTSEKPDFPSEFWIFGPEFMAKNLYQLSPVQDLELAKMLVRANPLIKKDMAERRSFSEEGYGSVTRIFIVCGKDLVSPEDYQRSMISNFPPKEVMEIKDADHMPMFSKPQQLCALLLEIANKYA

SEQ ID NO: 49477 - DNA, 1119 bp, Arabidopsis thaliana
  misc_feature (1)..(1119): Ceres Seq. ID no. 13648473
  misc_feature: MA Experiment ID: 20000264 Result: Up-regulated in Transcription
  misc_feature: MA Experiment 20000264 PARAMETER Experiment Name: At_Open_Flower_P Parameter: Age (day) Value: 21
  misc_feature: MA Experiment 20000264 PARAMETER Experiment Name: At_Open_Flower_P Parameter: Plant Line Value: WS
  misc_feature: MA Experiment 20000264 PARAMETER Experiment Name: At_Open_Flower_P Parameter: Tissue Value: Open Flower vs. Whole Plant
  misc_feature: MA Experiment ID: 20000286 Result: Up-regulated in Transcription
  misc_feature: MA Experiment 20000286 PARAMETER Experiment Name: At_Open_Flower_P Parameter: Age (day) Value: 21
  misc_feature: MA Experiment 20000286 PARAMETER Experiment Name: At_Open_Flower_P Parameter: Plant Line Value: WS
  misc_feature: MA Experiment 20000286 PARAMETER Experiment Name: At_Open_Flower_P Parameter: Tissue Value: Half Open vs. Whole Plant
  misc_feature: MA Experiment ID: 20000794 Result: Up-regulated in Transcription
  misc_feature: MA Experiment 20000794 PARAMETER Experiment Name: At_Petals_P Parameter: Age (day) Value: 23-25 days
  misc_feature: MA Experiment 20000794 PARAMETER Experiment Name: At_Petals_P Parameter: Plant Line Value: WS
  misc_feature: MA Experiment 20000794 PARAMETER Experiment Name: At_Petals_P Parameter: Tissue Value: Petals vs. Whole plant
  misc_feature: MA Experiment ID: 20001910 Result: Up-regulated in Transcription
  misc_feature: MA Experiment 20001910 PARAMETER Experiment Name: At_Drought_Reproduction_P Parameter: Age (day) Value: 37
  misc_feature: MA Experiment 20001910 PARAMETER Experiment Name: At_Drought_Reproduction_P Parameter: Organism Value: A. thaliana
  misc_feature: MA Experiment 20001910 PARAMETER Experiment Name: At_Drought_Reproduction_P Parameter: Plant Line Value: WS
  misc_feature: MA Experiment 20001910 PARAMETER Experiment Name: At_Drought_Reproduction_P Parameter: Timepoint (day) Value: 7
  misc_feature: MA Experiment 20001910 PARAMETER Experiment Name: At_Drought_Reproduction_P Parameter: Tissue Value: Flowers
  misc_feature: MA Experiment 20001910 PARAMETER Experiment Name: At_Drought_Reproduction_P Parameter: Treatment Value: Drought vs. No Drought
acgttatctcctccccacgactcaaaaaaaataaacagaaaaaaagaggagtagaaaccaaagagacctgccctaatatttagcgatgatagtttgaacggaacgaaatctgacgaaagaaactaaagagacctttgaattatcttcacggcgttaacaaaaaaaaagggttgtagaaagtgagtaaggaagaaataatcaggaacattaataaaggaaatgacaacggcgtgtccggcgaggacaagctcactaatggacgatctcttgggcctccttagaatccgtatcaaacgtggcgtcaatttagccgtccgtgacatcagtagcagcgatccttacgtcgtcgtcaagatgggcaaacagaaattgaagactcgtgtcattaacaaagatgttaatccagaatggaatgaagatttgactctctccgtcacagactccaatcttaccgtcctcttgacggtgtatgatcacgacatgtttagcaaagacgacaagatgggcgatgctgagttcgagataaagccctatattgaggctttgaggatgcaactcgatggacttcctagtggaaccattgtgaccacggttaagcctagtcgtcgtaactgtctagccgaggagtcacgtgtcacctgggtcgacggcaagctcgtccaggatctcgttctcagattgcgacatgtggaatgcggagaggtcgaagctcagcttcagtggattgacctccctggctccaagggtctatgaatcttttttcttttcttatttaccgttactttgagttgttttctttcaaattgaactaaaccaagtaacagcatggaaaaaaaacaagtaatttcaatcttgaaggatatagtgaactagaaacacgtattaatccatggaaatataaggattaagaacgttgagggaagttttgttcccatatggtgatcgagtccaagtcgagtcgtggtggtggatatgtaaatgtggtgtattgttgatgtgtatgtatatttgggctagctatgccttaaataaggcatttacactgtttaaacaactaatacagatattttatttaaaaaagaaaaaaaaaaaaaaaaaactcgagggggggcccggtac

SEQ ID NO: 49478 - protein, 177 aa, Arabidopsis thaliana
  peptide (1)..(177): Ceres Seq. ID no. 15220537
  misc_feature (20)..(99): Pfam Name: C2 domain Pfam Description: C2 domain
  misc_feature (13)..(173): Homolog of NCBI NO: 33146442 NR Description: zinc finger and C2 domain protein-like
  misc_feature (13)..(177): Homolog of NCBI NO: 13430460 NR Description: unknown protein [Arabidopsis thaliana]
  misc_feature (13)..(177): Homolog of NCBI NO: 18409682 NR Description: C2 domain-containing protein [Arabidopsis
  misc_feature (14)..(177): Homolog of NCBI NO: 18409675 NR Description: C2 domain-containing protein [Arabidopsis
  misc_feature (13)..(174): Homolog of NCBI NO: 18408493 NR Description: C2 domain-containing protein [Arabidopsis
  misc_feature (13)..(177): Homolog of NCBI NO: 15240322 NR Description: C2 domain-containing protein [Arabidopsis
  misc_feature (11)..(177): Homolog of NCBI NO: 15219500 NR Description: C2 domain-containing protein [Arabidopsis
  misc_feature (11)..(177): Homolog of NCBI NO: 25405940 NR Description: protein T1N15.21 [imported] - Arabidopsis
  misc_feature (11)..(177): Homolog of NCBI NO: 15221907 NR Description: C2 domain-containing protein [Arabidopsis
  misc_feature (1)..(177): Homolog of NCBI NO: 30684739 NR Description: C2 domain-containing protein [Arabidopsis
MTTACPARTSSLMDDLLGLLRIRIKRGVNLAVRDISSSDPYVVVKMGKQKLKTRVINKDVNPEWNEDLTLSVTDSNLTVLLTVYDHDMFSKDDKMGDAEFEIKPYIEALRMQLDGLPSGTIVTTVKPSRRNCLAEESRVTWVDGKLVQDLVLRLRHVECGEVEAQLQWIDLPGSKGL

SEQ ID NO: 49479 - protein, 165 aa, Arabidopsis thaliana
  peptide (1)..(165): Ceres Seq. ID no. 15220538
  misc_feature (8)..(87): Pfam Name: C2 domain Pfam Description: C2 domain
  misc_feature (1)..(161): Homolog of NCBI NO: 33146442 NR Description: zinc finger and C2 domain protein-like
  misc_feature (1)..(165): Homolog of NCBI NO: 13430460 NR Description: unknown protein [Arabidopsis thaliana]
  misc_feature (1)..(165): Homolog of NCBI NO: 18409682 NR Description: C2 domain-containing protein [Arabidopsis
  misc_feature (2)..(165): Homolog of NCBI NO: 18409675 NR Description: C2 domain-containing protein [Arabidopsis
  misc_feature (1)..(162): Homolog of NCBI NO: 18408493 NR Description: C2 domain-containing protein [Arabidopsis
  misc_feature (1)..(165): Homolog of NCBI NO: 15240322 NR Description: C2 domain-containing protein [Arabidopsis
  misc_feature (1)..(165): Homolog of NCBI NO: 15219500 NR Description: C2 domain-containing protein [Arabidopsis
  misc_feature (1)..(165): Homolog of NCBI NO: 25405940 NR Description: protein T1N15.21 [imported] - Arabidopsis
  misc_feature (1)..(165): Homolog of NCBI NO: 15221907 NR Description: C2 domain-containing protein [Arabidopsis
  misc_feature (1)..(165): Homolog of NCBI NO: 30684739 NR Description: C2 domain-containing protein [Arabidopsis
MDDLLGLLRIRIKRGVNLAVRDISSSDPYVVVKMGKQKLKTRVINKDVNPEWNEDLTLSVTDSNLTVLLTVYDHDMFSKDDKMGDAEFEIKPYIEALRMQLDGLPSGTIVTTVKPSRRNCLAEESRVTWVDGKLVQDLVLRLRHVECGEVEAQLQWIDLPGSKGL

SEQ ID NO: 49480 - protein, 132 aa, Arabidopsis thaliana
  peptide (1)..(132): Ceres Seq. ID no. 15220539
  misc_feature (1)..(54): Pfam Name: C2 domain Pfam Description: C2 domain
  misc_feature (1)..(128): Homolog of NCBI NO: 33146442 NR Description: zinc finger and C2 domain protein-like
  misc_feature (1)..(132): Homolog of NCBI NO: 13430460 NR Description: unknown protein [Arabidopsis thaliana]
  misc_feature (1)..(132): Homolog of NCBI NO: 18409682 NR Description: C2 domain-containing protein [Arabidopsis
  misc_feature (1)..(132): Homolog of NCBI NO: 18409675 NR Description: C2 domain-containing protein [Arabidopsis
  misc_feature (1)..(129): Homolog of NCBI NO: 18408493 NR Description: C2 domain-containing protein [Arabidopsis
  misc_feature (1)..(132): Homolog of NCBI NO: 15240322 NR Description: C2 domain-containing protein [Arabidopsis
  misc_feature (1)..(132): Homolog of NCBI NO: 15219500 NR Description: C2 domain-containing protein [Arabidopsis
  misc_feature (1)..(132): Homolog of NCBI NO: 25405940 NR Description: protein T1N15.21 [imported] - Arabidopsis
  misc_feature (1)..(132): Homolog of NCBI NO: 15221907 NR Description: C2 domain-containing protein [Arabidopsis
  misc_feature (1)..(132): Homolog of NCBI NO: 30684739 NR Description: C2 domain-containing protein [Arabidopsis
MGKQKLKTRVINKDVNPEWNEDLTLSVTDSNLTVLLTVYDHDMFSKDDKMGDAEFEIKPYIEALRMQLDGLPSGTIVTTVKPSRRNCLAEESRVTWVDGKLVQDLVLRLRHVECGEVEAQLQWIDLPGSKGL

SEQ ID NO: 49481 - DNA, 1710 bp, Arabidopsis thaliana
  misc_feature (1)..(1710): Ceres Seq. ID no. 12601847
  misc_feature: MA Experiment ID: 20000184 Result: Down-regulated in Transcription
  misc_feature: MA Experiment 20000184 PARAMETER Experiment Name: At_Shoots__P Parameter: Age (day) Value: 7
  misc_feature: MA Experiment 20000184 PARAMETER Experiment Name: At_Shoots__P Parameter: Tissue Value: Shoots vs. Whole Plant
  misc_feature: MA Experiment ID: 20000234 Result: Up-regulated in Transcription
  misc_feature: MA Experiment 20000234 PARAMETER Experiment Name: At_Siliques_P Parameter: Age (day) Value: 21
  misc_feature: MA Experiment 20000234 PARAMETER Experiment Name: At_Siliques_P Parameter: Organism Value: A. thaliana
  misc_feature: MA Experiment 20000234 PARAMETER Experiment Name: At_Siliques_P Parameter: Plant Line Value: WS
  misc_feature: MA Experiment 20000234 PARAMETER Experiment Name: At_Siliques_P Parameter: Tissue Value: Less Than 5mm Siliques vs. Whole Plant
  misc_feature: MA Experiment ID: 20000235 Result: Up-regulated in Transcription
  misc_feature: MA Experiment 20000235 PARAMETER Experiment Name: At_Siliques_P Parameter: Age (day) Value: 21
  misc_feature: MA Experiment 20000235 PARAMETER Experiment Name: At_Siliques_P Parameter: Organism Value: A. thaliana
  misc_feature: MA Experiment 20000235 PARAMETER Experiment Name: At_Siliques_P Parameter: Plant Line Value: WS
  misc_feature: MA Experiment 20000235 PARAMETER Experiment Name: At_Siliques_P Parameter: Tissue Value: 5-10mm Siliques vs. Whole Plant
  misc_feature: MA Experiment ID: 20000264 Result: Up-regulated in Transcription
  misc_feature: MA Experiment 20000264 PARAMETER Experiment Name: At_Open_Flower_P Parameter: Age (day) Value: 21
  misc_feature: MA Experiment 20000264 PARAMETER Experiment Name: At_Open_Flower_P Parameter: Plant Line Value: WS
  misc_feature: MA Experiment 20000264 PARAMETER Experiment Name: At_Open_Flower_P Parameter: Tissue Value: Open Flower vs. Whole Plant
  misc_feature: MA Experiment ID: 20000265 Result: Up-regulated in Transcription
  misc_feature: MA Experiment 20000265 PARAMETER Experiment Name: At_Open_Flower_P Parameter: Age (day) Value: 21
  misc_feature: MA Experiment 20000265 PARAMETER Experiment Name: At_Open_Flower_P Parameter: Plant Line Value: WS
  misc_feature: MA Experiment 20000265 PARAMETER Experiment Name: At_Open_Flower_P Parameter: Tissue Value: Closed Flower vs. Whole Plant
  misc_feature: MA Experiment ID: 20000286 Result: Up-regulated in Transcription
  misc_feature: MA Experiment 20000286 PARAMETER Experiment Name: At_Open_Flower_P Parameter: Age (day) Value: 21
  misc_feature: MA Experiment 20000286 PARAMETER Experiment Name: At_Open_Flower_P Parameter: Plant Line Value: WS
  misc_feature: MA Experiment 20000286 PARAMETER Experiment Name: At_Open_Flower_P Parameter: Tissue Value: Half Open vs. Whole Plant
  misc_feature: MA Experiment ID: 20000438 Result: Down-regulated in Transcription
  misc_feature: MA Experiment 20000438 PARAMETER Experiment Name: At_Shoots__P Parameter: Age (day) Value: 14
  misc_feature: MA Experiment 20000438 PARAMETER Experiment Name: At_Shoots__P Parameter: Tissue Value: Shoots vs. Whole Plant
  misc_feature: MA Experiment ID: 20000794 Result: Up-regulated in Transcription
  misc_feature: MA Experiment 20000794 PARAMETER Experiment Name: At_Petals_P Parameter: Age (day) Value: 23-25 days
  misc_feature: MA Experiment 20000794 PARAMETER Experiment Name: At_Petals_P Parameter: Plant Line Value: WS
  misc_feature: MA Experiment 20000794 PARAMETER Experiment Name: At_Petals_P Parameter: Tissue Value: Petals vs. Whole plant
  misc_feature: MA Experiment ID: 20001558 Result: Up-regulated in Transcription
  misc_feature: MA Experiment 20001558 PARAMETER Experiment Name: At_Drought_Soil_Dry_P Parameter: Age (day) Value: 27
  misc_feature: MA Experiment 20001558 PARAMETER Experiment Name: At_Drought_Soil_Dry_P Parameter: Organism Value: A. thaliana
  misc_feature: MA Experiment 20001558 PARAMETER Experiment Name: At_Drought_Soil_Dry_P Parameter: Plant Line Value: WS
  misc_feature: MA Experiment 20001558 PARAMETER Experiment Name: At_Drought_Soil_Dry_P Parameter: Post Timepoint (hr) Value: 6
  misc_feature: MA Experiment 20001558 PARAMETER Experiment Name: At_Drought_Soil_Dry_P Parameter: Post-Treatment Value: Re-Water vs. No Drought
  misc_feature: MA Experiment 20001558 PARAMETER Experiment Name: At_Drought_Soil_Dry_P Parameter: Timepoint (day) Value: 13
  misc_feature: MA Experiment 20001558 PARAMETER Experiment Name: At_Drought_Soil_Dry_P Parameter: Treatment Value: Drought vs. No Drought
  misc_feature: MA Experiment ID: 20001560 Result: Up-regulated in Transcription
  misc_feature: MA Experiment 20001560 PARAMETER Experiment Name: At_Drought_Soil_Dry_P Parameter: Age (day) Value: 28
  misc_feature: MA Experiment 20001560 PARAMETER Experiment Name: At_Drought_Soil_Dry_P Parameter: Organism Value: A. thaliana
  misc_feature: MA Experiment 20001560 PARAMETER Experiment Name: At_Drought_Soil_Dry_P Parameter: Plant Line Value: WS
  misc_feature: MA Experiment 20001560 PARAMETER Experiment Name: At_Drought_Soil_Dry_P Parameter: Post Timepoint (hr) Value: None
  misc_feature: MA Experiment 20001560 PARAMETER Experiment Name: At_Drought_Soil_Dry_P Parameter: Post-Treatment Value: None
  misc_feature: MA Experiment 20001560 PARAMETER Experiment Name: At_Drought_Soil_Dry_P Parameter: Timepoint (day) Value: 14
  misc_feature: MA Experiment 20001560 PARAMETER Experiment Name: At_Drought_Soil_Dry_P Parameter: Treatment Value: Drought vs. No Drought
  misc_feature: MA Experiment ID: 20001906 Result: Down-regulated in Transcription
  misc_feature: MA Experiment 20001906 PARAMETER Experiment Name: At_Drought_Reproduction_P Parameter: Age (day) Value: 35
  misc_feature: MA Experiment 20001906 PARAMETER Experiment Name: At_Drought_Reproduction_P Parameter: Organism Value: A. thaliana
  misc_feature: MA Experiment 20001906 PARAMETER Experiment Name: At_Drought_Reproduction_P Parameter: Plant Line Value: WS
  misc_feature: MA Experiment 20001906 PARAMETER Experiment Name: At_Drought_Reproduction_P Parameter: Timepoint (day) Value: 5
  misc_feature: MA Experiment 20001906 PARAMETER Experiment Name: At_Drought_Reproduction_P Parameter: Tissue Value: Siliques
  misc_feature: MA Experiment 20001906 PARAMETER Experiment Name: At_Drought_Reproduction_P Parameter: Treatment Value: Drought vs. No Drought
acatcaaatctatgaaaaaaaatgacagacatttccagtctctttagaaaccgaagtcgcaaggaccaacttgactatggtttaactgtgatagttatatcaactctttgttggtgtctttggctctacgccaaatgcaaacggcggtctccaccgttgccgccgggaccttggggccttcccattatcggaaaccttccattcctccaaccggagcttcacacctacttccaagggctggctaaaaagcacggtcccattttcaaactctggctcggggccaagctcacaatcgtggtcacctcttctgaagtagcgcaagagattctcaaaacgaatgacatcatcttcgcgaaccacgatgtccctgctgtgggccctgttaacacgtatggtggtacggagatcatttggtcgccgtatggaccaaagtggcggatgctgaggaagctatgtgttaataggatactgagaaacgccatgttggattcctccactgacctccgtcgccgagagactcggcaaaccgtccggtatttggcggaccaggctcgggtcggttcaccagttaacctgggagaacaaatattcttgatgatgttgaatgttgtgacgcagatgctatggggaacaacggttaaggaagaagagagggaggttgttggagccgagttcttagaggtgattagagagatgaacgacctcctgctagtgcccaatatctccgactttttcccggtattgagccggtttgatcttcagggtttggctaagcgtatgcgaagaccggctcaaagaatggatcagatgttcgaccggatcattaaccaacggttggggatggatagggacagtagtgacgggagagctgtggattttctagacgtcttgttgaaagtcaaggatgaagaagctgaaaagacgaagttgaccatgaacgatgtcaaggccgtactcatggacatggtgctcggtggtacagacacatcactgcacgtaatagaattcgcgatggccgagctattacacaaccccgatatcatgaagagagctcaacaagaggttgacaaagttgtgggaaaagaaaaagttgtggaagaatctcacatctctaaacttccatacattctcgccattatgaaagaaactctaaggcttcacacggttgctccactccttgttcctcggcgcccgtcacaaaccaccgtggtgggcggcttcaccatccctaaagattcaaagattttcatcaacgcgtgggcaatccataggaacccgaatgtatgggagaatccactgaagtttgatcccgacaggtttctggatatgtcttatgacttcaaaggaaatgacttcaattatctaccgtttgggtctggtcgtaggatatgcgtgggaatggctatgggcgagagggttgttctttacaatctcgctacgtttttgcattcttttgattggaaaattccgcaaggagagagagtggaggtcgaggagaagtttgggatcgtgttggagctaaagaatccacttgttgccacgcccgttctaaggttgtccgatccaaatctttatctctagggtcttaagttcaacacaaaggaactgaatgttctacaattcgagcttatttgtgtgtcttgtatgatttaataaaagccgttcaatgagtcaatgactttattacgtgaataaaaatctccataactc

SEQ ID NO: 49482 - protein, 519 aa, Arabidopsis thaliana
  peptide (1)..(519): Ceres Seq. ID no. 12601848
  misc_feature (25)..(518): Homolog of NCBI NO: 15810341 NR Description: putative cytochrome P450 protein [Arabidopsis
  misc_feature (25)..(518): Homolog of NCBI NO: 30685891 NR Description: cytochrome P450 family [Arabidopsis thaliana]
  misc_feature (25)..(518): Homolog of NCBI NO: 15235775 NR Description: cytochrome p450 family; protein id: At4g22710.1
  misc_feature (25)..(518): Homolog of NCBI NO: 7430667 NR Description: cytochrome P450 homolog T12H17.80 - Arabidopsis
  misc_feature (1)..(518): Homolog of NCBI NO: 15234517 NR Description: cytochrome p450, putative; protein id:
  misc_feature (1)..(519): Homolog of NCBI NO: 15234514 NR Description: cytochrome p450 family; protein id: At4g12300.1
  misc_feature (25)..(519): Homolog of NCBI NO: 11345411 NR Description: putative cytochrome P450 [Matthiola incana]
  misc_feature (1)..(519): Homolog of NCBI NO: 15234521 NR Description: cytochrome p450 family
  misc_feature (1)..(479): Homolog of NCBI NO: 16226350 NR Description: AT5g44620/K15C23_6 [Arabidopsis thaliana]
  misc_feature (1)..(519): Homolog of NCBI NO: 15241541 NR Description: cytochrome p450 family
  misc_feature (25)..(518): Homolog of NCBI NO: 15810341 NR Description: putative cytochrome P450 protein [Arabidopsis
  misc_feature (25)..(518): Homolog of NCBI NO: 30685891 NR Description: cytochrome P450 family [Arabidopsis thaliana]
  misc_feature (25)..(518): Homolog of NCBI NO: 15235775 NR Description: cytochrome p450 family; protein id: At4g22710.1
  misc_feature (25)..(518): Homolog of NCBI NO: 7430667 NR Description: cytochrome P450 homolog T12H17.80 - Arabidopsis
  misc_feature (1)..(518): Homolog of NCBI NO: 15234517 NR Description: cytochrome p450, putative; protein id:
  misc_feature (1)..(519): Homolog of NCBI NO: 15234514 NR Description: cytochrome p450 family; protein id: At4g12300.1
  misc_feature (25)..(519): Homolog of NCBI NO: 11345411 NR Description: putative cytochrome P450 [Matthiola incana]
  misc_feature (1)..(519): Homolog of NCBI NO: 15234521 NR Description: cytochrome p450 family
  misc_feature (1)..(479): Homolog of NCBI NO: 16226350 NR Description: AT5g44620/K15C23_6 [Arabidopsis thaliana]
  misc_feature (1)..(519): Homolog of NCBI NO: 15241541 NR Description: cytochrome p450 family
MTDISSLFRNRSRKDQLDYGLTVIVISTLCWCLWLYAKCKRRSPPLPPGPWGLPIIGNLPFLQPELHTYFQGLAKKHGPIFKLWLGAKLTIVVTSSEVAQEILKTNDIIFANHDVPAVGPVNTYGGTEIIWSPYGPKWRMLRKLCVNRILRNAMLDSSTDLRRRETRQTVRYLADQARVGSPVNLGEQIFLMMLNVVTQMLWGTTVKEEEREVVGAEFLEVIREMNDLLLVPNISDFFPVLSRFDLQGLAKRMRRPAQRMDQMFDRIINQRLGMDRDSSDGRAVDFLDVLLKVKDEEAEKTKLTMNDVKAVLMDMVLGGTDTSLHVIEFAMAELLHNPDIMKRAQQEVDKVVGKEKVVEESHISKLPYILAIMKETLRLHTVAPLLVPRRPSQTTVVGGFTIPKDSKIFINAWAIHRNPNVWENPLKFDPDRFLDMSYDFKGNDFNYLPFGSGRRICVGMAMGERVVLYNLATFLHSFDWKIPQGERVEVEEKFGIVLELKNPLVATPVLRLSDPNLYL

SEQ ID NO: 49483 - protein, 380 aa, Arabidopsis thaliana
  peptide (1)..(380): Ceres Seq. ID no. 12601849
  misc_feature (1)..(379): Homolog of NCBI NO: 15810341 NR Description: putative cytochrome P450 protein [Arabidopsis
  misc_feature (1)..(379): Homolog of NCBI NO: 30685891 NR Description: cytochrome P450 family [Arabidopsis thaliana]
  misc_feature (1)..(379): Homolog of NCBI NO: 15235775 NR Description: cytochrome p450 family; protein id: At4g22710.1
  misc_feature (1)..(379): Homolog of NCBI NO: 7430667 NR Description: cytochrome P450 homolog T12H17.80 - Arabidopsis
  misc_feature (1)..(379): Homolog of NCBI NO: 15234517 NR Description: cytochrome p450, putative; protein id:
  misc_feature (1)..(380): Homolog of NCBI NO: 15234514 NR Description: cytochrome p450 family; protein id: At4g12300.1
  misc_feature (1)..(380): Homolog of NCBI NO: 11345411 NR Description: putative cytochrome P450 [Matthiola incana]
  misc_feature (1)..(380): Homolog of NCBI NO: 15234521 NR Description: cytochrome p450 family
  misc_feature (1)..(340): Homolog of NCBI NO: 16226350 NR Description: AT5g44620/K15C23_6 [Arabidopsis thaliana]
  misc_feature (1)..(380): Homolog of NCBI NO: 15241541 NR Description: cytochrome p450 family
  misc_feature (1)..(379): Homolog of NCBI NO: 15810341 NR Description: putative cytochrome P450 protein [Arabidopsis
  misc_feature (1)..(379): Homolog of NCBI NO: 30685891 NR Description: cytochrome P450 family [Arabidopsis thaliana]
  misc_feature (1)..(379): Homolog of NCBI NO: 15235775 NR Description: cytochrome p450 family; protein id: At4g22710.1
  misc_feature (1)..(379): Homolog of NCBI NO: 7430667 NR Description: cytochrome P450 homolog T12H17.80 - Arabidopsis
  misc_feature (1)..(379): Homolog of NCBI NO: 15234517 NR Description: cytochrome p450, putative; protein id:
  misc_feature (1)..(380): Homolog of NCBI NO: 15234514 NR Description: cytochrome p450 family; protein id: At4g12300.1
  misc_feature (1)..(380): Homolog of NCBI NO: 11345411 NR Description: putative cytochrome P450 [Matthiola incana]
  misc_feature (1)..(380): Homolog of NCBI NO: 15234521 NR Description: cytochrome p450 family
  misc_feature (1)..(340): Homolog of NCBI NO: 16226350 NR Description: AT5g44620/K15C23_6 [Arabidopsis thaliana]
  misc_feature (1)..(380): Homolog of NCBI NO: 15241541 NR Description: cytochrome p450 family
MLRKLCVNRILRNAMLDSSTDLRRRETRQTVRYLADQARVGSPVNLGEQIFLMMLNVVTQMLWGTTVKEEEREVVGAEFLEVIREMNDLLLVPNISDFFPVLSRFDLQGLAKRMRRPAQRMDQMFDRIINQRLGMDRDSSDGRAVDFLDVLLKVKDEEAEKTKLTMNDVKAVLMDMVLGGTDTSLHVIEFAMAELLHNPDIMKRAQQEVDKVVGKEKVVEESHISKLPYILAIMKETLRLHTVAPLLVPRRPSQTTVVGGFTIPKDSKIFINAWAIHRNPNVWENPLKFDPDRFLDMSYDFKGNDFNYLPFGSGRRICVGMAMGERVVLYNLATFLHSFDWKIPQGERVEVEEKFGIVLELKNPLVATPVLRLSDPNLYL

SEQ ID NO: 49484 - protein, 366 aa, Arabidopsis thaliana
  peptide (1)..(366): Ceres Seq. ID no. 12601850
  misc_feature (1)..(365): Homolog of NCBI NO: 15810341 NR Description: putative cytochrome P450 protein [Arabidopsis
  misc_feature (1)..(365): Homolog of NCBI NO: 30685891 NR Description: cytochrome P450 family [Arabidopsis thaliana]
  misc_feature (1)..(365): Homolog of NCBI NO: 15235775 NR Description: cytochrome p450 family; protein id: At4g22710.1
  misc_feature (1)..(365): Homolog of NCBI NO: 7430667 NR Description: cytochrome P450 homolog T12H17.80 - Arabidopsis
  misc_feature (1)..(365): Homolog of NCBI NO: 15234517 NR Description: cytochrome p450, putative; protein id:
  misc_feature (1)..(366): Homolog of NCBI NO: 15234514 NR Description: cytochrome p450 family; protein id: At4g12300.1
  misc_feature (1)..(366): Homolog of NCBI NO: 11345411 NR Description: putative cytochrome P450 [Matthiola incana]
  misc_feature (1)..(366): Homolog of NCBI NO: 15234521 NR Description: cytochrome p450 family
  misc_feature (1)..(326): Homolog of NCBI NO: 16226350 NR Description: AT5g44620/K15C23_6 [Arabidopsis thaliana]
  misc_feature (1)..(366): Homolog of NCBI NO: 15241541 NR Description: cytochrome p450 family
  misc_feature (1)..(365): Homolog of NCBI NO: 15810341 NR Description: putative cytochrome P450 protein [Arabidopsis
  misc_feature (1)..(365): Homolog of NCBI NO: 30685891 NR Description: cytochrome P450 family [Arabidopsis thaliana]
  misc_feature (1)..(365): Homolog of NCBI NO: 15235775 NR Description: cytochrome p450 family; protein id: At4g22710.1
  misc_feature (1)..(365): Homolog of NCBI NO: 7430667 NR Description: cytochrome P450 homolog T12H17.80 - Arabidopsis
  misc_feature (1)..(365): Homolog of NCBI NO: 15234517 NR Description: cytochrome p450, putative; protein id:
  misc_feature (1)..(366): Homolog of NCBI NO: 15234514 NR Description: cytochrome p450 family; protein id: At4g12300.1
  misc_feature (1)..(366): Homolog of NCBI NO: 11345411 NR Description: putative cytochrome P450 [Matthiola incana]
  misc_feature (1)..(366): Homolog of NCBI NO: 15234521 NR Description: cytochrome p450 family
  misc_feature (1)..(326): Homolog of NCBI NO: 16226350 NR Description: AT5g44620/K15C23_6 [Arabidopsis thaliana]
  misc_feature (1)..(366): Homolog of NCBI NO: 15241541 NR Description: cytochrome p450 family
MLDSSTDLRRRETRQTVRYLADQARVGSPVNLGEQIFLMMLNVVTQMLWGTTVKEEEREVVGAEFLEVIREMNDLLLVPNISDFFPVLSRFDLQGLAKRMRRPAQRMDQMFDRIINQRLGMDRDSSDGRAVDFLDVLLKVKDEEAEKTKLTMNDVKAVLMDMVLGGTDTSLHVIEFAMAELLHNPDIMKRAQQEVDKVVGKEKVVEESHISKLPYILAIMKETLRLHTVAPLLVPRRPSQTTVVGGFTIPKDSKIFINAWAIHRNPNVWENPLKFDPDRFLDMSYDFKGNDFNYLPFGSGRRICVGMAMGERVVLYNLATFLHSFDWKIPQGERVEVEEKFGIVLELKNPLVATPVLRLSDPNLYL

SEQ ID NO: 49485 - DNA, 1581 bp, Arabidopsis thaliana
  misc_feature (1)..(1581): Ceres Seq. ID no. 13592277
  misc_feature: MA Experiment ID: 20000173 Result: Down-regulated in Transcription
  misc_feature: MA Experiment 20000173 PARAMETER Experiment Name: At_42deg_Heat_P Parameter: Age (day) Value: 14
  misc_feature: MA Experiment 20000173 PARAMETER Experiment Name: At_42deg_Heat_P Parameter: Organism Value: A. thaliana
  misc_feature: MA Experiment 20000173 PARAMETER Experiment Name: At_42deg_Heat_P Parameter: Plant Line Value: WS
  misc_feature: MA Experiment 20000173 PARAMETER Experiment Name: At_42deg_Heat_P Parameter: Temperature (deg C) Value: 42 vs. 22
  misc_feature: MA Experiment 20000173 PARAMETER Experiment Name: At_42deg_Heat_P Parameter: Timepoint (hr) Value: 6
  misc_feature: MA Experiment 20000173 PARAMETER Experiment Name: At_42deg_Heat_P Parameter: Tissue Value: Aerial
  misc_feature: MA Experiment ID: 20000180 Result: Up-regulated in Transcription
  misc_feature: MA Experiment 20000180 PARAMETER Experiment Name: At_Germinating_Seeds_P Parameter: Age (hr) Value: 24 vs. 0
  misc_feature: MA Experiment 20000180 PARAMETER Experiment Name: At_Germinating_Seeds_P Parameter: Tissue Value: Germinating Seeds
  misc_feature: MA Experiment ID: 20000184 Result: Down-regulated in Transcription
  misc_feature: MA Experiment 20000184 PARAMETER Experiment Name: At_Shoots__P Parameter: Age (day) Value: 7
  misc_feature: MA Experiment 20000184 PARAMETER Experiment Name: At_Shoots__P Parameter: Tissue Value: Shoots vs. Whole Plant
  misc_feature: MA Experiment ID: 20000227 Result: Up-regulated in Transcription
  misc_feature: MA Experiment 20000227 PARAMETER Experiment Name: At_Root-Tips-vs-Tops_P Parameter: Tissue Value: Root Tips vs. Root Tops
  misc_feature: MA Experiment ID: 20000234 Result: Up-regulated in Transcription
  misc_feature: MA Experiment 20000234 PARAMETER Experiment Name: At_Siliques_P Parameter: Age (day) Value: 21
  misc_feature: MA Experiment 20000234 PARAMETER Experiment Name: At_Siliques_P Parameter: Organism Value: A. thaliana
  misc_feature: MA Experiment 20000234 PARAMETER Experiment Name: At_Siliques_P Parameter: Plant Line Value: WS
  misc_feature: MA Experiment 20000234 PARAMETER Experiment Name: At_Siliques_P Parameter: Tissue Value: Less Than 5mm Siliques vs. Whole Plant
  misc_feature: MA Experiment ID: 20000235 Result: Up-regulated in Transcription
  misc_feature: MA Experiment 20000235 PARAMETER Experiment Name: At_Siliques_P Parameter: Age (day) Value: 21
  misc_feature: MA Experiment 20000235 PARAMETER Experiment Name: At_Siliques_P Parameter: Organism Value: A. thaliana
  misc_feature: MA Experiment 20000235 PARAMETER Experiment Name: At_Siliques_P Parameter: Plant Line Value: WS
  misc_feature: MA Experiment 20000235 PARAMETER Experiment Name: At_Siliques_P Parameter: Tissue Value: 5-10mm Siliques vs. Whole Plant
  misc_feature: MA Experiment ID: 20000264 Result: Up-regulated in Transcription
  misc_feature: MA Experiment 20000264 PARAMETER Experiment Name: At_Open_Flower_P Parameter: Age (day) Value: 21
  misc_feature: MA Experiment 20000264 PARAMETER Experiment Name: At_Open_Flower_P Parameter: Plant Line Value: WS
  misc_feature: MA Experiment 20000264 PARAMETER Experiment Name: At_Open_Flower_P Parameter: Tissue Value: Open Flower vs. Whole Plant
  misc_feature: MA Experiment ID: 20000265 Result: Up-regulated in Transcription
  misc_feature: MA Experiment 20000265 PARAMETER Experiment Name: At_Open_Flower_P Parameter: Age (day) Value: 21
  misc_feature: MA Experiment 20000265 PARAMETER Experiment Name: At_Open_Flower_P Parameter: Plant Line Value: WS
  misc_feature: MA Experiment 20000265 PARAMETER Experiment Name: At_Open_Flower_P Parameter: Tissue Value: Closed Flower vs. Whole Plant
  misc_feature: MA Experiment ID: 20000286 Result: Up-regulated in Transcription
  misc_feature: MA Experiment 20000286 PARAMETER Experiment Name: At_Open_Flower_P Parameter: Age (day) Value: 21
  misc_feature: MA Experiment 20000286 PARAMETER Experiment Name: At_Open_Flower_P Parameter: Plant Line Value: WS
  misc_feature: MA Experiment 20000286 PARAMETER Experiment Name: At_Open_Flower_P Parameter: Tissue Value: Half Open vs. Whole Plant
  misc_feature: MA Experiment ID: 20000495 Result: Up-regulated in Transcription
  misc_feature: MA Experiment 20000495 PARAMETER Experiment Name: At_Guard_Cells_P Parameter: Harvest Date Value: 8/2/2002
  misc_feature: MA Experiment 20000495 PARAMETER Experiment Name: At_Guard_Cells_P Parameter: Organism Value: A. thaliana
  misc_feature: MA Experiment 20000495 PARAMETER Experiment Name: At_Guard_Cells_P Parameter: Tissue Value: Guard Cells vs. Leaves
  misc_feature: MA Experiment ID: 20000496 Result: Up-regulated in Transcription
  misc_feature: MA Experiment 20000496 PARAMETER Experiment Name: At_Guard_Cells_P Parameter: Harvest Date Value: 7/19/2002
  misc_feature: MA Experiment 20000496 PARAMETER Experiment Name: At_Guard_Cells_P Parameter: Organism Value: Canola
  misc_feature: MA Experiment 20000496 PARAMETER Experiment Name: At_Guard_Cells_P Parameter: Tissue Value: Guard Cells vs. Leaves
  misc_feature: MA Experiment ID: 20000527 Result: Down-regulated in Transcription
  misc_feature: MA Experiment 20000527 PARAMETER Experiment Name: At_10percent_PEG_P Parameter: Age (day) Value: 20
  misc_feature: MA Experiment 20000527 PARAMETER Experiment Name: At_10percent_PEG_P Parameter: Organism Value: A. thaliana
  misc_feature: MA Experiment 20000527 PARAMETER Experiment Name: At_10percent_PEG_P Parameter: Plant Line Value: WS
  misc_feature: MA Experiment 20000527 PARAMETER Experiment Name: At_10percent_PEG_P Parameter: Timepoint (day) Value: 20
  misc_feature: MA Experiment 20000527 PARAMETER Experiment Name: At_10percent_PEG_P Parameter: Tissue Value: Whole Plant
  misc_feature: MA Experiment 20000527 PARAMETER Experiment Name: At_10percent_PEG_P Parameter: Treatment Value: 10percent PEG vs. No Treatment
  misc_feature: MA Experiment ID: 20001248 Result: Down-regulated in Transcription
  misc_feature: MA Experiment 20001248 PARAMETER Experiment Name: At_Far-red-induction_P Parameter: Age (day) Value: 7
  misc_feature: MA Experiment 20001248 PARAMETER Experiment Name: At_Far-red-induction_P Parameter: Light Value: Far-red vs. White
  misc_feature: MA Experiment 20001248 PARAMETER Experiment Name: At_Far-red-induction_P Parameter: Organism Value: A. thaliana
  misc_feature: MA Experiment 20001248 PARAMETER Experiment Name: At_Far-red-induction_P Parameter: Plant Line Value: Columbia
  misc_feature: MA Experiment 20001248 PARAMETER Experiment Name: At_Far-red-induction_P Parameter: Timepoint (hr) Value: 4
  misc_feature: MA Experiment 20001248 PARAMETER Experiment Name: At_Far-red-induction_P Parameter: Tissue Value: Whole Plant
  misc_feature: MA Experiment ID: 20001451 Result: Down-regulated in Transcription
  misc_feature: MA Experiment 20001451 PARAMETER Experiment Name: At_Far-red-induction_P Parameter: Age (day) Value: 7
  misc_feature: MA Experiment 20001451 PARAMETER Experiment Name: At_Far-red-induction_P Parameter: Light Value: Far-red vs. White
  misc_feature: MA Experiment 20001451 PARAMETER Experiment Name: At_Far-red-induction_P Parameter: Organism Value: A. thaliana
  misc_feature: MA Experiment 20001451 PARAMETER Experiment Name: At_Far-red-induction_P Parameter: Plant Line Value: Columbia
  misc_feature: MA Experiment 20001451 PARAMETER Experiment Name: At_Far-red-induction_P Parameter: Timepoint (hr) Value: 24
  misc_feature: MA Experiment 20001451 PARAMETER Experiment Name: At_Far-red-induction_P Parameter: Tissue Value: Whole Plant
  misc_feature: MA Experiment ID: 20001560 Result: Up-regulated in Transcription
  misc_feature: MA Experiment 20001560 PARAMETER Experiment Name: At_Drought_Soil_Dry_P Parameter: Age (day) Value: 28
  misc_feature: MA Experiment 20001560 PARAMETER Experiment Name: At_Drought_Soil_Dry_P Parameter: Organism Value: A. thaliana
  misc_feature: MA Experiment 20001560 PARAMETER Experiment Name: At_Drought_Soil_Dry_P Parameter: Plant Line Value: WS
  misc_feature: MA Experiment 20001560 PARAMETER Experiment Name: At_Drought_Soil_Dry_P Parameter: Post Timepoint (hr) Value: None
  misc_feature: MA Experiment 20001560 PARAMETER Experiment Name: At_Drought_Soil_Dry_P Parameter: Post-Treatment Value: None
  misc_feature: MA Experiment 20001560 PARAMETER Experiment Name: At_Drought_Soil_Dry_P Parameter: Timepoint (day) Value: 14
  misc_feature: MA Experiment 20001560 PARAMETER Experiment Name: At_Drought_Soil_Dry_P Parameter: Treatment Value: Drought vs. No Drought
  misc_feature: MA Experiment ID: 20001904 Result: Up-regulated in Transcription
  misc_feature: MA Experiment 20001904 PARAMETER Experiment Name: At_Drought_Reproduction_P Parameter: Age (day) Value: 37
  misc_feature: MA Experiment 20001904 PARAMETER Experiment Name: At_Drought_Reproduction_P Parameter: Organism Value: A. thaliana
  misc_feature: MA Experiment 20001904 PARAMETER Experiment Name: At_Drought_Reproduction_P Parameter: Plant Line Value: WS
  misc_feature: MA Experiment 20001904 PARAMETER Experiment Name: At_Drought_Reproduction_P Parameter: Timepoint (day) Value: 7
  misc_feature: MA Experiment 20001904 PARAMETER Experiment Name: At_Drought_Reproduction_P Parameter: Tissue Value: Rosettes
  misc_feature: MA Experiment 20001904 PARAMETER Experiment Name: At_Drought_Reproduction_P Parameter: Treatment Value: Drought vs. No Drought
  misc_feature: MA Experiment ID: 20001911 Result: Down-regulated in Transcription
  misc_feature: MA Experiment 20001911 PARAMETER Experiment Name: At_Drought_Reproduction_P Parameter: Age (day) Value: 40
  misc_feature: MA Experiment 20001911 PARAMETER Experiment Name: At_Drought_Reproduction_P Parameter: Organism Value: A. thaliana
  misc_feature: MA Experiment 20001911 PARAMETER Experiment Name: At_Drought_Reproduction_P Parameter: Plant Line Value: WS
  misc_feature: MA Experiment 20001911 PARAMETER Experiment Name: At_Drought_Reproduction_P Parameter: Timepoint (day) Value: 10
  misc_feature: MA Experiment 20001911 PARAMETER Experiment Name: At_Drought_Reproduction_P Parameter: Tissue Value: Flowers
  misc_feature: MA Experiment 20001911 PARAMETER Experiment Name: At_Drought_Reproduction_P Parameter: Treatment Value: Drought vs. No Drought
acttttcacgtttcagttttcaacaatctctctctatccattctctatcaaattctaaaatcaaaaatggctctgcatttgagatcttctttttcatcaaaatcgactttactcaatattctcagacacaacctcggtttcggttctaggagccacgtgactcggcatatccgccaaatcctaccacatgaccccccgcttcgaggttcacagaatccaattagccgtctctgtaataccatggcggagccagagacactctctagttttgttcagcacgaatacgccaacaatcatcaggtaatggactttccaggaggaaaggtagctttcacacctgagattcaattcatatcagaatctgataaagagcgtgttccttgctaccgtgttcttgatgacaatggccaacttatcaccaacagccagtttgttcaggttagcgaggaggttgcggtgaagatatatagcgatatggttactcttcaaattatggataacatattctacgaagctcaaagacaaggcagactttccttttacgctactgcaatcggtgaagaggccattaatattgcatcagctgctgctctcactcctcaagatgttatctttcctcagtacagagagcctggtgttctactatggcgtggtttcacgcttcaagaatttgcaaaccagtgttttgggaacaaatctgattatggaaaaggcaggcagatgcccgtccactatggctctaacaagctcaattattttaccgtttctgcaaccattgctacgcagttaccaaacgcggttggtgctgcttattccttaaagatggacaagaaggatgcatgtgcggtcacatattttggcgatggtggcacgagtgagggagatttccatgctgctttgaatattgcagcagttatggaagctcctgttttatttatttgccggaacaatggatgggccatcagtactcccacctcagatcagttccgaagtgatggtgtagtggtcaaaggccgtgcttatggaattcgaagtatacgtgtggatggaaatgatgcacttgccatgtacagtgcggtacatactgctcgcgaaatggcaattagagaacagaggccaatcttgattgaggccttaacataccgtgtaggacaccattcaacatcagatgattccactaggtaccgctctgcaggtgagatagagtggtggaacaaagcaagaaacccactgtctaggtttaggacatggattgaaagtaatggctggtggagtgataaaacggaatcggatctgagaagcagaatcaaaaaagagatgttagaagcgctccgggttgcagagaagactgagaaaccgaatctgcagaacatgttctcagatgtctacgatgttcctccatctaacctcagggaacaagaacttctggtgaggcagacgatcaatagtcacccacaagattacccatcagatgtgcctctttaggtagactctagttgtatgctttgtgtagtaatttatgtaagccaaataatctacattgtgtattgaaatcttttattgaaatcgagaccaatattc

SEQ ID NO: 49486 - protein, 494 aa, Arabidopsis thaliana
  peptide (1)..(494): Ceres Seq. ID no. 13592278
  misc_feature (156)..(456): Pfam Name: Dehydrogenase E1 component Pfam Description: Dehydrogenase E1 component
  misc_feature (156)..(456): Pfam Name: Dehydrogenase E1 component Pfam Description: Dehydrogenase E1 component
  misc_feature (92)..(491): Homolog of NCBI NO: 8176547 NR Description: branched-chain alpha-keto acid dehydrogenase E1
  misc_feature (92)..(491): Homolog of NCBI NO: 386841 NR Description: branched-chain alpha-keto acid dehydrogenase
  misc_feature (92)..(491): Homolog of NCBI NO: 27806229 NR Description: branched chain keto acid dehydrogenase E1, alpha
  misc_feature (104)..(492): Homolog of NCBI NO: 12964598 NR Description: branched-chain alpha-keto acid dehydrogenase
  misc_feature (108)..(494): Homolog of NCBI NO: 30145768 NR Description: Hypothetical protein Y39E4A.3 [Caenorhabditis
  misc_feature (92)..(491): Homolog of NCBI NO: 8176547 NR Description: branched-chain alpha-keto acid dehydrogenase E1
  misc_feature (92)..(491): Homolog of NCBI NO: 27806229 NR Description: branched chain keto acid dehydrogenase E1, alpha
  misc_feature (108)..(494): Homolog of NCBI NO: 30145768 NR Description: Hypothetical protein Y39E4A.3 [Caenorhabditis
  misc_feature (23)..(494): Homolog of NCBI NO: 18415939 NR Description: branched-chain alpha keto-acid dehydrogenase E1
  misc_feature (81)..(494): Homolog of NCBI NO: 9955517 NR Description: branched-chain alpha keto-acid dehydrogenase E1
  misc_feature (31)..(489): Homolog of NCBI NO: 15218984 NR Description: branched-chain alpha keto-acid dehydrogenase
  misc_feature (31)..(489): Homolog of NCBI NO: 11357201 NR Description: branched-chain alpha keto-acid dehydrogenase E1
  misc_feature (83)..(491): Homolog of NCBI NO: 7431561 NR Description: 3-methyl-2-oxobutanoate dehydrogenase (lipoamide)
  misc_feature (104)..(492): Homolog of NCBI NO: 12964598 NR Description: branched-chain alpha-keto acid dehydrogenase
  misc_feature (92)..(491): Homolog of NCBI NO: 386841 NR Description: branched-chain alpha-keto acid dehydrogenase
  misc_feature (83)..(491): Homolog of NCBI NO: 7431561 NR Description: 3-methyl-2-oxobutanoate dehydrogenase (lipoamide)
  misc_feature (31)..(489): Homolog of NCBI NO: 11357201 NR Description: branched-chain alpha keto-acid dehydrogenase E1
  misc_feature (31)..(489): Homolog of NCBI NO: 15218984 NR Description: branched-chain alpha keto-acid dehydrogenase
  misc_feature (81)..(494): Homolog of NCBI NO: 9955517 NR Description: branched-chain alpha keto-acid dehydrogenase E1
  misc_feature (23)..(494): Homolog of NCBI NO: 18415939 NR Description: branched-chain alpha keto-acid dehydrogenase E1
TFHVSVFNNLSLSILYQILKSKMALHLRSSFSSKSTLLNILRHNLGFGSRSHVTRHIRQILPHDPPLRGSQNPISRLCNTMAEPETLSSFVQHEYANNHQVMDFPGGKVAFTPEIQFISESDKERVPCYRVLDDNGQLITNSQFVQVSEEVAVKIYSDMVTLQIMDNIFYEAQRQGRLSFYATAIGEEAINIASAAALTPQDVIFPQYREPGVLLWRGFTLQEFANQCFGNKSDYGKGRQMPVHYGSNKLNYFTVSATIATQLPNAVGAAYSLKMDKKDACAVTYFGDGGTSEGDFHAALNIAAVMEAPVLFICRNNGWAISTPTSDQFRSDGVVVKGRAYGIRSIRVDGNDALAMYSAVHTAREMAIREQRPILIEALTYRVGHHSTSDDSTRYRSAGEIEWWNKARNPLSRFRTWIESNGWWSDKTESDLRSRIKKEMLEALRVAEKTEKPNLQNMFSDVYDVPPSNLREQELLVRQTINSHPQDYPSDVPL

SEQ ID NO: 49487 - protein, 472 aa, Arabidopsis thaliana
  peptide (1)..(472): Ceres Seq. ID no. 13592279
  misc_feature (134)..(434): Pfam Name: Dehydrogenase E1 component Pfam Description: Dehydrogenase E1 component
  misc_feature (134)..(434): Pfam Name: Dehydrogenase E1 component Pfam Description: Dehydrogenase E1 component
  misc_feature (70)..(469): Homolog of NCBI NO: 8176547 NR Description: branched-chain alpha-keto acid dehydrogenase E1
  misc_feature (70)..(469): Homolog of NCBI NO: 386841 NR Description: branched-chain alpha-keto acid dehydrogenase
  misc_feature (70)..(469): Homolog of NCBI NO: 27806229 NR Description: branched chain keto acid dehydrogenase E1, alpha
  misc_feature (82)..(470): Homolog of NCBI NO: 12964598 NR Description: branched-chain alpha-keto acid dehydrogenase
  misc_feature (86)..(472): Homolog of NCBI NO: 30145768 NR Description: Hypothetical protein Y39E4A.3 [Caenorhabditis
  misc_feature (70)..(469): Homolog of NCBI NO: 8176547 NR Description: branched-chain alpha-keto acid dehydrogenase E1
  misc_feature (70)..(469): Homolog of NCBI NO: 27806229 NR Description: branched chain keto acid dehydrogenase E1, alpha
  misc_feature (86)..(472): Homolog of NCBI NO: 30145768 NR Description: Hypothetical protein Y39E4A.3 [Caenorhabditis
  misc_feature (1)..(472): Homolog of NCBI NO: 18415939 NR Description: branched-chain alpha keto-acid dehydrogenase E1
  misc_feature (59)..(472): Homolog of NCBI NO: 9955517 NR Description: branched-chain alpha keto-acid dehydrogenase E1
  misc_feature (9)..(467): Homolog of NCBI NO: 15218984 NR Description: branched-chain alpha keto-acid dehydrogenase
  misc_feature (9)..(467): Homolog of NCBI NO: 11357201 NR Description: branched-chain alpha keto-acid dehydrogenase E1
  misc_feature (61)..(469): Homolog of NCBI NO: 7431561 NR Description: 3-methyl-2-oxobutanoate dehydrogenase (lipoamide)
  misc_feature (82)..(470): Homolog of NCBI NO: 12964598 NR Description: branched-chain alpha-keto acid dehydrogenase
  misc_feature (70)..(469): Homolog of NCBI NO: 386841 NR Description: branched-chain alpha-keto acid dehydrogenase
  misc_feature (61)..(469): Homolog of NCBI NO: 7431561 NR Description: 3-methyl-2-oxobutanoate dehydrogenase (lipoamide)
  misc_feature (9)..(467): Homolog of NCBI NO: 11357201 NR Description: branched-chain alpha keto-acid dehydrogenase E1
  misc_feature (9)..(467): Homolog of NCBI NO: 15218984 NR Description: branched-chain alpha keto-acid dehydrogenase
  misc_feature (59)..(472): Homolog of NCBI NO: 9955517 NR Description: branched-chain alpha keto-acid dehydrogenase E1
  misc_feature (1)..(472): Homolog of NCBI NO: 18415939 NR Description: branched-chain alpha keto-acid dehydrogenase E1
MALHLRSSFSSKSTLLNILRHNLGFGSRSHVTRHIRQILPHDPPLRGSQNPISRLCNTMAEPETLSSFVQHEYANNHQVMDFPGGKVAFTPEIQFISESDKERVPCYRVLDDNGQLITNSQFVQVSEEVAVKIYSDMVTLQIMDNIFYEAQRQGRLSFYATAIGEEAINIASAAALTPQDVIFPQYREPGVLLWRGFTLQEFANQCFGNKSDYGKGRQMPVHYGSNKLNYFTVSATIATQLPNAVGAAYSLKMDKKDACAVTYFGDGGTSEGDFHAALNIAAVMEAPVLFICRNNGWAISTPTSDQFRSDGVVVKGRAYGIRSIRVDGNDALAMYSAVHTAREMAIREQRPILIEALTYRVGHHSTSDDSTRYRSAGEIEWWNKARNPLSRFRTWIESNGWWSDKTESDLRSRIKKEMLEALRVAEKTEKPNLQNMFSDVYDVPPSNLREQELLVRQTINSHPQDYPSDVPL

SEQ ID NO: 49488 - protein, 414 aa, Arabidopsis thaliana
  peptide (1)..(414): Ceres Seq. ID no. 13592280
  misc_feature (76)..(376): Pfam Name: Dehydrogenase E1 component Pfam Description: Dehydrogenase E1 component
  misc_feature (76)..(376): Pfam Name: Dehydrogenase E1 component Pfam Description: Dehydrogenase E1 component
  misc_feature (12)..(411): Homolog of NCBI NO: 8176547 NR Description: branched-chain alpha-keto acid dehydrogenase E1
  misc_feature (12)..(411): Homolog of NCBI NO: 386841 NR Description: branched-chain alpha-keto acid dehydrogenase
  misc_feature (12)..(411): Homolog of NCBI NO: 27806229 NR Description: branched chain keto acid dehydrogenase E1, alpha
  misc_feature (24)..(412): Homolog of NCBI NO: 12964598 NR Description: branched-chain alpha-keto acid dehydrogenase
  misc_feature (28)..(414): Homolog of NCBI NO: 30145768 NR Description: Hypothetical protein Y39E4A.3 [Caenorhabditis
  misc_feature (12)..(411): Homolog of NCBI NO: 8176547 NR Description: branched-chain alpha-keto acid dehydrogenase E1
  misc_feature (12)..(411): Homolog of NCBI NO: 27806229 NR Description: branched chain keto acid dehydrogenase E1, alpha
  misc_feature (28)..(414): Homolog of NCBI NO: 30145768 NR Description: Hypothetical protein Y39E4A.3 [Caenorhabditis
  misc_feature (1)..(414): Homolog of NCBI NO: 18415939 NR Description: branched-chain alpha keto-acid dehydrogenase E1
  misc_feature (1)..(414): Homolog of NCBI NO: 9955517 NR Description: branched-chain alpha keto-acid dehydrogenase E1
  misc_feature (1)..(409): Homolog of NCBI NO: 15218984 NR Description: branched-chain alpha keto-acid dehydrogenase
  misc_feature (1)..(409): Homolog of NCBI NO: 11357201 NR Description: branched-chain alpha keto-acid dehydrogenase E1
  misc_feature (3)..(411): Homolog of NCBI NO: 7431561 NR Description: 3-methyl-2-oxobutanoate dehydrogenase (lipoamide)
  misc_feature (24)..(412): Homolog of NCBI NO: 12964598 NR Description: branched-chain alpha-keto acid dehydrogenase
  misc_feature (12)..(411): Homolog of NCBI NO: 386841 NR Description: branched-chain alpha-keto acid dehydrogenase
  misc_feature (3)..(411): Homolog of NCBI NO: 7431561 NR Description: 3-methyl-2-oxobutanoate dehydrogenase (lipoamide)
  misc_feature (1)..(409): Homolog of NCBI NO: 11357201 NR Description: branched-chain alpha keto-acid dehydrogenase E1
  misc_feature (1)..(409): Homolog of NCBI NO: 15218984 NR Description: branched-chain alpha keto-acid dehydrogenase
  misc_feature (1)..(414): Homolog of NCBI NO: 9955517 NR Description: branched-chain alpha keto-acid dehydrogenase E1
  misc_feature (1)..(414): Homolog of NCBI NO: 18415939 NR Description: branched-chain alpha keto-acid dehydrogenase E1
MAEPETLSSFVQHEYANNHQVMDFPGGKVAFTPEIQFISESDKERVPCYRVLDDNGQLITNSQFVQVSEEVAVKIYSDMVTLQIMDNIFYEAQRQGRLSFYATAIGEEAINIASAAALTPQDVIFPQYREPGVLLWRGFTLQEFANQCFGNKSDYGKGRQMPVHYGSNKLNYFTVSATIATQLPNAVGAAYSLKMDKKDACAVTYFGDGGTSEGDFHAALNIAAVMEAPVLFICRNNGWAISTPTSDQFRSDGVVVKGRAYGIRSIRVDGNDALAMYSAVHTAREMAIREQRPILIEALTYRVGHHSTSDDSTRYRSAGEIEWWNKARNPLSRFRTWIESNGWWSDKTESDLRSRIKKEMLEALRVAEKTEKPNLQNMFSDVYDVPPSNLREQELLVRQTINSHPQDYPSDVPL

SEQ ID NO: 49489 - DNA, 1252 bp, Arabidopsis thaliana; identical to SEQ ID NO: 46531
  misc_feature (1)..(1252): Ceres Seq. ID no. 13591768
  misc_feature: MA Experiment ID: 20000438 Result: Up-regulated in Transcription
  misc_feature: MA Experiment 20000438 PARAMETER Experiment Name: At_Shoots__P Parameter: Age (day) Value: 14
  misc_feature: MA Experiment 20000438 PARAMETER Experiment Name: At_Shoots__P Parameter: Tissue Value: Shoots vs. Whole Plant
  misc_feature: MA Experiment ID: 20000495 Result: Down-regulated in Transcription
  misc_feature: MA Experiment 20000495 PARAMETER Experiment Name: At_Guard_Cells_P Parameter: Harvest Date Value: 8/2/2002
  misc_feature: MA Experiment 20000495 PARAMETER Experiment Name: At_Guard_Cells_P Parameter: Organism Value: A. thaliana
  misc_feature: MA Experiment 20000495 PARAMETER Experiment Name: At_Guard_Cells_P Parameter: Tissue Value: Guard Cells vs. Leaves
  misc_feature: MA Experiment ID: 20000496 Result: Down-regulated in Transcription
  misc_feature: MA Experiment 20000496 PARAMETER Experiment Name: At_Guard_Cells_P Parameter: Harvest Date Value: 7/19/2002
  misc_feature: MA Experiment 20000496 PARAMETER Experiment Name: At_Guard_Cells_P Parameter: Organism Value: Canola
  misc_feature: MA Experiment 20000496 PARAMETER Experiment Name: At_Guard_Cells_P Parameter: Tissue Value: Guard Cells vs. Leaves
  misc_feature: MA Experiment ID: 20001451 Result: Down-regulated in Transcription
  misc_feature: MA Experiment 20001451 PARAMETER Experiment Name: At_Far-red-induction_P Parameter: Age (day) Value: 7
  misc_feature: MA Experiment 20001451 PARAMETER Experiment Name: At_Far-red-induction_P Parameter: Light Value: Far-red vs. White
  misc_feature: MA Experiment 20001451 PARAMETER Experiment Name: At_Far-red-induction_P Parameter: Organism Value: A. thaliana
  misc_feature: MA Experiment 20001451 PARAMETER Experiment Name: At_Far-red-induction_P Parameter: Plant Line Value: Columbia
  misc_feature: MA Experiment 20001451 PARAMETER Experiment Name: At_Far-red-induction_P Parameter: Timepoint (hr) Value: 24
  misc_feature: MA Experiment 20001451 PARAMETER Experiment Name: At_Far-red-induction_P Parameter: Tissue Value: Whole Plant

SEQ ID NO: 49490 - protein, 344 aa, Arabidopsis thaliana; identical to SEQ ID NO: 46532
  peptide (1)..(344): Ceres Seq. ID no. 13591769
  misc_feature (129)..(320): Pfam Name: Clp protease Pfam Description: Clp protease
  misc_feature (129)..(320): Pfam Name: Clp protease Pfam Description: Clp protease
  misc_feature (130)..(317): Homolog of NCBI NO: 33240836 NR Description: Protease subunit of ATP-dependent Clp protease
  misc_feature (112)..(317): Homolog of NCBI NO: 23043113 NR Description: hypothetical protein [Trichodesmium erythraeum
  misc_feature (120)..(317): Homolog of NCBI NO: 16506759 NR Description: hypothetical protein [Cyanothece sp. PCC 8801]
  misc_feature (132)..(317): Homolog of NCBI NO: 13812146 NR Description: ATP-dependent Clp protease proteolytic subunit
  misc_feature (120)..(317): Homolog of NCBI NO: 16331161 NR Description: ATP-dependent Clp protease proteolytic subunit
  misc_feature (130)..(317): Homolog of NCBI NO: 33240836 NR Description: Protease subunit of ATP-dependent Clp protease
  misc_feature (120)..(317): Homolog of NCBI NO: 16506759 NR Description: hypothetical protein [Cyanothece sp. PCC 8801]
  misc_feature (120)..(317): Homolog of NCBI NO: 16331161 NR Description: ATP-dependent Clp protease proteolytic subunit
  misc_feature (15)..(344): Homolog of NCBI NO: 18390982 NR Description: ATP-dependent Clp protease proteolytic subunit
  misc_feature (15)..(244): Homolog of NCBI NO: 25402516 NR Description: hypothetical protein [imported] - Arabidopsis
  misc_feature (112)..(317): Homolog of NCBI NO: 22299302 NR Description: ATP-dependent Clp protease proteolytic subunit 3
  misc_feature (114)..(316): Homolog of NCBI NO: 23126723 NR Description: hypothetical protein [Nostoc punctiforme]
  misc_feature (114)..(316): Homolog of NCBI NO: 17231850 NR Description: ATP-dependent Clp protease proteolytic subunit
  misc_feature (132)..(317): Homolog of NCBI NO: 13812146 NR Description: ATP-dependent Clp protease proteolytic subunit
  misc_feature (112)..(317): Homolog of NCBI NO: 23043113 NR Description: hypothetical protein [Trichodesmium erythraeum
  misc_feature (114)..(316): Homolog of NCBI NO: 17231850 NR Description: ATP-dependent Clp protease proteolytic subunit
  misc_feature (114)..(316): Homolog of NCBI NO: 23126723 NR Description: hypothetical protein [Nostoc punctiforme]
  misc_feature (112)..(317): Homolog of NCBI NO: 22299302 NR Description: ATP-dependent Clp protease proteolytic subunit 3
  misc_feature (15)..(244): Homolog of NCBI NO: 25402516 NR Description: hypothetical protein [imported] - Arabidopsis
  misc_feature (15)..(344): Homolog of NCBI NO: 18390982 NR Description: ATP-dependent Clp protease proteolytic subunit

SEQ ID NO: 49491 - protein, 330 aa, Arabidopsis thaliana; identical to SEQ ID NO: 46533
  peptide (1)..(330): Ceres Seq. ID no. 13591770
  misc_feature (115)..(306): Pfam Name: Clp protease Pfam Description: Clp protease
  misc_feature (115)..(306): Pfam Name: Clp protease Pfam Description: Clp protease
  misc_feature (116)..(303): Homolog of NCBI NO: 33240836 NR Description: Protease subunit of ATP-dependent Clp protease
  misc_feature (98)..(303): Homolog of NCBI NO: 23043113 NR Description: hypothetical protein [Trichodesmium erythraeum
  misc_feature (106)..(303): Homolog of NCBI NO: 16506759 NR Description: hypothetical protein [Cyanothece sp. PCC 8801]
  misc_feature (118)..(303): Homolog of NCBI NO: 13812146 NR Description: ATP-dependent Clp protease proteolytic subunit
  misc_feature (106)..(303): Homolog of NCBI NO: 16331161 NR Description: ATP-dependent Clp protease proteolytic subunit
  misc_feature (116)..(303): Homolog of NCBI NO: 33240836 NR Description: Protease subunit of ATP-dependent Clp protease
  misc_feature (106)..(303): Homolog of NCBI NO: 16506759 NR Description: hypothetical protein [Cyanothece sp. PCC 8801]
  misc_feature (106)..(303): Homolog of NCBI NO: 16331161 NR Description: ATP-dependent Clp protease proteolytic subunit
  misc_feature (1)..(330): Homolog of NCBI NO: 18390982 NR Description: ATP-dependent Clp protease proteolytic subunit
  misc_feature (1)..(230): Homolog of NCBI NO: 25402516 NR Description: hypothetical protein [imported] - Arabidopsis
  misc_feature (98)..(303): Homolog of NCBI NO: 22299302 NR Description: ATP-dependent Clp protease proteolytic subunit 3
  misc_feature (100)..(302): Homolog of NCBI NO: 23126723 NR Description: hypothetical protein [Nostoc punctiforme]
  misc_feature (100)..(302): Homolog of NCBI NO: 17231850 NR Description: ATP-dependent Clp protease proteolytic subunit
  misc_feature (118)..(303): Homolog of NCBI NO: 13812146 NR Description: ATP-dependent Clp protease proteolytic subunit
  misc_feature (98)..(303): Homolog of NCBI NO: 23043113 NR Description: hypothetical protein [Trichodesmium erythraeum
  misc_feature (100)..(302): Homolog of NCBI NO: 17231850 NR Description: ATP-dependent Clp protease proteolytic subunit
  misc_feature (100)..(302): Homolog of NCBI NO: 23126723 NR Description: hypothetical protein [Nostoc punctiforme]
  misc_feature (98)..(303): Homolog of NCBI NO: 22299302 NR Description: ATP-dependent Clp protease proteolytic subunit 3
  misc_feature (1)..(230): Homolog of NCBI NO: 25402516 NR Description: hypothetical protein [imported] - Arabidopsis
  misc_feature (1)..(330): Homolog of NCBI NO: 18390982 NR Description: ATP-dependent Clp protease proteolytic subunit

SEQ ID NO: 49492 - protein, 322 aa, Arabidopsis thaliana; identical to SEQ ID NO: 46534
  peptide (1)..(322): Ceres Seq. ID no. 13591771
  misc_feature (107)..(298): Pfam Name: Clp protease Pfam Description: Clp protease
  misc_feature (107)..(298): Pfam Name: Clp protease Pfam Description: Clp protease
  misc_feature (108)..(295): Homolog of NCBI NO: 33240836 NR Description: Protease subunit of ATP-dependent Clp protease
  misc_feature (90)..(295): Homolog of NCBI NO: 23043113 NR Description: hypothetical protein [Trichodesmium erythraeum
  misc_feature (98)..(295): Homolog of NCBI NO: 16506759 NR Description: hypothetical protein [Cyanothece sp. PCC 8801]
  misc_feature (110)..(295): Homolog of NCBI NO: 13812146 NR Description: ATP-dependent Clp protease proteolytic subunit
  misc_feature (98)..(295): Homolog of NCBI NO: 16331161 NR Description: ATP-dependent Clp protease proteolytic subunit
  misc_feature (108)..(295): Homolog of NCBI NO: 33240836 NR Description: Protease subunit of ATP-dependent Clp protease
  misc_feature (98)..(295): Homolog of NCBI NO: 16506759 NR Description: hypothetical protein [Cyanothece sp. PCC 8801]
  misc_feature (98)..(295): Homolog of NCBI NO: 16331161 NR Description: ATP-dependent Clp protease proteolytic subunit
  misc_feature (1)..(322): Homolog of NCBI NO: 18390982 NR Description: ATP-dependent Clp protease proteolytic subunit
  misc_feature (1)..(222): Homolog of NCBI NO: 25402516 NR Description: hypothetical protein [imported] - Arabidopsis
  misc_feature (90)..(295): Homolog of NCBI NO: 22299302 NR Description: ATP-dependent Clp protease proteolytic subunit 3
  misc_feature (92)..(294): Homolog of NCBI NO: 23126723 NR Description: hypothetical protein [Nostoc punctiforme]
  misc_feature (92)..(294): Homolog of NCBI NO: 17231850 NR Description: ATP-dependent Clp protease proteolytic subunit
  misc_feature (110)..(295): Homolog of NCBI NO: 13812146 NR Description: ATP-dependent Clp protease proteolytic subunit
  misc_feature (90)..(295): Homolog of NCBI NO: 23043113 NR Description: hypothetical protein [Trichodesmium erythraeum
  misc_feature (92)..(294): Homolog of NCBI NO: 17231850 NR Description: ATP-dependent Clp protease proteolytic subunit
  misc_feature (92)..(294): Homolog of NCBI NO: 23126723 NR Description: hypothetical protein [Nostoc punctiforme]
  misc_feature (90)..(295): Homolog of NCBI NO: 22299302 NR Description: ATP-dependent Clp protease proteolytic subunit 3
  misc_feature (1)..(222): Homolog of NCBI NO: 25402516 NR Description: hypothetical protein [imported] - Arabidopsis
  misc_feature (1)..(322): Homolog of NCBI NO: 18390982 NR Description: ATP-dependent Clp protease proteolytic subunit

SEQ ID NO: 49493 - DNA, 1590 bp, Arabidopsis thaliana; identical to SEQ ID NO: 44988
  misc_feature (1)..(1590): Ceres Seq. ID no. 12600281
  misc_feature: MA Experiment ID: 20000173 Result: Down-regulated in Transcription
  misc_feature: MA Experiment 20000173 PARAMETER Experiment Name: At_42deg_Heat_P Parameter: Age (day) Value: 14
  misc_feature: MA Experiment 20000173 PARAMETER Experiment Name: At_42deg_Heat_P Parameter: Organism Value: A. thaliana
  misc_feature: MA Experiment 20000173 PARAMETER Experiment Name: At_42deg_Heat_P Parameter: Plant Line Value: WS
  misc_feature: MA Experiment 20000173 PARAMETER Experiment Name: At_42deg_Heat_P Parameter: Temperature (deg C) Value: 42 vs. 22
  misc_feature: MA Experiment 20000173 PARAMETER Experiment Name: At_42deg_Heat_P Parameter: Timepoint (hr) Value: 6
  misc_feature: MA Experiment 20000173 PARAMETER Experiment Name: At_42deg_Heat_P Parameter: Tissue Value: Aerial
  misc_feature: MA Experiment ID: 20000180 Result: Up-regulated in Transcription
  misc_feature: MA Experiment 20000180 PARAMETER Experiment Name: At_Germinating_Seeds_P Parameter: Age (hr) Value: 24 vs. 0
  misc_feature: MA Experiment 20000180 PARAMETER Experiment Name: At_Germinating_Seeds_P Parameter: Tissue Value: Germinating Seeds
  misc_feature: MA Experiment ID: 20000185 Result: Down-regulated in Transcription
  misc_feature: MA Experiment 20000185 PARAMETER Experiment Name: At_Roots__P Parameter: Age (day) Value: 7 vs. 21
  misc_feature: MA Experiment 20000185 PARAMETER Experiment Name: At_Roots__P Parameter: Organism Value: A. thaliana
  misc_feature: MA Experiment 20000185 PARAMETER Experiment Name: At_Roots__P Parameter: Tissue Value: Roots vs. Whole Plant
  misc_feature: MA Experiment ID: 20000439 Result: Down-regulated in Transcription
  misc_feature: MA Experiment 20000439 PARAMETER Experiment Name: At_Roots__P Parameter: Age (day) Value: 14 vs. 21
  misc_feature: MA Experiment 20000439 PARAMETER Experiment Name: At_Roots__P Parameter: Organism Value: A. thaliana
  misc_feature: MA Experiment 20000439 PARAMETER Experiment Name: At_Roots__P Parameter: Tissue Value: Roots vs. Whole Plant
  misc_feature: MA Experiment ID: 20000495 Result: Down-regulated in Transcription
  misc_feature: MA Experiment 20000495 PARAMETER Experiment Name: At_Guard_Cells_P Parameter: Harvest Date Value: 8/2/2002
  misc_feature: MA Experiment 20000495 PARAMETER Experiment Name: At_Guard_Cells_P Parameter: Organism Value: A. thaliana
  misc_feature: MA Experiment 20000495 PARAMETER Experiment Name: At_Guard_Cells_P Parameter: Tissue Value: Guard Cells vs. Leaves
  misc_feature: MA Experiment ID: 20000794 Result: Down-regulated in Transcription
  misc_feature: MA Experiment 20000794 PARAMETER Experiment Name: At_Petals_P Parameter: Age (day) Value: 23-25 days
  misc_feature: MA Experiment 20000794 PARAMETER Experiment Name: At_Petals_P Parameter: Plant Line Value: WS
  misc_feature: MA Experiment 20000794 PARAMETER Experiment Name: At_Petals_P Parameter: Tissue Value: Petals vs. Whole plant
  misc_feature: MA Experiment ID: 20001248 Result: Down-regulated in Transcription
  misc_feature: MA Experiment 20001248 PARAMETER Experiment Name: At_Far-red-induction_P Parameter: Age (day) Value: 7
  misc_feature: MA Experiment 20001248 PARAMETER Experiment Name: At_Far-red-induction_P Parameter: Light Value: Far-red vs. White
  misc_feature: MA Experiment 20001248 PARAMETER Experiment Name: At_Far-red-induction_P Parameter: Organism Value: A. thaliana
  misc_feature: MA Experiment 20001248 PARAMETER Experiment Name: At_Far-red-induction_P Parameter: Plant Line Value: Columbia
  misc_feature: MA Experiment 20001248 PARAMETER Experiment Name: At_Far-red-induction_P Parameter: Timepoint (hr) Value: 4
  misc_feature: MA Experiment 20001248 PARAMETER Experiment Name: At_Far-red-induction_P Parameter: Tissue Value: Whole Plant
  misc_feature: MA Experiment ID: 20001450 Result: Down-regulated in Transcription
  misc_feature: MA Experiment 20001450 PARAMETER Experiment Name: At_Far-red-induction_P Parameter: Age (day) Value: 7
  misc_feature: MA Experiment 20001450 PARAMETER Experiment Name: At_Far-red-induction_P Parameter: Light Value: Far-red vs. White
  misc_feature: MA Experiment 20001450 PARAMETER Experiment Name: At_Far-red-induction_P Parameter: Organism Value: A. thaliana
  misc_feature: MA Experiment 20001450 PARAMETER Experiment Name: At_Far-red-induction_P Parameter: Plant Line Value: Columbia
  misc_feature: MA Experiment 20001450 PARAMETER Experiment Name: At_Far-red-induction_P Parameter: Timepoint (hr) Value: 8
  misc_feature: MA Experiment 20001450 PARAMETER Experiment Name: At_Far-red-induction_P Parameter: Tissue Value: Whole Plant
  misc_feature: MA Experiment ID: 20001905 Result: Down-regulated in Transcription
  misc_feature: MA Experiment 20001905 PARAMETER Experiment Name: At_Drought_Reproduction_P Parameter: Age (day) Value: 40
  misc_feature: MA Experiment 20001905 PARAMETER Experiment Name: At_Drought_Reproduction_P Parameter: Organism Value: A. thaliana
  misc_feature: MA Experiment 20001905 PARAMETER Experiment Name: At_Drought_Reproduction_P Parameter: Plant Line Value: WS
  misc_feature: MA Experiment 20001905 PARAMETER Experiment Name: At_Drought_Reproduction_P Parameter: Timepoint (day) Value: 10
  misc_feature: MA Experiment 20001905 PARAMETER Experiment Name: At_Drought_Reproduction_P Parameter: Tissue Value: Rosettes
  misc_feature: MA Experiment 20001905 PARAMETER Experiment Name: At_Drought_Reproduction_P Parameter: Treatment Value: Drought vs. No Drought

SEQ ID NO: 49494 - protein, 439 aa, Arabidopsis thaliana; identical to SEQ ID NO: 44989
  peptide (1)..(439): Ceres Seq. ID no. 12600282
  misc_feature (72)..(358): Homolog of NCBI NO: 37521728 NR Description: hypothetical protein glr2159 [Gloeobacter
  misc_feature (79)..(438): Homolog of NCBI NO: 22299309 NR Description: ORF_ID:tlr1766~hypothetical protein
  misc_feature (72)..(390): Homolog of NCBI NO: 16331838 NR Description: unknown protein [Synechocystis sp. PCC 6803]
  misc_feature (77)..(396): Homolog of NCBI NO: 23042669 NR Description: hypothetical protein [Trichodesmium erythraeum
  misc_feature (65)..(395): Homolog of NCBI NO: 17232742 NR Description: hypothetical protein [Nostoc sp. PCC 7120]
  misc_feature (65)..(395): Homolog of NCBI NO: 23127437 NR Description: hypothetical protein [Nostoc punctiforme]
  misc_feature (53)..(439): Homolog of NCBI NO: 37534826 NR Description: unknown protein [Oryza sativa (japonica
  misc_feature (6)..(439): Homolog of NCBI NO: 18396920 NR Description: expressed protein
  misc_feature (6)..(439): Homolog of NCBI NO: 15241839 NR Description: putative protein; protein id: At5g28500.1
  misc_feature (72)..(358): Homolog of NCBI NO: 37521728 NR Description: hypothetical protein glr2159 [Gloeobacter
  misc_feature (79)..(438): Homolog of NCBI NO: 22299309 NR Description: ORF_ID:tlr1766~hypothetical protein
  misc_feature (72)..(390): Homolog of NCBI NO: 16331838 NR Description: unknown protein [Synechocystis sp. PCC 6803]
  misc_feature (77)..(396): Homolog of NCBI NO: 23042669 NR Description: hypothetical protein [Trichodesmium erythraeum
  misc_feature (65)..(395): Homolog of NCBI NO: 17232742 NR Description: hypothetical protein [Nostoc sp. PCC 7120]
  misc_feature (65)..(395): Homolog of NCBI NO: 23127437 NR Description: hypothetical protein [Nostoc punctiforme]
  misc_feature (53)..(439): Homolog of NCBI NO: 37534826 NR Description: unknown protein [Oryza sativa (japonica
  misc_feature (6)..(439): Homolog of NCBI NO: 18396920 NR Description: expressed protein
  misc_feature (6)..(439): Homolog of NCBI NO: 15241839 NR Description: putative protein; protein id: At5g28500.1

SEQ ID NO: 49495 - protein, 434 aa, Arabidopsis thaliana; identical to SEQ ID NO: 44990
  peptide (1)..(434): Ceres Seq. ID no. 12600283
  misc_feature (67)..(353): Homolog of NCBI NO: 37521728 NR Description: hypothetical protein glr2159 [Gloeobacter
  misc_feature (74)..(433): Homolog of NCBI NO: 22299309 NR Description: ORF_ID:tlr1766~hypothetical protein
  misc_feature (67)..(385): Homolog of NCBI NO: 16331838 NR Description: unknown protein [Synechocystis sp. PCC 6803]
  misc_feature (72)..(391): Homolog of NCBI NO: 23042669 NR Description: hypothetical protein [Trichodesmium erythraeum
  misc_feature (60)..(390): Homolog of NCBI NO: 17232742 NR Description: hypothetical protein [Nostoc sp. PCC 7120]
  misc_feature (60)..(390): Homolog of NCBI NO: 23127437 NR Description: hypothetical protein [Nostoc punctiforme]
  misc_feature (48)..(434): Homolog of NCBI NO: 37534826 NR Description: unknown protein [Oryza sativa (japonica
  misc_feature (1)..(434): Homolog of NCBI NO: 18396920 NR Description: expressed protein
  misc_feature (1)..(434): Homolog of NCBI NO: 15241839 NR Description: putative protein; protein id: At5g28500.1
  misc_feature (67)..(353): Homolog of NCBI NO: 37521728 NR Description: hypothetical protein glr2159 [Gloeobacter
  misc_feature (74)..(433): Homolog of NCBI NO: 22299309 NR Description: ORF_ID:tlr1766~hypothetical protein
  misc_feature (67)..(385): Homolog of NCBI NO: 16331838 NR Description: unknown protein [Synechocystis sp. PCC 6803]
  misc_feature (72)..(391): Homolog of NCBI NO: 23042669 NR Description: hypothetical protein [Trichodesmium erythraeum
  misc_feature (60)..(390): Homolog of NCBI NO: 17232742 NR Description: hypothetical protein [Nostoc sp. PCC 7120]
  misc_feature (60)..(390): Homolog of NCBI NO: 23127437 NR Description: hypothetical protein [Nostoc punctiforme]
  misc_feature (48)..(434): Homolog of NCBI NO: 37534826 NR Description: unknown protein [Oryza sativa (japonica
  misc_feature (1)..(434): Homolog of NCBI NO: 18396920 NR Description: expressed protein
  misc_feature (1)..(434): Homolog of NCBI NO: 15241839 NR Description: putative protein; protein id: At5g28500.1

SEQ ID NO: 49496 - protein, 220 aa, Arabidopsis thaliana; identical to SEQ ID NO: 44991
  peptide (1)..(220): Ceres Seq. ID no. 12600284
  misc_feature (1)..(139): Homolog of NCBI NO: 37521728 NR Description: hypothetical protein glr2159 [Gloeobacter
  misc_feature (1)..(219): Homolog of NCBI NO: 22299309 NR Description: ORF_ID:tlr1766~hypothetical protein
  misc_feature (1)..(171): Homolog of NCBI NO: 16331838 NR Description: unknown protein [Synechocystis sp. PCC 6803]
  misc_feature (1)..(177): Homolog of NCBI NO: 23042669 NR Description: hypothetical protein [Trichodesmium erythraeum
  misc_feature (1)..(176): Homolog of NCBI NO: 17232742 NR Description: hypothetical protein [Nostoc sp. PCC 7120]
  misc_feature (1)..(176): Homolog of NCBI NO: 23127437 NR Description: hypothetical protein [Nostoc punctiforme]
  misc_feature (1)..(220): Homolog of NCBI NO: 37534826 NR Description: unknown protein [Oryza sativa (japonica
  misc_feature (1)..(220): Homolog of NCBI NO: 18396920 NR Description: expressed protein
  misc_feature (1)..(220): Homolog of NCBI NO: 15241839 NR Description: putative protein; protein id: At5g28500.1
  misc_feature (1)..(139): Homolog of NCBI NO: 37521728 NR Description: hypothetical protein glr2159 [Gloeobacter
  misc_feature (1)..(219): Homolog of NCBI NO: 22299309 NR Description: ORF_ID:tlr1766~hypothetical protein
  misc_feature (1)..(171): Homolog of NCBI NO: 16331838 NR Description: unknown protein [Synechocystis sp. PCC 6803]
  misc_feature (1)..(177): Homolog of NCBI NO: 23042669 NR Description: hypothetical protein [Trichodesmium erythraeum
  misc_feature (1)..(176): Homolog of NCBI NO: 17232742 NR Description: hypothetical protein [Nostoc sp. PCC 7120]
  misc_feature (1)..(176): Homolog of NCBI NO: 23127437 NR Description: hypothetical protein [Nostoc punctiforme]
  misc_feature (1)..(220): Homolog of NCBI NO: 37534826 NR Description: unknown protein [Oryza sativa (japonica
  misc_feature (1)..(220): Homolog of NCBI NO: 18396920 NR Description: expressed protein
  misc_feature (1)..(220): Homolog of NCBI NO: 15241839 NR Description: putative protein; protein id: At5g28500.1

SEQ ID NO: 49497 - DNA, 1501 bp, Arabidopsis thaliana
  misc_feature (1)..(1501): Ceres Seq. ID no. 13588790
  misc_feature: MA Experiment ID: 20000307 Result: Down-regulated in Transcription
  misc_feature: MA Experiment 20000307 PARAMETER Experiment Name: At_Germinating_Seeds_Sub_P Parameter: Age (hr) Value: 24 vs. 0
  misc_feature: MA Experiment 20000307 PARAMETER Experiment Name: At_Germinating_Seeds_Sub_P Parameter: Organism Value: A. thaliana
  misc_feature: MA Experiment 20000307 PARAMETER Experiment Name: At_Germinating_Seeds_Sub_P Parameter: Plant Line Value: WS
  misc_feature: MA Experiment 20000307 PARAMETER Experiment Name: At_Germinating_Seeds_Sub_P Parameter: Tissue Value: Germinating Seeds
  misc_feature: MA Experiment ID: 20000328 Result: Up-regulated in Transcription
  misc_feature: MA Experiment 20000328 PARAMETER Experiment Name: At_42deg_Heat_Sub_P Parameter: Age (day) Value: 14
  misc_feature: MA Experiment 20000328 PARAMETER Experiment Name: At_42deg_Heat_Sub_P Parameter: Organism Value: A. thaliana
  misc_feature: MA Experiment 20000328 PARAMETER Experiment Name: At_42deg_Heat_Sub_P Parameter: Plant Line Value: WS
  misc_feature: MA Experiment 20000328 PARAMETER Experiment Name: At_42deg_Heat_Sub_P Parameter: Temperature (deg C) Value: 42 vs. 22
  misc_feature: MA Experiment 20000328 PARAMETER Experiment Name: At_42deg_Heat_Sub_P Parameter: Timepoint (hr) Value: 6
  misc_feature: MA Experiment 20000328 PARAMETER Experiment Name: At_42deg_Heat_Sub_P Parameter: Tissue Value: Aerial
  misc_feature: MA Experiment ID: 20000347 Result: Up-regulated in Transcription
  misc_feature: MA Experiment 20000347 PARAMETER Experiment Name: At_2mM_SA_Sub_P Parameter: Age (day) Value: 14
  misc_feature: MA Experiment 20000347 PARAMETER Experiment Name: At_2mM_SA_Sub_P Parameter: Organism Value: A. thaliana
  misc_feature: MA Experiment 20000347 PARAMETER Experiment Name: At_2mM_SA_Sub_P Parameter: Plant Line Value: WS
  misc_feature: MA Experiment 20000347 PARAMETER Experiment Name: At_2mM_SA_Sub_P Parameter: Timepoint (hr) Value: 6
  misc_feature: MA Experiment 20000347 PARAMETER Experiment Name: At_2mM_SA_Sub_P Parameter: Tissue Value: Aerial
  misc_feature: MA Experiment 20000347 PARAMETER Experiment Name: At_2mM_SA_Sub_P Parameter: Treatment Value: 2mM SA vs. No Treatment
gaatccttttcacattttccgctcaattcgatcttacatgttaacaatggttggtctaactccagctgaggatcgttcagagattgcctttttcgacgtcgagacgacaattccgttccgagttggtcaggggtacgcgattctggagtttggatcgattctggtttgccccaagaagcttgtggagctgaaaaactactctgttctggttcgtcctgctaatctcaacctcatcacgcctcggtccgtgaagtgcaacggcatcaaacgcgaagacgtcgaatcagctcttacctttgcagatatcgccgacaccgtctacgatattctccatggaaggatatgggcaggtcataacatattgaagttcgattgtccaaggataagagaagcatttgctgagattggacgagatccaccagagccaaagggcaccattgactccttggctttgcttactcaaaggtttgggagaagagctggtgatatgaagatggcgactttggctacatactttggacttggaaaccagacgcataggagtctggacgatgtaaggatgaacttcgaggttctcaagtattgtgccactgttttgttcttggagtcaagtcttccagatgaacttatagagaactcggttactactactactcctgaaactagttcaagaaggcgtaggactataaaaaaatctcctctgcaatctcccactgatcagcagacaggagagaacatgacaactatacctattttatcatttgtttcatccgcagaagctcaaacggatccatttgatatgagcactttgaggaacgaaatagcccctgaagttcttcaatcagatgttcccatggaagaagaacaaaatcagcagtctgagactgttgcctctgaaggtaccggtgaccaggaaggattcatggagctagataaaatatctgtttcaagtatcagagcaactcatgtcccgctatatgacgggagccaaacaatgaagctgcaactcttccttggggacagaccccttcagctccattgtcctcgtctgaaagtacggtttggaatcaatgggaaatttatggataaagctggaagacggaggttgaactttgtaattgatctgtatccaagtctctgcaacgtacttcaagaatgcgacagtgctgcacagacaatatctgttgattcaggcagtggttctgactggaaccctctagtcattccaatgaaaggatttctgaactgtcccactgcaaggatacatatacccacagagttaaatggagatatagatcggtacgcagctgagatacaccagaaagagttctctggagctactgctactcagaaactcatttctagcaaccccaaggctgaagagattgagtctttgttgaatccgagaactgttcttgacgctttcttgtctctggagccatatgattatcagcagagagccggaatccgtctagttgctagaaagcttgttatacattag

SEQ ID NO: 49498 - protein, 499 aa, Arabidopsis thaliana
  peptide (1)..(499): Ceres Seq. ID no. 13588791
  misc_feature (208)..(498): Homolog of NCBI NO: 15221225 NR Description: exonuclease protein family [Arabidopsis thaliana]
  misc_feature (25)..(250): Homolog of NCBI NO: 9945064 NR Description: similar to Arabidopsis chromosome BAC genomics
  misc_feature (26)..(229): Homolog of NCBI NO: 15236050 NR Description: exonuclease protein family [Arabidopsis thaliana]
  misc_feature (23)..(267): Homolog of NCBI NO: 15221225 NR Description: exonuclease protein family [Arabidopsis thaliana]
  misc_feature (23)..(206): Homolog of NCBI NO: 37534220 NR Description: putative exonuclease [Oryza sativa (japonica
  misc_feature (310)..(499): Homolog of NCBI NO: 37534220 NR Description: putative exonuclease [Oryza sativa (japonica
  misc_feature (18)..(498): Homolog of NCBI NO: 37534222 NR Description: putative exonuclease [Oryza sativa (japonica
  misc_feature (23)..(498): Homolog of NCBI NO: 15240840 NR Description: exonuclease protein family [Arabidopsis thaliana]
  misc_feature (16)..(499): Homolog of NCBI NO: 9757860 NR Description: exonuclease-like protein [Arabidopsis thaliana]
  misc_feature (16)..(499): Homolog of NCBI NO: 30697522 NR Description: exonuclease protein family [Arabidopsis thaliana]
NPFHIFRSIRSYMLTMVGLTPAEDRSEIAFFDVETTIPFRVGQGYAILEFGSILVCPKKLVELKNYSVLVRPANLNLITPRSVKCNGIKREDVESALTFADIADTVYDILHGRIWAGHNILKFDCPRIREAFAEIGRDPPEPKGTIDSLALLTQRFGRRAGDMKMATLATYFGLGNQTHRSLDDVRMNFEVLKYCATVLFLESSLPDELIENSVTTTTPETSSRRRRTIKKSPLQSPTDQQTGENMTTIPILSFVSSAEAQTDPFDMSTLRNEIAPEVLQSDVPMEEEQNQQSETVASEGTGDQEGFMELDKISVSSIRATHVPLYDGSQTMKLQLFLGDRPLQLHCPRLKVRFGINGKFMDKAGRRRLNFVIDLYPSLCNVLQECDSAAQTISVDSGSGSDWNPLVIPMKGFLNCPTARIHIPTELNGDIDRYAAEIHQKEFSGATATQKLISSNPKAEEIESLLNPRTVLDAFLSLEPYDYQQRAGIRLVARKLVIH

SEQ ID NO: 49499 - protein, 487 aa, Arabidopsis thaliana
  peptide (1)..(487): Ceres Seq. ID no. 13588792
  misc_feature (196)..(486): Homolog of NCBI NO: 15221225 NR Description: exonuclease protein family [Arabidopsis thaliana]
  misc_feature (13)..(238): Homolog of NCBI NO: 9945064 NR Description: similar to Arabidopsis chromosome BAC genomics
  misc_feature (14)..(217): Homolog of NCBI NO: 15236050 NR Description: exonuclease protein family [Arabidopsis thaliana]
  misc_feature (11)..(255): Homolog of NCBI NO: 15221225 NR Description: exonuclease protein family [Arabidopsis thaliana]
  misc_feature (11)..(194): Homolog of NCBI NO: 37534220 NR Description: putative exonuclease [Oryza sativa (japonica
  misc_feature (298)..(487): Homolog of NCBI NO: 37534220 NR Description: putative exonuclease [Oryza sativa (japonica
  misc_feature (6)..(486): Homolog of NCBI NO: 37534222 NR Description: putative exonuclease [Oryza sativa (japonica
  misc_feature (11)..(486): Homolog of NCBI NO: 15240840 NR Description: exonuclease protein family [Arabidopsis thaliana]
  misc_feature (4)..(487): Homolog of NCBI NO: 9757860 NR Description: exonuclease-like protein [Arabidopsis thaliana]
  misc_feature (4)..(487): Homolog of NCBI NO: 30697522 NR Description: exonuclease protein family [Arabidopsis thaliana]
MLTMVGLTPAEDRSEIAFFDVETTIPFRVGQGYAILEFGSILVCPKKLVELKNYSVLVRPANLNLITPRSVKCNGIKREDVESALTFADIADTVYDILHGRIWAGHNILKFDCPRIREAFAEIGRDPPEPKGTIDSLALLTQRFGRRAGDMKMATLATYFGLGNQTHRSLDDVRMNFEVLKYCATVLFLESSLPDELIENSVTTTTPETSSRRRRTIKKSPLQSPTDQQTGENMTTIPILSFVSSAEAQTDPFDMSTLRNEIAPEVLQSDVPMEEEQNQQSETVASEGTGDQEGFMELDKISVSSIRATHVPLYDGSQTMKLQLFLGDRPLQLHCPRLKVRFGINGKFMDKAGRRRLNFVIDLYPSLCNVLQECDSAAQTISVDSGSGSDWNPLVIPMKGFLNCPTARIHIPTELNGDIDRYAAEIHQKEFSGATATQKLISSNPKAEEIESLLNPRTVLDAFLSLEPYDYQQRAGIRLVARKLVIH

SEQ ID NO: 49500 - protein, 484 aa, Arabidopsis thaliana
  peptide (1)..(484): Ceres Seq. ID no. 13588793
  misc_feature (193)..(483): Homolog of NCBI NO: 15221225 NR Description: exonuclease protein family [Arabidopsis thaliana]
  misc_feature (10)..(235): Homolog of NCBI NO: 9945064 NR Description: similar to Arabidopsis chromosome BAC genomics
  misc_feature (11)..(214): Homolog of NCBI NO: 15236050 NR Description: exonuclease protein family [Arabidopsis thaliana]
  misc_feature (8)..(252): Homolog of NCBI NO: 15221225 NR Description: exonuclease protein family [Arabidopsis thaliana]
  misc_feature (8)..(191): Homolog of NCBI NO: 37534220 NR Description: putative exonuclease [Oryza sativa (japonica
  misc_feature (295)..(484): Homolog of NCBI NO: 37534220 NR Description: putative exonuclease [Oryza sativa (japonica
  misc_feature (3)..(483): Homolog of NCBI NO: 37534222 NR Description: putative exonuclease [Oryza sativa (japonica
  misc_feature (8)..(483): Homolog of NCBI NO: 15240840 NR Description: exonuclease protein family [Arabidopsis thaliana]
  misc_feature (1)..(484): Homolog of NCBI NO: 9757860 NR Description: exonuclease-like protein [Arabidopsis thaliana]
  misc_feature (1)..(484): Homolog of NCBI NO: 30697522 NR Description: exonuclease protein family [Arabidopsis thaliana]
MVGLTPAEDRSEIAFFDVETTIPFRVGQGYAILEFGSILVCPKKLVELKNYSVLVRPANLNLITPRSVKCNGIKREDVESALTFADIADTVYDILHGRIWAGHNILKFDCPRIREAFAEIGRDPPEPKGTIDSLALLTQRFGRRAGDMKMATLATYFGLGNQTHRSLDDVRMNFEVLKYCATVLFLESSLPDELIENSVTTTTPETSSRRRRTIKKSPLQSPTDQQTGENMTTIPILSFVSSAEAQTDPFDMSTLRNEIAPEVLQSDVPMEEEQNQQSETVASEGTGDQEGFMELDKISVSSIRATHVPLYDGSQTMKLQLFLGDRPLQLHCPRLKVRFGINGKFMDKAGRRRLNFVIDLYPSLCNVLQECDSAAQTISVDSGSGSDWNPLVIPMKGFLNCPTARIHIPTELNGDIDRYAAEIHQKEFSGATATQKLISSNPKAEEIESLLNPRTVLDAFLSLEPYDYQQRAGIRLVARKLVIH

SEQ ID NO: 49501 - DNA, 748 bp, Arabidopsis thaliana; identical to SEQ ID NO: 44404
  misc_feature (1)..(748): Ceres Seq. ID no. 13502510
  misc_feature: MA Experiment ID: 20000173 Result: Down-regulated in Transcription
  misc_feature: MA Experiment 20000173 PARAMETER Experiment Name: At_42deg_Heat_P Parameter: Age (day) Value: 14
  misc_feature: MA Experiment 20000173 PARAMETER Experiment Name: At_42deg_Heat_P Parameter: Organism Value: A. thaliana
  misc_feature: MA Experiment 20000173 PARAMETER Experiment Name: At_42deg_Heat_P Parameter: Plant Line Value: WS
  misc_feature: MA Experiment 20000173 PARAMETER Experiment Name: At_42deg_Heat_P Parameter: Temperature (deg C) Value: 42 vs. 22
  misc_feature: MA Experiment 20000173 PARAMETER Experiment Name: At_42deg_Heat_P Parameter: Timepoint (hr) Value: 6
  misc_feature: MA Experiment 20000173 PARAMETER Experiment Name: At_42deg_Heat_P Parameter: Tissue Value: Aerial
  misc_feature: MA Experiment ID: 20000184 Result: Down-regulated in Transcription
  misc_feature: MA Experiment 20000184 PARAMETER Experiment Name: At_Shoots__P Parameter: Age (day) Value: 7
  misc_feature: MA Experiment 20000184 PARAMETER Experiment Name: At_Shoots__P Parameter: Tissue Value: Shoots vs. Whole Plant
  misc_feature: MA Experiment ID: 20000227 Result: Down-regulated in Transcription
  misc_feature: MA Experiment 20000227 PARAMETER Experiment Name: At_Root-Tips-vs-Tops_P Parameter: Tissue Value: Root Tips vs. Root Tops
  misc_feature: MA Experiment ID: 20000234 Result: Down-regulated in Transcription
  misc_feature: MA Experiment 20000234 PARAMETER Experiment Name: At_Siliques_P Parameter: Age (day) Value: 21
  misc_feature: MA Experiment 20000234 PARAMETER Experiment Name: At_Siliques_P Parameter: Organism Value: A. thaliana
  misc_feature: MA Experiment 20000234 PARAMETER Experiment Name: At_Siliques_P Parameter: Plant Line Value: WS
  misc_feature: MA Experiment 20000234 PARAMETER Experiment Name: At_Siliques_P Parameter: Tissue Value: Less Than 5mm Siliques vs. Whole Plant
  misc_feature: MA Experiment ID: 20000235 Result: Down-regulated in Transcription
  misc_feature: MA Experiment 20000235 PARAMETER Experiment Name: At_Siliques_P Parameter: Age (day) Value: 21
  misc_feature: MA Experiment 20000235 PARAMETER Experiment Name: At_Siliques_P Parameter: Organism Value: A. thaliana
  misc_feature: MA Experiment 20000235 PARAMETER Experiment Name: At_Siliques_P Parameter: Plant Line Value: WS
  misc_feature: MA Experiment 20000235 PARAMETER Experiment Name: At_Siliques_P Parameter: Tissue Value: 5-10mm Siliques vs. Whole Plant
  misc_feature: MA Experiment ID: 20000438 Result: Down-regulated in Transcription
  misc_feature: MA Experiment 20000438 PARAMETER Experiment Name: At_Shoots__P Parameter: Age (day) Value: 14
  misc_feature: MA Experiment 20000438 PARAMETER Experiment Name: At_Shoots__P Parameter: Tissue Value: Shoots vs. Whole Plant
  misc_feature: MA Experiment ID: 20000495 Result: Down-regulated in Transcription
  misc_feature: MA Experiment 20000495 PARAMETER Experiment Name: At_Guard_Cells_P Parameter: Harvest Date Value: 8/2/2002
  misc_feature: MA Experiment 20000495 PARAMETER Experiment Name: At_Guard_Cells_P Parameter: Organism Value: A. thaliana
  misc_feature: MA Experiment 20000495 PARAMETER Experiment Name: At_Guard_Cells_P Parameter: Tissue Value: Guard Cells vs. Leaves
  misc_feature: MA Experiment ID: 20000496 Result: Down-regulated in Transcription
  misc_feature: MA Experiment 20000496 PARAMETER Experiment Name: At_Guard_Cells_P Parameter: Harvest Date Value: 7/19/2002
  misc_feature: MA Experiment 20000496 PARAMETER Experiment Name: At_Guard_Cells_P Parameter: Organism Value: Canola
  misc_feature: MA Experiment 20000496 PARAMETER Experiment Name: At_Guard_Cells_P Parameter: Tissue Value: Guard Cells vs. Leaves
  misc_feature: MA Experiment ID: 20001557 Result: Down-regulated in Transcription
  misc_feature: MA Experiment 20001557 PARAMETER Experiment Name: At_Drought_Soil_Dry_P Parameter: Age (day) Value: 27
  misc_feature: MA Experiment 20001557 PARAMETER Experiment Name: At_Drought_Soil_Dry_P Parameter: Organism Value: A. thaliana
  misc_feature: MA Experiment 20001557 PARAMETER Experiment Name: At_Drought_Soil_Dry_P Parameter: Plant Line Value: WS
  misc_feature: MA Experiment 20001557 PARAMETER Experiment Name: At_Drought_Soil_Dry_P Parameter: Post Timepoint (hr) Value: 3
  misc_feature: MA Experiment 20001557 PARAMETER Experiment Name: At_Drought_Soil_Dry_P Parameter: Post-Treatment Value: Re-Water vs. No Drought
  misc_feature: MA Experiment 20001557 PARAMETER Experiment Name: At_Drought_Soil_Dry_P Parameter: Timepoint (day) Value: 13
  misc_feature: MA Experiment 20001557 PARAMETER Experiment Name: At_Drought_Soil_Dry_P Parameter: Treatment Value: Drought vs. No Drought
  misc_feature: MA Experiment ID: 20001558 Result: Down-regulated in Transcription
  misc_feature: MA Experiment 20001558 PARAMETER Experiment Name: At_Drought_Soil_Dry_P Parameter: Age (day) Value: 27
  misc_feature: MA Experiment 20001558 PARAMETER Experiment Name: At_Drought_Soil_Dry_P Parameter: Organism Value: A. thaliana
  misc_feature: MA Experiment 20001558 PARAMETER Experiment Name: At_Drought_Soil_Dry_P Parameter: Plant Line Value: WS
  misc_feature: MA Experiment 20001558 PARAMETER Experiment Name: At_Drought_Soil_Dry_P Parameter: Post Timepoint (hr) Value: 6
  misc_feature: MA Experiment 20001558 PARAMETER Experiment Name: At_Drought_Soil_Dry_P Parameter: Post-Treatment Value: Re-Water vs. No Drought
  misc_feature: MA Experiment 20001558 PARAMETER Experiment Name: At_Drought_Soil_Dry_P Parameter: Timepoint (day) Value: 13
  misc_feature: MA Experiment 20001558 PARAMETER Experiment Name: At_Drought_Soil_Dry_P Parameter: Treatment Value: Drought vs. No Drought
  misc_feature: MA Experiment ID: 20001560 Result: Down-regulated in Transcription
  misc_feature: MA Experiment 20001560 PARAMETER Experiment Name: At_Drought_Soil_Dry_P Parameter: Age (day) Value: 28
  misc_feature: MA Experiment 20001560 PARAMETER Experiment Name: At_Drought_Soil_Dry_P Parameter: Organism Value: A. thaliana
  misc_feature: MA Experiment 20001560 PARAMETER Experiment Name: At_Drought_Soil_Dry_P Parameter: Plant Line Value: WS
  misc_feature: MA Experiment 20001560 PARAMETER Experiment Name: At_Drought_Soil_Dry_P Parameter: Post Timepoint (hr) Value: None
  misc_feature: MA Experiment 20001560 PARAMETER Experiment Name: At_Drought_Soil_Dry_P Parameter: Post-Treatment Value: None
  misc_feature: MA Experiment 20001560 PARAMETER Experiment Name: At_Drought_Soil_Dry_P Parameter: Timepoint (day) Value: 14
  misc_feature: MA Experiment 20001560 PARAMETER Experiment Name: At_Drought_Soil_Dry_P Parameter: Treatment Value: Drought vs. No Drought
  misc_feature: MA Experiment ID: 20001905 Result: Down-regulated in Transcription
  misc_feature: MA Experiment 20001905 PARAMETER Experiment Name: At_Drought_Reproduction_P Parameter: Age (day) Value: 40
  misc_feature: MA Experiment 20001905 PARAMETER Experiment Name: At_Drought_Reproduction_P Parameter: Organism Value: A. thaliana
  misc_feature: MA Experiment 20001905 PARAMETER Experiment Name: At_Drought_Reproduction_P Parameter: Plant Line Value: WS
  misc_feature: MA Experiment 20001905 PARAMETER Experiment Name: At_Drought_Reproduction_P Parameter: Timepoint (day) Value: 10
  misc_feature: MA Experiment 20001905 PARAMETER Experiment Name: At_Drought_Reproduction_P Parameter: Tissue Value: Rosettes
  misc_feature: MA Experiment 20001905 PARAMETER Experiment Name: At_Drought_Reproduction_P Parameter: Treatment Value: Drought vs. No Drought

SEQ ID NO: 49502 - protein, 163 aa, Arabidopsis thaliana; identical to SEQ ID NO: 44405
  peptide (1)..(163): Ceres Seq. ID no. 13502511
  misc_feature (6)..(160): Pfam Name: Universal stress protein family Pfam Description: Universal stress protein family
  misc_feature (6)..(160): Pfam Name: Universal stress protein family Pfam Description: Universal stress protein family
  misc_feature (2)..(160): Homolog of NCBI NO: 40539010 NR Description: putative stress-related protein
  misc_feature (7)..(138): Homolog of NCBI NO: 18396497 NR Description: expressed protein [Arabidopsis thaliana]
  misc_feature (7)..(160): Homolog of NCBI NO: 11602749 NR Description: early nodulin ENOD18 [Vicia faba]
  misc_feature (7)..(160): Homolog of NCBI NO: 11602751 NR Description: ENOD18 protein [Vicia faba]
  misc_feature (7)..(160): Homolog of NCBI NO: 11602747 NR Description: early nodulin ENOD18 [Vicia faba]
  misc_feature (2)..(160): Homolog of NCBI NO: 40539010 NR Description: putative stress-related protein
  misc_feature (7)..(160): Homolog of NCBI NO: 11602749 NR Description: early nodulin ENOD18 [Vicia faba]
  misc_feature (7)..(160): Homolog of NCBI NO: 11602747 NR Description: early nodulin ENOD18 [Vicia faba]
  misc_feature (1)..(163): Homolog of NCBI NO: 18401345 NR Description: expressed protein [Arabidopsis thaliana]
  misc_feature (5)..(163): Homolog of NCBI NO: 15528707 NR Description: P0583G08.8 [Oryza sativa (japonica
  misc_feature (1)..(161): Homolog of NCBI NO: 20160561 NR Description: P0414E03.3 [Oryza sativa (japonica
  misc_feature (7)..(162): Homolog of NCBI NO: 30678807 NR Description: expressed protein [Arabidopsis thaliana]
  misc_feature (7)..(160): Homolog of NCBI NO: 30693971 NR Description: expressed protein [Arabidopsis thaliana]
  misc_feature (7)..(160): Homolog of NCBI NO: 11602751 NR Description: ENOD18 protein [Vicia faba]
  misc_feature (7)..(138): Homolog of NCBI NO: 18396497 NR Description: expressed protein [Arabidopsis thaliana]
  misc_feature (7)..(160): Homolog of NCBI NO: 30693971 NR Description: expressed protein [Arabidopsis thaliana]
  misc_feature (7)..(162): Homolog of NCBI NO: 30678807 NR Description: expressed protein [Arabidopsis thaliana]
  misc_feature (1)..(161): Homolog of NCBI NO: 20160561 NR Description: P0414E03.3 [Oryza sativa (japonica
  misc_feature (5)..(163): Homolog of NCBI NO: 15528707 NR Description: P0583G08.8 [Oryza sativa (japonica
  misc_feature (1)..(163): Homolog of NCBI NO: 18401345 NR Description: expressed protein [Arabidopsis thaliana]

SEQ ID NO: 49503 - protein, 118 aa, Arabidopsis thaliana; identical to SEQ ID NO: 44406
  peptide (1)..(118): Ceres Seq. ID no. 13502512
  misc_feature (1)..(115): Pfam Name: Universal stress protein family Pfam Description: Universal stress protein family
  misc_feature (1)..(115): Pfam Name: Universal stress protein family Pfam Description: Universal stress protein family
  misc_feature (1)..(115): Homolog of NCBI NO: 40539010 NR Description: putative stress-related protein
  misc_feature (1)..(93): Homolog of NCBI NO: 18396497 NR Description: expressed protein [Arabidopsis thaliana]
  misc_feature (1)..(115): Homolog of NCBI NO: 11602749 NR Description: early nodulin ENOD18 [Vicia faba]
  misc_feature (1)..(115): Homolog of NCBI NO: 11602751 NR Description: ENOD18 protein [Vicia faba]
  misc_feature (1)..(115): Homolog of NCBI NO: 11602747 NR Description: early nodulin ENOD18 [Vicia faba]
  misc_feature (1)..(115): Homolog of NCBI NO: 40539010 NR Description: putative stress-related protein
  misc_feature (1)..(115): Homolog of NCBI NO: 11602749 NR Description: early nodulin ENOD18 [Vicia faba]
  misc_feature (1)..(115): Homolog of NCBI NO: 11602747 NR Description: early nodulin ENOD18 [Vicia faba]
  misc_feature (1)..(118): Homolog of NCBI NO: 18401345 NR Description: expressed protein [Arabidopsis thaliana]
  misc_feature (1)..(118): Homolog of NCBI NO: 15528707 NR Description: P0583G08.8 [Oryza sativa (japonica
  misc_feature (1)..(116): Homolog of NCBI NO: 20160561 NR Description: P0414E03.3 [Oryza sativa (japonica
  misc_feature (1)..(117): Homolog of NCBI NO: 30678807 NR Description: expressed protein [Arabidopsis thaliana]
  misc_feature (1)..(115): Homolog of NCBI NO: 30693971 NR Description: expressed protein [Arabidopsis thaliana]
  misc_feature (1)..(115): Homolog of NCBI NO: 11602751 NR Description: ENOD18 protein [Vicia faba]
  misc_feature (1)..(93): Homolog of NCBI NO: 18396497 NR Description: expressed protein [Arabidopsis thaliana]
  misc_feature (1)..(115): Homolog of NCBI NO: 30693971 NR Description: expressed protein [Arabidopsis thaliana]
  misc_feature (1)..(117): Homolog of NCBI NO: 30678807 NR Description: expressed protein [Arabidopsis thaliana]
  misc_feature (1)..(116): Homolog of NCBI NO: 20160561 NR Description: P0414E03.3 [Oryza sativa (japonica
  misc_feature (1)..(118): Homolog of NCBI NO: 15528707 NR Description: P0583G08.8 [Oryza sativa (japonica
  misc_feature (1)..(118): Homolog of NCBI NO: 18401345 NR Description: expressed protein [Arabidopsis thaliana]

SEQ ID NO: 49504 - protein, 111 aa, Arabidopsis thaliana; identical to SEQ ID NO: 44407
  peptide (1)..(111): Ceres Seq. ID no. 13502513
  misc_feature (1)..(108): Pfam Name: Universal stress protein family Pfam Description: Universal stress protein family
  misc_feature (1)..(108): Pfam Name: Universal stress protein family Pfam Description: Universal stress protein family
  misc_feature (1)..(108): Homolog of NCBI NO: 40539010 NR Description: putative stress-related protein
  misc_feature (1)..(86): Homolog of NCBI NO: 18396497 NR Description: expressed protein [Arabidopsis thaliana]
  misc_feature (1)..(108): Homolog of NCBI NO: 11602749 NR Description: early nodulin ENOD18 [Vicia faba]
  misc_feature (1)..(108): Homolog of NCBI NO: 11602751 NR Description: ENOD18 protein [Vicia faba]
  misc_feature (1)..(108): Homolog of NCBI NO: 11602747 NR Description: early nodulin ENOD18 [Vicia faba]
  misc_feature (1)..(108): Homolog of NCBI NO: 40539010 NR Description: putative stress-related protein
  misc_feature (1)..(108): Homolog of NCBI NO: 11602749 NR Description: early nodulin ENOD18 [Vicia faba]
  misc_feature (1)..(108): Homolog of NCBI NO: 11602747 NR Description: early nodulin ENOD18 [Vicia faba]
  misc_feature (1)..(111): Homolog of NCBI NO: 18401345 NR Description: expressed protein [Arabidopsis thaliana]
  misc_feature (1)..(111): Homolog of NCBI NO: 15528707 NR Description: P0583G08.8 [Oryza sativa (japonica
  misc_feature (1)..(109): Homolog of NCBI NO: 20160561 NR Description: P0414E03.3 [Oryza sativa (japonica
  misc_feature (1)..(110): Homolog of NCBI NO: 30678807 NR Description: expressed protein [Arabidopsis thaliana]
  misc_feature (1)..(108): Homolog of NCBI NO: 30693971 NR Description: expressed protein [Arabidopsis thaliana]
  misc_feature (1)..(108): Homolog of NCBI NO: 11602751 NR Description: ENOD18 protein [Vicia faba]
  misc_feature (1)..(86): Homolog of NCBI NO: 18396497 NR Description: expressed protein [Arabidopsis thaliana]
  misc_feature (1)..(108): Homolog of NCBI NO: 30693971 NR Description: expressed protein [Arabidopsis thaliana]
  misc_feature (1)..(110): Homolog of NCBI NO: 30678807 NR Description: expressed protein [Arabidopsis thaliana]
  misc_feature (1)..(109): Homolog of NCBI NO: 20160561 NR Description: P0414E03.3 [Oryza sativa (japonica
  misc_feature (1)..(111): Homolog of NCBI NO: 15528707 NR Description: P0583G08.8 [Oryza sativa (japonica
  misc_feature (1)..(111): Homolog of NCBI NO: 18401345 NR Description: expressed protein [Arabidopsis thaliana]

SEQ ID NO: 49505 - DNA, 1812 bp, Arabidopsis thaliana
  misc_feature (1)..(1812): Ceres Seq. ID no. 13588016
  misc_feature: MA Experiment ID: 20000234 Result: Up-regulated in Transcription
  misc_feature: MA Experiment 20000234 PARAMETER Experiment Name: At_Siliques_P Parameter: Age (day) Value: 21
  misc_feature: MA Experiment 20000234 PARAMETER Experiment Name: At_Siliques_P Parameter: Organism Value: A. thaliana
  misc_feature: MA Experiment 20000234 PARAMETER Experiment Name: At_Siliques_P Parameter: Plant Line Value: WS
  misc_feature: MA Experiment 20000234 PARAMETER Experiment Name: At_Siliques_P Parameter: Tissue Value: Less Than 5mm Siliques vs. Whole Plant
  misc_feature: MA Experiment ID: 20000235 Result: Up-regulated in Transcription
  misc_feature: MA Experiment 20000235 PARAMETER Experiment Name: At_Siliques_P Parameter: Age (day) Value: 21
  misc_feature: MA Experiment 20000235 PARAMETER Experiment Name: At_Siliques_P Parameter: Organism Value: A. thaliana
  misc_feature: MA Experiment 20000235 PARAMETER Experiment Name: At_Siliques_P Parameter: Plant Line Value: WS
  misc_feature: MA Experiment 20000235 PARAMETER Experiment Name: At_Siliques_P Parameter: Tissue Value: 5-10mm Siliques vs. Whole Plant
  misc_feature: MA Experiment ID: 20001910 Result: Up-regulated in Transcription
  misc_feature: MA Experiment 20001910 PARAMETER Experiment Name: At_Drought_Reproduction_P Parameter: Age (day) Value: 37
  misc_feature: MA Experiment 20001910 PARAMETER Experiment Name: At_Drought_Reproduction_P Parameter: Organism Value: A. thaliana
  misc_feature: MA Experiment 20001910 PARAMETER Experiment Name: At_Drought_Reproduction_P Parameter: Plant Line Value: WS
  misc_feature: MA Experiment 20001910 PARAMETER Experiment Name: At_Drought_Reproduction_P Parameter: Timepoint (day) Value: 7
  misc_feature: MA Experiment 20001910 PARAMETER Experiment Name: At_Drought_Reproduction_P Parameter: Tissue Value: Flowers
  misc_feature: MA Experiment 20001910 PARAMETER Experiment Name: At_Drought_Reproduction_P Parameter: Treatment Value: Drought vs. No Drought
atgaagcttctactgttgctgcttgccttctgctgtctatctctatcaaggtgtgaagaacaatccgtcccttatgattactcggcaacaatagagacattttttttttttttttttttaatgttcattaagacatggtcatttgaaattctgattacattttttgtcttggtgcagtgtctagagaacccttataaaccacagtacaatggagggatcatcgtgaatcctgacttgcaaaatggttcacaaggctggtcacagtttggaaacgccaaagtcgatttcagagaatttggaggcaataagtttgttgttgccacacaaaggaatcaatcttctgacagcatctcgcagaaggtgtacttggaaaaaggaattctctacactttctctgcttggttacaagtgagcataggaaaatctcccgtgagcgctgttttcaagaagaatggtgaatataagcatgccggttcggttgttgctgaatccaaatgttggtccatgctgaaaggtggtctcactgttgatgaatctggtcctgctgaactcttcttcgagagcgagaacacaatggttgagatttgggttgatagcgtctctttgcaacctttcacacaagaagagtggaactctcaccacgaacagagcattggcaaagtaagaaaaggtaccgtgagaatcagagtcatgaataacaaaggcgagacgatacctaatgcaaccatatccatagaacagaagaaactcggatacccattcgggtgcgcggtagaaaacaacatacttgggaatcaagcataccaaaactggttcactcaaagatttaccgtgacaactttcgggaacgagatgaaatggtacagcacagaaagaataagagggcaagaggattactcgacagctgacgcgatgttaagtttcttcaagagccacgggattgctgtacgtgggcacaatgttttatgggatgatcctaagtaccaacctggatgggtgaattctctgtctggtaacgacctctacaacgctgtgaaacgaagggtttactcggttgtctcgcgatacaaaggacagcttttgggttgggatgttgtgaatgagaatcttcatttctccttctttgagagcaagttcggtcctaaagcctcttataacacctacacaatggcccatgccgtcgatccaaggacaccaatgttcatgaatgaatataatacgttagagcaacctaaggatttaacttctagtccagcaaggtatttgggaaagcttagggagcttcaatctattcgggttgccggaaagattccgttagcgataggtcttgagtctcatttcagcactcctaacattccgtatatgagatcagctcttgatacttttggtgccactggtttgcctatttggctcactgagattgacgttgatgcgcctcccaatgtccgggccaactatttcgagcaagttctaagggaaggccatgcacatccgaaagtgaatggaatggtgatgtggacaggttattctccatcaggttgctaccgaatgtgcctcaccgatggaaactttaagaacctacccactggagacgtcgtggacaagcttttacgtgaatggggagggcttcgcagccaaaccacaggtgtcactgatgctaatgggttatttgaagctccactctttcatggtgactatgatctccgtatatcccatcctctcaccaattcaaaggcttcttacaactttacgttgacttccgatgacgactcctcacagaaacaaccatctctatatgtctttcgtgtttga

SEQ ID NO: 49506 - protein, 603 aa, Arabidopsis thaliana
  peptide (1)..(603): Ceres Seq. ID no. 13588017
  misc_feature (242)..(537): Pfam Name: Glycosyl hydrolase family 10 Pfam Description: Glycosyl hydrolase family 10
  misc_feature (67)..(593): Homolog of NCBI NO: 37533260 NR Description: putative 1,4-beta-xylanase
  misc_feature (36)..(592): Homolog of NCBI NO: 40363757 NR Description: putative 1,4-beta-xylanase [Triticum aestivum]
  misc_feature (66)..(588): Homolog of NCBI NO: 37533262 NR Description: putative 1,4-beta-xylanase
  misc_feature (406)..(532): Homolog of NCBI NO: 22329142 NR Description: glycosyl hydrolase family 10 [Arabidopsis
  misc_feature (169)..(378): Homolog of NCBI NO: 22329142 NR Description: glycosyl hydrolase family 10 [Arabidopsis
  misc_feature (58)..(386): Homolog of NCBI NO: 7485620 NR Description: hypothetical protein F17I5.40 - Arabidopsis
  misc_feature (58)..(603): Homolog of NCBI NO: 23429644 NR Description: endoxylanase [Carica papaya]
  misc_feature (50)..(603): Homolog of NCBI NO: 15235134 NR Description: glycosyl hydrolase family 10 [Arabidopsis
  misc_feature (60)..(603): Homolog of NCBI NO: 15235131 NR Description: glycosyl hydrolase family 10 [Arabidopsis
  misc_feature (59)..(603): Homolog of NCBI NO: 7485619 NR Description: hypothetical protein F17I5.30 - Arabidopsis
MKLLLLLLAFCCLSLSRCEEQSVPYDYSATIETFFFFFFLMFIKTWSFEILITFFVLVQCLENPYKPQYNGGIIVNPDLQNGSQGWSQFGNAKVDFREFGGNKFVVATQRNQSSDSISQKVYLEKGILYTFSAWLQVSIGKSPVSAVFKKNGEYKHAGSVVAESKCWSMLKGGLTVDESGPAELFFESENTMVEIWVDSVSLQPFTQEEWNSHHEQSIGKVRKGTVRIRVMNNKGETIPNATISIEQKKLGYPFGCAVENNILGNQAYQNWFTQRFTVTTFGNEMKWYSTERIRGQEDYSTADAMLSFFKSHGIAVRGHNVLWDDPKYQPGWVNSLSGNDLYNAVKRRVYSVVSRYKGQLLGWDVVNENLHFSFFESKFGPKASYNTYTMAHAVDPRTPMFMNEYNTLEQPKDLTSSPARYLGKLRELQSIRVAGKIPLAIGLESHFSTPNIPYMRSALDTFGATGLPIWLTEIDVDAPPNVRANYFEQVLREGHAHPKVNGMVMWTGYSPSGCYRMCLTDGNFKNLPTGDVVDKLLREWGGLRSQTTGVTDANGLFEAPLFHGDYDLRISHPLTNSKASYNFTLTSDDDSSQKQPSLYVFRV

SEQ ID NO: 49507 - protein, 563 aa, Arabidopsis thaliana
  peptide (1)..(563): Ceres Seq. ID no. 13588018
  misc_feature (202)..(497): Pfam Name: Glycosyl hydrolase family 10 Pfam Description: Glycosyl hydrolase family 10
  misc_feature (27)..(553): Homolog of NCBI NO: 37533260 NR Description: putative 1,4-beta-xylanase
  misc_feature (1)..(552): Homolog of NCBI NO: 40363757 NR Description: putative 1,4-beta-xylanase [Triticum aestivum]
  misc_feature (26)..(548): Homolog of NCBI NO: 37533262 NR Description: putative 1,4-beta-xylanase
  misc_feature (366)..(492): Homolog of NCBI NO: 22329142 NR Description: glycosyl hydrolase family 10 [Arabidopsis
  misc_feature (129)..(338): Homolog of NCBI NO: 22329142 NR Description: glycosyl hydrolase family 10 [Arabidopsis
  misc_feature (18)..(346): Homolog of NCBI NO: 7485620 NR Description: hypothetical protein F17I5.40 - Arabidopsis
  misc_feature (18)..(563): Homolog of NCBI NO: 23429644 NR Description: endoxylanase [Carica papaya]
  misc_feature (10)..(563): Homolog of NCBI NO: 15235134 NR Description: glycosyl hydrolase family 10 [Arabidopsis
  misc_feature (20)..(563): Homolog of NCBI NO: 15235131 NR Description: glycosyl hydrolase family 10 [Arabidopsis
  misc_feature (19)..(563): Homolog of NCBI NO: 7485619 NR Description: hypothetical protein F17I5.30 - Arabidopsis
MFIKTWSFEILITFFVLVQCLENPYKPQYNGGIIVNPDLQNGSQGWSQFGNAKVDFREFGGNKFVVATQRNQSSDSISQKVYLEKGILYTFSAWLQVSIGKSPVSAVFKKNGEYKHAGSVVAESKCWSMLKGGLTVDESGPAELFFESENTMVEIWVDSVSLQPFTQEEWNSHHEQSIGKVRKGTVRIRVMNNKGETIPNATISIEQKKLGYPFGCAVENNILGNQAYQNWFTQRFTVTTFGNEMKWYSTERIRGQEDYSTADAMLSFFKSHGIAVRGHNVLWDDPKYQPGWVNSLSGNDLYNAVKRRVYSVVSRYKGQLLGWDVVNENLHFSFFESKFGPKASYNTYTMAHAVDPRTPMFMNEYNTLEQPKDLTSSPARYLGKLRELQSIRVAGKIPLAIGLESHFSTPNIPYMRSALDTFGATGLPIWLTEIDVDAPPNVRANYFEQVLREGHAHPKVNGMVMWTGYSPSGCYRMCLTDGNFKNLPTGDVVDKLLREWGGLRSQTTGVTDANGLFEAPLFHGDYDLRISHPLTNSKASYNFTLTSDDDSSQKQPSLYVFRV

SEQ ID NO: 49508 - protein, 435 aa, Arabidopsis thaliana
  peptide (1)..(435): Ceres Seq. ID no. 13588019
  misc_feature (74)..(369): Pfam Name: Glycosyl hydrolase family 10 Pfam Description: Glycosyl hydrolase family 10
  misc_feature (1)..(425): Homolog of NCBI NO: 37533260 NR Description: putative 1,4-beta-xylanase
  misc_feature (1)..(424): Homolog of NCBI NO: 40363757 NR Description: putative 1,4-beta-xylanase [Triticum aestivum]
  misc_feature (1)..(420): Homolog of NCBI NO: 37533262 NR Description: putative 1,4-beta-xylanase
  misc_feature (238)..(364): Homolog of NCBI NO: 22329142 NR Description: glycosyl hydrolase family 10 [Arabidopsis
  misc_feature (1)..(210): Homolog of NCBI NO: 22329142 NR Description: glycosyl hydrolase family 10 [Arabidopsis
  misc_feature (1)..(218): Homolog of NCBI NO: 7485620 NR Description: hypothetical protein F17I5.40 - Arabidopsis
  misc_feature (1)..(435): Homolog of NCBI NO: 23429644 NR Description: endoxylanase [Carica papaya]
  misc_feature (1)..(435): Homolog of NCBI NO: 15235134 NR Description: glycosyl hydrolase family 10 [Arabidopsis
  misc_feature (1)..(435): Homolog of NCBI NO: 15235131 NR Description: glycosyl hydrolase family 10 [Arabidopsis
  misc_feature (1)..(435): Homolog of NCBI NO: 7485619 NR Description: hypothetical protein F17I5.30 - Arabidopsis
MLKGGLTVDESGPAELFFESENTMVEIWVDSVSLQPFTQEEWNSHHEQSIGKVRKGTVRIRVMNNKGETIPNATISIEQKKLGYPFGCAVENNILGNQAYQNWFTQRFTVTTFGNEMKWYSTERIRGQEDYSTADAMLSFFKSHGIAVRGHNVLWDDPKYQPGWVNSLSGNDLYNAVKRRVYSVVSRYKGQLLGWDVVNENLHFSFFESKFGPKASYNTYTMAHAVDPRTPMFMNEYNTLEQPKDLTSSPARYLGKLRELQSIRVAGKIPLAIGLESHFSTPNIPYMRSALDTFGATGLPIWLTEIDVDAPPNVRANYFEQVLREGHAHPKVNGMVMWTGYSPSGCYRMCLTDGNFKNLPTGDVVDKLLREWGGLRSQTTGVTDANGLFEAPLFHGDYDLRISHPLTNSKASYNFTLTSDDDSSQKQPSLYVFRV

SEQ ID NO: 49509 - DNA, 959 bp, Arabidopsis thaliana
  misc_feature (1)..(959): Ceres Seq. ID no. 13593649
  misc_feature: MA Experiment ID: 20000185 Result: Down-regulated in Transcription
  misc_feature: MA Experiment 20000185 PARAMETER Experiment Name: At_Roots__P Parameter: Age (day) Value: 7 vs. 21
  misc_feature: MA Experiment 20000185 PARAMETER Experiment Name: At_Roots__P Parameter: Organism Value: A. thaliana
  misc_feature: MA Experiment 20000185 PARAMETER Experiment Name: At_Roots__P Parameter: Tissue Value: Roots vs. Whole Plant
  misc_feature: MA Experiment ID: 20000437 Result: Down-regulated in Transcription
  misc_feature: MA Experiment 20000437 PARAMETER Experiment Name: At_Drought_P Parameter: Age (day) Value: 8
  misc_feature: MA Experiment 20000437 PARAMETER Experiment Name: At_Drought_P Parameter: Organism Value: A. thaliana
  misc_feature: MA Experiment 20000437 PARAMETER Experiment Name: At_Drought_P Parameter: Plant Line Value: WS
  misc_feature: MA Experiment 20000437 PARAMETER Experiment Name: At_Drought_P Parameter: Timepoint (hr) Value: 24
  misc_feature: MA Experiment 20000437 PARAMETER Experiment Name: At_Drought_P Parameter: Tissue Value: Whole Plant
  misc_feature: MA Experiment 20000437 PARAMETER Experiment Name: At_Drought_P Parameter: Treatment Value: Drought vs. No Drought
  misc_feature: MA Experiment ID: 20000439 Result: Down-regulated in Transcription
  misc_feature: MA Experiment 20000439 PARAMETER Experiment Name: At_Roots__P Parameter: Age (day) Value: 14 vs. 21
  misc_feature: MA Experiment 20000439 PARAMETER Experiment Name: At_Roots__P Parameter: Organism Value: A. thaliana
  misc_feature: MA Experiment 20000439 PARAMETER Experiment Name: At_Roots__P Parameter: Tissue Value: Roots vs. Whole Plant
  misc_feature: MA Experiment ID: 20001905 Result: Down-regulated in Transcription
  misc_feature: MA Experiment 20001905 PARAMETER Experiment Name: At_Drought_Reproduction_P Parameter: Age (day) Value: 40
  misc_feature: MA Experiment 20001905 PARAMETER Experiment Name: At_Drought_Reproduction_P Parameter: Organism Value: A. thaliana
  misc_feature: MA Experiment 20001905 PARAMETER Experiment Name: At_Drought_Reproduction_P Parameter: Plant Line Value: WS
  misc_feature: MA Experiment 20001905 PARAMETER Experiment Name: At_Drought_Reproduction_P Parameter: Timepoint (day) Value: 10
  misc_feature: MA Experiment 20001905 PARAMETER Experiment Name: At_Drought_Reproduction_P Parameter: Tissue Value: Rosettes
  misc_feature: MA Experiment 20001905 PARAMETER Experiment Name: At_Drought_Reproduction_P Parameter: Treatment Value: Drought vs. No Drought
ggtgtttagcttcttcactaccacacagaaacagagtttccgtcyttcatcttcctccatatgcgycgctcttaaaaacctaattcacaatgtccgtcgttctcaacgccggcttcagttctccgcttcaaaacagatcacatcatgttatacagttaaagccttcgccttttgcgtcatacatatctctaaacagttcaagaaggtcactgttatgcaaaagaagattggttgtatcttgtttggatacaaatgacaattctgtcacaactacatccgtagattcttcttcttcttcagattctaataaaccagtaagtgaatcagttgaatcaagcaatggcactgccaaaaaagcaccattgacagcacgagagagactaagagcggctcgtgttcttagccgatacactgaagcaacaccgaaaccatcaaaacccaaaatgggaagccagcttcttgatgttctcaaggaaagtgataagaaatcaaagaggaaaccgggtctacccgaagcaccaactaacatgcttgatgatagcaggagggggatgccaaagagtggcctaacgtttgatttaccgggaggctcggatattctcatcattgctttctcctttgtgttcataagcacagtcatgtttgctactacttttcttgtttggaaactaggtgcgatacacttcaacgaataggtaaagttgagatctggagaagattaatggagtttggaaaccaatcaagcagggaacgagagagagtgttttgttacaatgttagttaacaatgcatacttggggatgtgatggggatgttcatcacttggcaaagccggtttgagtgtatatacatatactatgtagtacacataattttgctatgaactctcttcatgcttgatttgtaattttaatcttttgcattgtaatttcttwtcatatggaaatggatrcttaaag

SEQ ID NO: 49510 - protein, 201 aa, Arabidopsis thaliana
  peptide (1)..(201): Ceres Seq. ID no. 15221228
  misc_feature (1)..(201): Homolog of NCBI NO: 15228794 NR Description: expressed protein [Arabidopsis thaliana]
MSVVLNAGFSSPLQNRSHHVIQLKPSPFASYISLNSSRRSLLCKRRLVVSCLDTNDNSVTTTSVDSSSSSDSNKPVSESVESSNGTAKKAPLTARERLRAARVLSRYTEATPKPSKPKMGSQLLDVLKESDKKSKRKPGLPEAPTNMLDDSRRGMPKSGLTFDLPGGSDILIIAFSFVFISTVMFATTFLVWKLGAIHFNE

SEQ ID NO: 49511 - DNA, 2073 bp, Arabidopsis thaliana; identical to SEQ ID NO: 48959
  misc_feature (1)..(2073): Ceres Seq. ID no. 13591980
  misc_feature: MA Experiment ID: 20000173 Result: Down-regulated in Transcription
  misc_feature: MA Experiment 20000173 PARAMETER Experiment Name: At_42deg_Heat_P Parameter: Age (day) Value: 14
  misc_feature: MA Experiment 20000173 PARAMETER Experiment Name: At_42deg_Heat_P Parameter: Organism Value: A. thaliana
  misc_feature: MA Experiment 20000173 PARAMETER Experiment Name: At_42deg_Heat_P Parameter: Plant Line Value: WS
  misc_feature: MA Experiment 20000173 PARAMETER Experiment Name: At_42deg_Heat_P Parameter: Temperature (deg C) Value: 42 vs. 22
  misc_feature: MA Experiment 20000173 PARAMETER Experiment Name: At_42deg_Heat_P Parameter: Timepoint (hr) Value: 6
  misc_feature: MA Experiment 20000173 PARAMETER Experiment Name: At_42deg_Heat_P Parameter: Tissue Value: Aerial
  misc_feature: MA Experiment ID: 20000495 Result: Up-regulated in Transcription
  misc_feature: MA Experiment 20000495 PARAMETER Experiment Name: At_Guard_Cells_P Parameter: Harvest Date Value: 8/2/2002
  misc_feature: MA Experiment 20000495 PARAMETER Experiment Name: At_Guard_Cells_P Parameter: Organism Value: A. thaliana
  misc_feature: MA Experiment 20000495 PARAMETER Experiment Name: At_Guard_Cells_P Parameter: Tissue Value: Guard Cells vs. Leaves

SEQ ID NO: 49512 - protein, 561 aa, Arabidopsis thaliana; identical to SEQ ID NO: 48960
  peptide (1)..(561): Ceres Seq. ID no. 13591981
  misc_feature (10)..(354): Pfam Name: 3-beta hydroxysteroid dehydrogenase/isomerase family Pfam Description: 3-beta hydroxysteroid dehydrogenase/isomerase
  misc_feature (10)..(354): Pfam Name: 3-beta hydroxysteroid dehydrogenase/isomerase family Pfam Description: 3-beta hydroxysteroid dehydrogenase/isomerase
  misc_feature (10)..(354): Homolog of NCBI NO: 31127258 NR Description: Nsdhl protein [Mus musculus]
  misc_feature (1)..(354): Homolog of NCBI NO: 34881732 NR Description: similar to putative NAD(P)H steroid dehydrogenase
  misc_feature (255)..(530): Homolog of NCBI NO: 21539467 NR Description: 3-beta-hydroxysteroid dehydrogenase [Arabidopsis
  misc_feature (15)..(355): Homolog of NCBI NO: 18401656 NR Description: 3-beta hydroxysteroid dehydrogenase/isomerase
  misc_feature (15)..(355): Homolog of NCBI NO: 21553411 NR Description: 3-beta-hydroxysteroid dehydrogenase, putative
  misc_feature (10)..(354): Homolog of NCBI NO: 31127258 NR Description: Nsdhl protein [Mus musculus]
  misc_feature (255)..(530): Homolog of NCBI NO: 21539467 NR Description: 3-beta-hydroxysteroid dehydrogenase [Arabidopsis
  misc_feature (15)..(355): Homolog of NCBI NO: 21553411 NR Description: 3-beta-hydroxysteroid dehydrogenase, putative
  misc_feature (1)..(561): Homolog of NCBI NO: 18406234 NR Description: 3-beta hydroxysteroid dehydrogenase/isomerase
  misc_feature (83)..(354): Homolog of NCBI NO: 25408868 NR Description: probable sterol dehydrogenase [imported] -
  misc_feature (1)..(82): Homolog of NCBI NO: 25408868 NR Description: probable sterol dehydrogenase [imported] -
  misc_feature (15)..(378): Homolog of NCBI NO: 15225272 NR Description: 3-beta hydroxysteroid dehydrogenase/isomerase
  misc_feature (15)..(445): Homolog of NCBI NO: 30694041 NR Description: 3-beta hydroxysteroid dehydrogenase/isomerase
  misc_feature (15)..(355): Homolog of NCBI NO: 18401656 NR Description: 3-beta hydroxysteroid dehydrogenase/isomerase
  misc_feature (1)..(354): Homolog of NCBI NO: 34881732 NR Description: similar to putative NAD(P)H steroid dehydrogenase
  misc_feature (15)..(445): Homolog of NCBI NO: 30694041 NR Description: 3-beta hydroxysteroid dehydrogenase/isomerase
  misc_feature (15)..(378): Homolog of NCBI NO: 15225272 NR Description: 3-beta hydroxysteroid dehydrogenase/isomerase
  misc_feature (1)..(82): Homolog of NCBI NO: 25408868 NR Description: probable sterol dehydrogenase [imported] -
  misc_feature (83)..(354): Homolog of NCBI NO: 25408868 NR Description: probable sterol dehydrogenase [imported] -
  misc_feature (1)..(561): Homolog of NCBI NO: 18406234 NR Description: 3-beta hydroxysteroid dehydrogenase/isomerase

SEQ ID NO: 49513 - protein, 469 aa, Arabidopsis thaliana; identical to SEQ ID NO: 48961
  peptide (1)..(469): Ceres Seq. ID no. 13591982
  misc_feature (1)..(262): Pfam Name: 3-beta hydroxysteroid dehydrogenase/isomerase family Pfam Description: 3-beta hydroxysteroid dehydrogenase/isomerase
  misc_feature (1)..(262): Pfam Name: 3-beta hydroxysteroid dehydrogenase/isomerase family Pfam Description: 3-beta hydroxysteroid dehydrogenase/isomerase
  misc_feature (1)..(262): Homolog of NCBI NO: 18043286 NR Description: NAD(P) dependent steroid dehydrogenase-like [Mus
  misc_feature (1)..(262): Homolog of NCBI NO: 31127258 NR Description: Nsdhl protein [Mus musculus]
  misc_feature (1)..(262): Homolog of NCBI NO: 34881732 NR Description: similar to putative NAD(P)H steroid dehydrogenase
  misc_feature (163)..(438): Homolog of NCBI NO: 21539467 NR Description: 3-beta-hydroxysteroid dehydrogenase [Arabidopsis
  misc_feature (1)..(263): Homolog of NCBI NO: 18401656 NR Description: 3-beta hydroxysteroid dehydrogenase/isomerase
  misc_feature (1)..(262): Homolog of NCBI NO: 18043286 NR Description: NAD(P) dependent steroid dehydrogenase-like [Mus
  misc_feature (1)..(262): Homolog of NCBI NO: 34881732 NR Description: similar to putative NAD(P)H steroid dehydrogenase
  misc_feature (1)..(263): Homolog of NCBI NO: 18401656 NR Description: 3-beta hydroxysteroid dehydrogenase/isomerase
  misc_feature (1)..(469): Homolog of NCBI NO: 18406234 NR Description: 3-beta hydroxysteroid dehydrogenase/isomerase
  misc_feature (1)..(262): Homolog of NCBI NO: 25408868 NR Description: probable sterol dehydrogenase [imported] -
  misc_feature (1)..(286): Homolog of NCBI NO: 15225272 NR Description: 3-beta hydroxysteroid dehydrogenase/isomerase
  misc_feature (1)..(353): Homolog of NCBI NO: 30694041 NR Description: 3-beta hydroxysteroid dehydrogenase/isomerase
  misc_feature (1)..(263): Homolog of NCBI NO: 21553411 NR Description: 3-beta-hydroxysteroid dehydrogenase, putative
  misc_feature (163)..(438): Homolog of NCBI NO: 21539467 NR Description: 3-beta-hydroxysteroid dehydrogenase [Arabidopsis
  misc_feature (1)..(262): Homolog of NCBI NO: 31127258 NR Description: Nsdhl protein [Mus musculus]
  misc_feature (1)..(263): Homolog of NCBI NO: 21553411 NR Description: 3-beta-hydroxysteroid dehydrogenase, putative
  misc_feature (1)..(353): Homolog of NCBI NO: 30694041 NR Description: 3-beta hydroxysteroid dehydrogenase/isomerase
  misc_feature (1)..(286): Homolog of NCBI NO: 15225272 NR Description: 3-beta hydroxysteroid dehydrogenase/isomerase
  misc_feature (1)..(262): Homolog of NCBI NO: 25408868 NR Description: probable sterol dehydrogenase [imported] -
  misc_feature (1)..(469): Homolog of NCBI NO: 18406234 NR Description: 3-beta hydroxysteroid dehydrogenase/isomerase

SEQ ID NO: 49514 - protein, 401 aa, Arabidopsis thaliana; identical to SEQ ID NO: 48962
  peptide (1)..(401): Ceres Seq. ID no. 13591983
  misc_feature (1)..(194): Pfam Name: 3-beta hydroxysteroid dehydrogenase/isomerase family Pfam Description: 3-beta hydroxysteroid dehydrogenase/isomerase
  misc_feature (1)..(194): Pfam Name: 3-beta hydroxysteroid dehydrogenase/isomerase family Pfam Description: 3-beta hydroxysteroid dehydrogenase/isomerase
  misc_feature (1)..(194): Homolog of NCBI NO: 18043286 NR Description: NAD(P) dependent steroid dehydrogenase-like [Mus
  misc_feature (1)..(194): Homolog of NCBI NO: 31127258 NR Description: Nsdhl protein [Mus musculus]
  misc_feature (1)..(194): Homolog of NCBI NO: 34881732 NR Description: similar to putative NAD(P)H steroid dehydrogenase
  misc_feature (95)..(370): Homolog of NCBI NO: 21539467 NR Description: 3-beta-hydroxysteroid dehydrogenase [Arabidopsis
  misc_feature (1)..(195): Homolog of NCBI NO: 18401656 NR Description: 3-beta hydroxysteroid dehydrogenase/isomerase
  misc_feature (1)..(194): Homolog of NCBI NO: 18043286 NR Description: NAD(P) dependent steroid dehydrogenase-like [Mus
  misc_feature (1)..(194): Homolog of NCBI NO: 34881732 NR Description: similar to putative NAD(P)H steroid dehydrogenase
  misc_feature (1)..(195): Homolog of NCBI NO: 18401656 NR Description: 3-beta hydroxysteroid dehydrogenase/isomerase
  misc_feature (1)..(401): Homolog of NCBI NO: 18406234 NR Description: 3-beta hydroxysteroid dehydrogenase/isomerase
  misc_feature (1)..(194): Homolog of NCBI NO: 25408868 NR Description: probable sterol dehydrogenase [imported] -
  misc_feature (1)..(218): Homolog of NCBI NO: 15225272 NR Description: 3-beta hydroxysteroid dehydrogenase/isomerase
  misc_feature (1)..(285): Homolog of NCBI NO: 30694041 NR Description: 3-beta hydroxysteroid dehydrogenase/isomerase
  misc_feature (1)..(195): Homolog of NCBI NO: 21553411 NR Description: 3-beta-hydroxysteroid dehydrogenase, putative
  misc_feature (95)..(370): Homolog of NCBI NO: 21539467 NR Description: 3-beta-hydroxysteroid dehydrogenase [Arabidopsis
  misc_feature (1)..(194): Homolog of NCBI NO: 31127258 NR Description: Nsdhl protein [Mus musculus]
  misc_feature (1)..(195): Homolog of NCBI NO: 21553411 NR Description: 3-beta-hydroxysteroid dehydrogenase, putative
  misc_feature (1)..(285): Homolog of NCBI NO: 30694041 NR Description: 3-beta hydroxysteroid dehydrogenase/isomerase
  misc_feature (1)..(218): Homolog of NCBI NO: 15225272 NR Description: 3-beta hydroxysteroid dehydrogenase/isomerase
  misc_feature (1)..(194): Homolog of NCBI NO: 25408868 NR Description: probable sterol dehydrogenase [imported] -
  misc_feature (1)..(401): Homolog of NCBI NO: 18406234 NR Description: 3-beta hydroxysteroid dehydrogenase/isomerase

SEQ ID NO: 49515 - DNA, 1194 bp, Arabidopsis thaliana
  misc_feature (1)..(1194): Ceres Seq. ID no. 13648070
  misc_feature: MA Experiment ID: 20000166 Result: Up-regulated in Transcription
  misc_feature: MA Experiment 20000166 PARAMETER Experiment Name: At_100uM_ABA_P Parameter: Age (day) Value: 14
  misc_feature: MA Experiment 20000166 PARAMETER Experiment Name: At_100uM_ABA_P Parameter: Organism Value: A. thaliana
  misc_feature: MA Experiment 20000166 PARAMETER Experiment Name: At_100uM_ABA_P Parameter: Plant Line Value: WS
  misc_feature: MA Experiment 20000166 PARAMETER Experiment Name: At_100uM_ABA_P Parameter: Timepoint (hr) Value: 1
  misc_feature: MA Experiment 20000166 PARAMETER Experiment Name: At_100uM_ABA_P Parameter: Tissue Value: Aerial
  misc_feature: MA Experiment 20000166 PARAMETER Experiment Name: At_100uM_ABA_P Parameter: Treatment Value: 100uM ABA vs. No Treatment
  misc_feature: MA Experiment ID: 20000169 Result: Up-regulated in Transcription
  misc_feature: MA Experiment 20000169 PARAMETER Experiment Name: At_100uM_ABA_P Parameter: Age (day) Value: 14
  misc_feature: MA Experiment 20000169 PARAMETER Experiment Name: At_100uM_ABA_P Parameter: Organism Value: A. thaliana
  misc_feature: MA Experiment 20000169 PARAMETER Experiment Name: At_100uM_ABA_P Parameter: Plant Line Value: WS
  misc_feature: MA Experiment 20000169 PARAMETER Experiment Name: At_100uM_ABA_P Parameter: Timepoint (hr) Value: 6
  misc_feature: MA Experiment 20000169 PARAMETER Experiment Name: At_100uM_ABA_P Parameter: Tissue Value: Aerial
  misc_feature: MA Experiment 20000169 PARAMETER Experiment Name: At_100uM_ABA_P Parameter: Treatment Value: 100uM ABA vs. No Treatment
  misc_feature: MA Experiment ID: 20000234 Result: Down-regulated in Transcription
  misc_feature: MA Experiment 20000234 PARAMETER Experiment Name: At_Siliques_P Parameter: Age (day) Value: 21
  misc_feature: MA Experiment 20000234 PARAMETER Experiment Name: At_Siliques_P Parameter: Organism Value: A. thaliana
  misc_feature: MA Experiment 20000234 PARAMETER Experiment Name: At_Siliques_P Parameter: Plant Line Value: WS
  misc_feature: MA Experiment 20000234 PARAMETER Experiment Name: At_Siliques_P Parameter: Tissue Value: Less Than 5mm Siliques vs. Whole Plant
  misc_feature: MA Experiment ID: 20000235 Result: Down-regulated in Transcription
  misc_feature: MA Experiment 20000235 PARAMETER Experiment Name: At_Siliques_P Parameter: Age (day) Value: 21
  misc_feature: MA Experiment 20000235 PARAMETER Experiment Name: At_Siliques_P Parameter: Organism Value: A. thaliana
  misc_feature: MA Experiment 20000235 PARAMETER Experiment Name: At_Siliques_P Parameter: Plant Line Value: WS
  misc_feature: MA Experiment 20000235 PARAMETER Experiment Name: At_Siliques_P Parameter: Tissue Value: 5-10mm Siliques vs. Whole Plant
  misc_feature: MA Experiment ID: 20000267 Result: Up-regulated in Transcription
  misc_feature: MA Experiment 20000267 PARAMETER Experiment Name: At_Drought_P Parameter: Age (day) Value: 7
  misc_feature: MA Experiment 20000267 PARAMETER Experiment Name: At_Drought_P Parameter: Organism Value: A. thaliana
  misc_feature: MA Experiment 20000267 PARAMETER Experiment Name: At_Drought_P Parameter: Plant Line Value: WS
  misc_feature: MA Experiment 20000267 PARAMETER Experiment Name: At_Drought_P Parameter: Timepoint (hr) Value: 6
  misc_feature: MA Experiment 20000267 PARAMETER Experiment Name: At_Drought_P Parameter: Tissue Value: Whole Plant
  misc_feature: MA Experiment 20000267 PARAMETER Experiment Name: At_Drought_P Parameter: Treatment Value: Drought vs. No Drought
  misc_feature: MA Experiment ID: 20000436 Result: Up-regulated in Transcription
  misc_feature: MA Experiment 20000436 PARAMETER Experiment Name: At_Drought_P Parameter: Age (day) Value: 7
  misc_feature: MA Experiment 20000436 PARAMETER Experiment Name: At_Drought_P Parameter: Organism Value: A. thaliana
  misc_feature: MA Experiment 20000436 PARAMETER Experiment Name: At_Drought_P Parameter: Plant Line Value: WS
  misc_feature: MA Experiment 20000436 PARAMETER Experiment Name: At_Drought_P Parameter: Timepoint (hr) Value: 12
  misc_feature: MA Experiment 20000436 PARAMETER Experiment Name: At_Drought_P Parameter: Tissue Value: Whole Plant
  misc_feature: MA Experiment 20000436 PARAMETER Experiment Name: At_Drought_P Parameter: Treatment Value: Drought vs. No Drought
  misc_feature: MA Experiment ID: 20000437 Result: Up-regulated in Transcription
  misc_feature: MA Experiment 20000437 PARAMETER Experiment Name: At_Drought_P Parameter: Age (day) Value: 8
  misc_feature: MA Experiment 20000437 PARAMETER Experiment Name: At_Drought_P Parameter: Organism Value: A. thaliana
  misc_feature: MA Experiment 20000437 PARAMETER Experiment Name: At_Drought_P Parameter: Plant Line Value: WS
  misc_feature: MA Experiment 20000437 PARAMETER Experiment Name: At_Drought_P Parameter: Timepoint (hr) Value: 24
  misc_feature: MA Experiment 20000437 PARAMETER Experiment Name: At_Drought_P Parameter: Tissue Value: Whole Plant
  misc_feature: MA Experiment 20000437 PARAMETER Experiment Name: At_Drought_P Parameter: Treatment Value: Drought vs. No Drought
  misc_feature: MA Experiment ID: 20000438 Result: Down-regulated in Transcription
  misc_feature: MA Experiment 20000438 PARAMETER Experiment Name: At_Shoots__P Parameter: Age (day) Value: 14
  misc_feature: MA Experiment 20000438 PARAMETER Experiment Name: At_Shoots__P Parameter: Tissue Value: Shoots vs. Whole Plant
  misc_feature: MA Experiment ID: 20000453 Result: Up-regulated in Transcription
  misc_feature: MA Experiment 20000453 PARAMETER Experiment Name: At_100uM_ABA_P Parameter: Age (day) Value: 15
  misc_feature: MA Experiment 20000453 PARAMETER Experiment Name: At_100uM_ABA_P Parameter: Organism Value: A. thaliana
  misc_feature: MA Experiment 20000453 PARAMETER Experiment Name: At_100uM_ABA_P Parameter: Plant Line Value: WS
  misc_feature: MA Experiment 20000453 PARAMETER Experiment Name: At_100uM_ABA_P Parameter: Timepoint (hr) Value: 24
  misc_feature: MA Experiment 20000453 PARAMETER Experiment Name: At_100uM_ABA_P Parameter: Tissue Value: Aerial
  misc_feature: MA Experiment 20000453 PARAMETER Experiment Name: At_100uM_ABA_P Parameter: Treatment Value: 100uM ABA vs. No Treatment
  misc_feature: MA Experiment ID: 20000794 Result: Up-regulated in Transcription
  misc_feature: MA Experiment 20000794 PARAMETER Experiment Name: At_Petals_P Parameter: Age (day) Value: 23-25 days
  misc_feature: MA Experiment 20000794 PARAMETER Experiment Name: At_Petals_P Parameter: Plant Line Value: WS
  misc_feature: MA Experiment 20000794 PARAMETER Experiment Name: At_Petals_P Parameter: Tissue Value: Petals vs. Whole plant
  misc_feature: MA Experiment ID: 20001905 Result: Up-regulated in Transcription
  misc_feature: MA Experiment 20001905 PARAMETER Experiment Name: At_Drought_Reproduction_P Parameter: Age (day) Value: 40
  misc_feature: MA Experiment 20001905 PARAMETER Experiment Name: At_Drought_Reproduction_P Parameter: Organism Value: A. thaliana
  misc_feature: MA Experiment 20001905 PARAMETER Experiment Name: At_Drought_Reproduction_P Parameter: Plant Line Value: WS
  misc_feature: MA Experiment 20001905 PARAMETER Experiment Name: At_Drought_Reproduction_P Parameter: Timepoint (day) Value: 10
  misc_feature: MA Experiment 20001905 PARAMETER Experiment Name: At_Drought_Reproduction_P Parameter: Tissue Value: Rosettes
  misc_feature: MA Experiment 20001905 PARAMETER Experiment Name: At_Drought_Reproduction_P Parameter: Treatment Value: Drought vs. No Drought
  misc_feature: MA Experiment ID: 20001911 Result: Up-regulated in Transcription
  misc_feature: MA Experiment 20001911 PARAMETER Experiment Name: At_Drought_Reproduction_P Parameter: Age (day) Value: 40
  misc_feature: MA Experiment 20001911 PARAMETER Experiment Name: At_Drought_Reproduction_P Parameter: Organism Value: A. thaliana
  misc_feature: MA Experiment 20001911 PARAMETER Experiment Name: At_Drought_Reproduction_P Parameter: Plant Line Value: WS
  misc_feature: MA Experiment 20001911 PARAMETER Experiment Name: At_Drought_Reproduction_P Parameter: Timepoint (day) Value: 10
  misc_feature: MA Experiment 20001911 PARAMETER Experiment Name: At_Drought_Reproduction_P Parameter: Tissue Value: Flowers
  misc_feature: MA Experiment 20001911 PARAMETER Experiment Name: At_Drought_Reproduction_P Parameter: Treatment Value: Drought vs. No Drought
aagccatgtggtaattctaattttgtgtatttattattttctgttaagacgaatcggacagagagaactccggcggcggattgcatttccggcaagatctcgtggggataaataagatggcggatgagaggtataatcggaagaatccggcggtgaagaggattttgcaggaggttaaggagatgcaagctaatccgtctgatgattttatgtctcttcctcttgaggagaatatctttgagtggcaattcgccatccgaggtcctggtgatactgaattcgagggcgggatttatcatgggagaattcagttgcctgcagattatccattcaaacctccttcattcatgttattgacccctaacgggcgctttgaaactaacaccaagatttgcttgagcatttcaaactaccaccctgagcattggcaaccttcatggagtgttcggactgctttggtggctctcattgcatttatgcccacaagtcccaatggagcactgggctcagtagattatccaaaggatgagagacgtacactagccattaaatcacgtgagacaccacctaagtatggctctcctgaacggcaaaaaattattgatgagattcatcagtacatccttagcaaagcaaccgtggttccaaaacctcttcctctggaatgtagccaagcaccttccatcgtatcagaagctcactcccaagttgagccacaggaagcgataactgtagtagaagagcggtccatcgctacaacagacaccatagttgatgatcaaatcatagaagagacagctgaagcagtcaatacagcagctagtgtggttcccgctgcagcacctttaccagcggttgaagttgtggtcaaagcttctgtaagtggtgagcaaaggatggccagaagagcggctcagaagccagtcgatgacagactcttcacgtgggcggcggttgggctcacaatcgctatcatggttcttcttctgaagaagttcataaaatcaaatggttacagtactgggtttatggatgatcagtcttgaactctgatgaaagtcaatgctgcgtttaagaaatggggttgtgttgtttaatattttataaatataattaaagtgcataatggcgtaaataatttctgtgtgacattgtcttgcaacttagttgatagattggattatagcttgtgat

SEQ ID NO: 49516 - protein, 309 aa, Arabidopsis thaliana
  peptide (1)..(309): Ceres Seq. ID no. 13648071
  misc_feature (3)..(148): Homolog of NCBI NO: 15277421 NR Description: non-canonical ubquitin conjugating enzyme 1 [Homo
  misc_feature (3)..(148): Homolog of NCBI NO: 9453733 NR Description: bA11D8.1 (yeast ubiquitin conjugating enzyme UBC6
  misc_feature (3)..(148): Homolog of NCBI NO: 6841528 NR Description: HSPC153 [Homo sapiens]
  misc_feature (13)..(298): Homolog of NCBI NO: 7498090 NR Description: hypothetical protein D1022.1 - Caenorhabditis
  misc_feature (3)..(268): Homolog of NCBI NO: 31980960 NR Description: ubiquitin-conjugating enzyme E2, J1
  misc_feature (3)..(268): Homolog of NCBI NO: 7363050 NR Description: Non-Canonical UBiquitin Conjugating Enzyme 1
  misc_feature (3)..(268): Homolog of NCBI NO: 7362937 NR Description: Non-Canonical UBiquitin Conjugating Enzyme 1
  misc_feature (3)..(270): Homolog of NCBI NO: 38181767 NR Description: Unknown (protein for MGC:63554) [Danio rerio]
  misc_feature (4)..(298): Homolog of NCBI NO: 17532649 NR Description: Ubiquitin conjugating enzyme UBC-6 (35.3 kD)
  misc_feature (1)..(309): Homolog of NCBI NO: 18401338 NR Description: ubiquitin-conjugating enzyme, putative
MADERYNRKNPAVKRILQEVKEMQANPSDDFMSLPLEENIFEWQFAIRGPGDTEFEGGIYHGRIQLPADYPFKPPSFMLLTPNGRFETNTKICLSISNYHPEHWQPSWSVRTALVALIAFMPTSPNGALGSVDYPKDERRTLAIKSRETPPKYGSPERQKIIDEIHQYILSKATVVPKPLPLECSQAPSIVSEAHSQVEPQEAITVVEERSIATTDTIVDDQIIEETAEAVNTAASVVPAAAPLPAVEVVVKASVSGEQRMARRAAQKPVDDRLFTWAAVGLTIAIMVLLLKKFIKSNGYSTGFMDDQS

SEQ ID NO: 49517 - protein, 287 aa, Arabidopsis thaliana
  peptide (1)..(287): Ceres Seq. ID no. 13648072
  misc_feature (1)..(126): Homolog of NCBI NO: 9453733 NR Description: bA11D8.1 (yeast ubiquitin conjugating enzyme UBC6
  misc_feature (1)..(126): Homolog of NCBI NO: 15277421 NR Description: non-canonical ubquitin conjugating enzyme 1 [Homo
  misc_feature (1)..(126): Homolog of NCBI NO: 6841528 NR Description: HSPC153 [Homo sapiens]
  misc_feature (1)..(276): Homolog of NCBI NO: 7498090 NR Description: hypothetical protein D1022.1 - Caenorhabditis
  misc_feature (1)..(246): Homolog of NCBI NO: 31980960 NR Description: ubiquitin-conjugating enzyme E2, J1
  misc_feature (1)..(246): Homolog of NCBI NO: 7363050 NR Description: Non-Canonical UBiquitin Conjugating Enzyme 1
  misc_feature (1)..(246): Homolog of NCBI NO: 7362937 NR Description: Non-Canonical UBiquitin Conjugating Enzyme 1
  misc_feature (1)..(248): Homolog of NCBI NO: 38181767 NR Description: Unknown (protein for MGC:63554) [Danio rerio]
  misc_feature (1)..(276): Homolog of NCBI NO: 17532649 NR Description: Ubiquitin conjugating enzyme UBC-6 (35.3 kD)
  misc_feature (1)..(287): Homolog of NCBI NO: 18401338 NR Description: ubiquitin-conjugating enzyme, putative
MQANPSDDFMSLPLEENIFEWQFAIRGPGDTEFEGGIYHGRIQLPADYPFKPPSFMLLTPNGRFETNTKICLSISNYHPEHWQPSWSVRTALVALIAFMPTSPNGALGSVDYPKDERRTLAIKSRETPPKYGSPERQKIIDEIHQYILSKATVVPKPLPLECSQAPSIVSEAHSQVEPQEAITVVEERSIATTDTIVDDQIIEETAEAVNTAASVVPAAAPLPAVEVVVKASVSGEQRMARRAAQKPVDDRLFTWAAVGLTIAIMVLLLKKFIKSNGYSTGFMDDQS

SEQ ID NO: 49518 - protein, 278 aa, Arabidopsis thaliana
  peptide (1)..(278): Ceres Seq. ID no. 13648073
  misc_feature (1)..(117): Homolog of NCBI NO: 15277421 NR Description: non-canonical ubquitin conjugating enzyme 1 [Homo
  misc_feature (1)..(117): Homolog of NCBI NO: 9453733 NR Description: bA11D8.1 (yeast ubiquitin conjugating enzyme UBC6
  misc_feature (1)..(117): Homolog of NCBI NO: 6841528 NR Description: HSPC153 [Homo sapiens]
  misc_feature (1)..(267): Homolog of NCBI NO: 7498090 NR Description: hypothetical protein D1022.1 - Caenorhabditis
  misc_feature (1)..(237): Homolog of NCBI NO: 31980960 NR Description: ubiquitin-conjugating enzyme E2, J1
  misc_feature (1)..(237): Homolog of NCBI NO: 7363050 NR Description: Non-Canonical UBiquitin Conjugating Enzyme 1
  misc_feature (1)..(237): Homolog of NCBI NO: 7362937 NR Description: Non-Canonical UBiquitin Conjugating Enzyme 1
  misc_feature (1)..(239): Homolog of NCBI NO: 38181767 NR Description: Unknown (protein for MGC:63554) [Danio rerio]
  misc_feature (1)..(267): Homolog of NCBI NO: 17532649 NR Description: Ubiquitin conjugating enzyme UBC-6 (35.3 kD)
  misc_feature (1)..(278): Homolog of NCBI NO: 18401338 NR Description: ubiquitin-conjugating enzyme, putative
MSLPLEENIFEWQFAIRGPGDTEFEGGIYHGRIQLPADYPFKPPSFMLLTPNGRFETNTKICLSISNYHPEHWQPSWSVRTALVALIAFMPTSPNGALGSVDYPKDERRTLAIKSRETPPKYGSPERQKIIDEIHQYILSKATVVPKPLPLECSQAPSIVSEAHSQVEPQEAITVVEERSIATTDTIVDDQIIEETAEAVNTAASVVPAAAPLPAVEVVVKASVSGEQRMARRAAQKPVDDRLFTWAAVGLTIAIMVLLLKKFIKSNGYSTGFMDDQS

SEQ ID NO: 49519 - DNA, 1226 bp, Arabidopsis thaliana
  misc_feature (1)..(1226): Ceres Seq. ID no. 13588641
  misc_feature: MA Experiment ID: 108435 Result: Down-regulated in Transcription
  misc_feature: MA Experiment 108435 PARAMETER Experiment Name: At_stm_Mutants_cDNA_P Parameter: Plant Line Value: wt Landsburg vs stm
  misc_feature: MA Experiment 108435 PARAMETER Experiment Name: At_stm_Mutants_cDNA_P Parameter: Tissue Value: Shoot Apical Meristem Region
  misc_feature: MA Experiment ID: 108462 Result: Down-regulated in Transcription
  misc_feature: MA Experiment 108462 PARAMETER Experiment Name: At_Germinating_Seeds_cDNA_P Parameter: Age (day) Value: 2 vs. 0
  misc_feature: MA Experiment 108462 PARAMETER Experiment Name: At_Germinating_Seeds_cDNA_P Parameter: Tissue Value: Germinating Seeds
  misc_feature: MA Experiment ID: 108488 Result: Up-regulated in Transcription
  misc_feature: MA Experiment ID: 108573 Result: Down-regulated in Transcription
  misc_feature: MA Experiment 108573 PARAMETER Experiment Name: At_Drought_cDNA_P Parameter: Timepoint (hr) Value: 6
  misc_feature: MA Experiment 108573 PARAMETER Experiment Name: At_Drought_cDNA_P Parameter: Tissue Value: Aerial
  misc_feature: MA Experiment 108573 PARAMETER Experiment Name: At_Drought_cDNA_P Parameter: Treatment Value: Drought vs. No Drought
  misc_feature: MA Experiment ID: 108594 Result: Up-regulated in Transcription
  misc_feature: MA Experiment 108594 PARAMETER Experiment Name: At_Ler-rhl_Root_cDNA_P Parameter: Plant Line Value: null
  misc_feature: MA Experiment ID: 108595 Result: Down-regulated in Transcription
  misc_feature: MA Experiment 108595 PARAMETER Experiment Name: At_Ler-pi_Ovule_cDNA_P Parameter: Plant Line Value: null
  misc_feature: MA Experiment ID: 20000069 Result: Down-regulated in Transcription
  misc_feature: MA Experiment 20000069 PARAMETER Experiment Name: At_100uM_ABA_Mutants_cDNA_P Parameter: Plant Line Value: CS23
  misc_feature: MA Experiment 20000069 PARAMETER Experiment Name: At_100uM_ABA_Mutants_cDNA_P Parameter: Timepoint (hr) Value: 6
  misc_feature: MA Experiment 20000069 PARAMETER Experiment Name: At_100uM_ABA_Mutants_cDNA_P Parameter: Tissue Value: Aerial
  misc_feature: MA Experiment 20000069 PARAMETER Experiment Name: At_100uM_ABA_Mutants_cDNA_P Parameter: Treatment Value: 100uM ABA vs. No Treatment
  misc_feature: MA Experiment ID: 20000070 Result: Down-regulated in Transcription
  misc_feature: MA Experiment 20000070 PARAMETER Experiment Name: At_100uM_ABA_Mutants_cDNA_P Parameter: Plant Line Value: CS24
  misc_feature: MA Experiment 20000070 PARAMETER Experiment Name: At_100uM_ABA_Mutants_cDNA_P Parameter: Timepoint (hr) Value: 6
  misc_feature: MA Experiment 20000070 PARAMETER Experiment Name: At_100uM_ABA_Mutants_cDNA_P Parameter: Tissue Value: Aerial
  misc_feature: MA Experiment 20000070 PARAMETER Experiment Name: At_100uM_ABA_Mutants_cDNA_P Parameter: Treatment Value: 100uM ABA vs. No Treatment
  misc_feature: MA Experiment ID: 20000071 Result: Down-regulated in Transcription
  misc_feature: MA Experiment 20000071 PARAMETER Experiment Name: At_100uM_ABA_Mutants_cDNA_P Parameter: Plant Line Value: CS8104
  misc_feature: MA Experiment 20000071 PARAMETER Experiment Name: At_100uM_ABA_Mutants_cDNA_P Parameter: Timepoint (hr) Value: 6
  misc_feature: MA Experiment 20000071 PARAMETER Experiment Name: At_100uM_ABA_Mutants_cDNA_P Parameter: Tissue Value: Aerial
  misc_feature: MA Experiment 20000071 PARAMETER Experiment Name: At_100uM_ABA_Mutants_cDNA_P Parameter: Treatment Value: 100uM ABA vs. No Treatment
  misc_feature: MA Experiment ID: 20000072 Result: Down-regulated in Transcription
  misc_feature: MA Experiment 20000072 PARAMETER Experiment Name: At_100uM_ABA_Mutants_cDNA_P Parameter: Plant Line Value: CS8105
  misc_feature: MA Experiment 20000072 PARAMETER Experiment Name: At_100uM_ABA_Mutants_cDNA_P Parameter: Timepoint (hr) Value: 6
  misc_feature: MA Experiment 20000072 PARAMETER Experiment Name: At_100uM_ABA_Mutants_cDNA_P Parameter: Tissue Value: Aerial
  misc_feature: MA Experiment 20000072 PARAMETER Experiment Name: At_100uM_ABA_Mutants_cDNA_P Parameter: Treatment Value: 100uM ABA vs. No Treatment
  misc_feature: MA Experiment ID: 20000086 Result: Down-regulated in Transcription
  misc_feature: MA Experiment 20000086 PARAMETER Experiment Name: At_100uM_ABA_Mutants_cDNA_P Parameter: Plant Line Value: CS22
  misc_feature: MA Experiment 20000086 PARAMETER Experiment Name: At_100uM_ABA_Mutants_cDNA_P Parameter: Timepoint (hr) Value: 6
  misc_feature: MA Experiment 20000086 PARAMETER Experiment Name: At_100uM_ABA_Mutants_cDNA_P Parameter: Tissue Value: Aerial
  misc_feature: MA Experiment 20000086 PARAMETER Experiment Name: At_100uM_ABA_Mutants_cDNA_P Parameter: Treatment Value: 100uM ABA vs. No Treatment
  misc_feature: MA Experiment ID: 20000087 Result: Down-regulated in Transcription
  misc_feature: MA Experiment 20000087 PARAMETER Experiment Name: At_100uM_ABA_Mutants_cDNA_P Parameter: Plant Line Value: WS
  misc_feature: MA Experiment 20000087 PARAMETER Experiment Name: At_100uM_ABA_Mutants_cDNA_P Parameter: Timepoint (hr) Value: 6
  misc_feature: MA Experiment 20000087 PARAMETER Experiment Name: At_100uM_ABA_Mutants_cDNA_P Parameter: Tissue Value: Aerial
  misc_feature: MA Experiment 20000087 PARAMETER Experiment Name: At_100uM_ABA_Mutants_cDNA_P Parameter: Treatment Value: 100uM ABA vs. No Treatment
  misc_feature: MA Experiment ID: 20000088 Result: Down-regulated in Transcription
  misc_feature: MA Experiment 20000088 PARAMETER Experiment Name: At_100uM_ABA_Mutants_cDNA_P Parameter: Plant Line Value: Landsberg
  misc_feature: MA Experiment 20000088 PARAMETER Experiment Name: At_100uM_ABA_Mutants_cDNA_P Parameter: Timepoint (hr) Value: 6
  misc_feature: MA Experiment 20000088 PARAMETER Experiment Name: At_100uM_ABA_Mutants_cDNA_P Parameter: Tissue Value: Aerial
  misc_feature: MA Experiment 20000088 PARAMETER Experiment Name: At_100uM_ABA_Mutants_cDNA_P Parameter: Treatment Value: 100uM ABA vs. No Treatment
  misc_feature: MA Experiment ID: 20000089 Result: Down-regulated in Transcription
  misc_feature: MA Experiment ID: 20000090 Result: Down-regulated in Transcription
  misc_feature: MA Experiment ID: 20000117 Result: Down-regulated in Transcription
  misc_feature: MA Experiment 20000117 PARAMETER Experiment Name: At_100uM_ABA_Mutants_cDNA_P Parameter: Plant Line Value: Columbia
  misc_feature: MA Experiment 20000117 PARAMETER Experiment Name: At_100uM_ABA_Mutants_cDNA_P Parameter: Timepoint (hr) Value: 6
  misc_feature: MA Experiment 20000117 PARAMETER Experiment Name: At_100uM_ABA_Mutants_cDNA_P Parameter: Tissue Value: Aerial
  misc_feature: MA Experiment 20000117 PARAMETER Experiment Name: At_100uM_ABA_Mutants_cDNA_P Parameter: Treatment Value: 100uM ABA vs. No Treatment
  misc_feature: MA Experiment ID: 20000184 Result: Up-regulated in Transcription
  misc_feature: MA Experiment 20000184 PARAMETER Experiment Name: At_Shoots__P Parameter: Age (day) Value: 7
  misc_feature: MA Experiment 20000184 PARAMETER Experiment Name: At_Shoots__P Parameter: Tissue Value: Shoots vs. Whole Plant
  misc_feature: MA Experiment ID: 20000185 Result: Down-regulated in Transcription
  misc_feature: MA Experiment 20000185 PARAMETER Experiment Name: At_Roots__P Parameter: Age (day) Value: 7 vs. 21
  misc_feature: MA Experiment 20000185 PARAMETER Experiment Name: At_Roots__P Parameter: Organism Value: A. thaliana
  misc_feature: MA Experiment 20000185 PARAMETER Experiment Name: At_Roots__P Parameter: Tissue Value: Roots vs. Whole Plant
  misc_feature: MA Experiment ID: 20000224 Result: Down-regulated in Transcription
  misc_feature: MA Experiment ID: 20000234 Result: Down-regulated in Transcription
  misc_feature: MA Experiment 20000234 PARAMETER Experiment Name: At_Siliques_P Parameter: Age (day) Value: 21
  misc_feature: MA Experiment 20000234 PARAMETER Experiment Name: At_Siliques_P Parameter: Organism Value: A. thaliana
  misc_feature: MA Experiment 20000234 PARAMETER Experiment Name: At_Siliques_P Parameter: Plant Line Value: WS
  misc_feature: MA Experiment 20000234 PARAMETER Experiment Name: At_Siliques_P Parameter: Tissue Value: Less Than 5mm Siliques vs. Whole Plant
  misc_feature: MA Experiment ID: 20000264 Result: Down-regulated in Transcription
  misc_feature: MA Experiment 20000264 PARAMETER Experiment Name: At_Open_Flower_P Parameter: Age (day) Value: 21
  misc_feature: MA Experiment 20000264 PARAMETER Experiment Name: At_Open_Flower_P Parameter: Plant Line Value: WS
  misc_feature: MA Experiment 20000264 PARAMETER Experiment Name: At_Open_Flower_P Parameter: Tissue Value: Open Flower vs. Whole Plant
  misc_feature: MA Experiment ID: 20000286 Result: Down-regulated in Transcription
  misc_feature: MA Experiment 20000286 PARAMETER Experiment Name: At_Open_Flower_P Parameter: Age (day) Value: 21
  misc_feature: MA Experiment 20000286 PARAMETER Experiment Name: At_Open_Flower_P Parameter: Plant Line Value: WS
  misc_feature: MA Experiment 20000286 PARAMETER Experiment Name: At_Open_Flower_P Parameter: Tissue Value: Half Open vs. Whole Plant
  misc_feature: MA Experiment ID: 20000437 Result: Down-regulated in Transcription
  misc_feature: MA Experiment 20000437 PARAMETER Experiment Name: At_Drought_P Parameter: Age (day) Value: 8
  misc_feature: MA Experiment 20000437 PARAMETER Experiment Name: At_Drought_P Parameter: Organism Value: A. thaliana
  misc_feature: MA Experiment 20000437 PARAMETER Experiment Name: At_Drought_P Parameter: Plant Line Value: WS
  misc_feature: MA Experiment 20000437 PARAMETER Experiment Name: At_Drought_P Parameter: Timepoint (hr) Value: 24
  misc_feature: MA Experiment 20000437 PARAMETER Experiment Name: At_Drought_P Parameter: Tissue Value: Whole Plant
  misc_feature: MA Experiment 20000437 PARAMETER Experiment Name: At_Drought_P Parameter: Treatment Value: Drought vs. No Drought
  misc_feature: MA Experiment ID: 20000439 Result: Down-regulated in Transcription
  misc_feature: MA Experiment 20000439 PARAMETER Experiment Name: At_Roots__P Parameter: Age (day) Value: 14 vs. 21
  misc_feature: MA Experiment 20000439 PARAMETER Experiment Name: At_Roots__P Parameter: Organism Value: A. thaliana
  misc_feature: MA Experiment 20000439 PARAMETER Experiment Name: At_Roots__P Parameter: Tissue Value: Roots vs. Whole Plant
  misc_feature: MA Experiment ID: 20000527 Result: Up-regulated in Transcription
  misc_feature: MA Experiment 20000527 PARAMETER Experiment Name: At_10percent_PEG_P Parameter: Age (day) Value: 20
  misc_feature: MA Experiment 20000527 PARAMETER Experiment Name: At_10percent_PEG_P Parameter: Organism Value: A. thaliana
  misc_feature: MA Experiment 20000527 PARAMETER Experiment Name: At_10percent_PEG_P Parameter: Plant Line Value: WS
  misc_feature: MA Experiment 20000527 PARAMETER Experiment Name: At_10percent_PEG_P Parameter: Timepoint (day) Value: 20
  misc_feature: MA Experiment 20000527 PARAMETER Experiment Name: At_10percent_PEG_P Parameter: Tissue Value: Whole Plant
  misc_feature: MA Experiment 20000527 PARAMETER Experiment Name: At_10percent_PEG_P Parameter: Treatment Value: 10percent PEG vs. No Treatment
  misc_feature: MA Experiment ID: 20000794 Result: Down-regulated in Transcription
  misc_feature: MA Experiment 20000794 PARAMETER Experiment Name: At_Petals_P Parameter: Age (day) Value: 23-25 days
  misc_feature: MA Experiment 20000794 PARAMETER Experiment Name: At_Petals_P Parameter: Plant Line Value: WS
  misc_feature: MA Experiment 20000794 PARAMETER Experiment Name: At_Petals_P Parameter: Tissue Value: Petals vs. Whole plant
  misc_feature: MA Experiment ID: 20001450 Result: Up-regulated in Transcription
  misc_feature: MA Experiment 20001450 PARAMETER Experiment Name: At_Far-red-induction_P Parameter: Age (day) Value: 7
  misc_feature: MA Experiment 20001450 PARAMETER Experiment Name: At_Far-red-induction_P Parameter: Light Value: Far-red vs. White
  misc_feature: MA Experiment 20001450 PARAMETER Experiment Name: At_Far-red-induction_P Parameter: Organism Value: A. thaliana
  misc_feature: MA Experiment 20001450 PARAMETER Experiment Name: At_Far-red-induction_P Parameter: Plant Line Value: Columbia
  misc_feature: MA Experiment 20001450 PARAMETER Experiment Name: At_Far-red-induction_P Parameter: Timepoint (hr) Value: 8
  misc_feature: MA Experiment 20001450 PARAMETER Experiment Name: At_Far-red-induction_P Parameter: Tissue Value: Whole Plant
  misc_feature: MA Experiment ID: 20001451 Result: Up-regulated in Transcription
  misc_feature: MA Experiment 20001451 PARAMETER Experiment Name: At_Far-red-induction_P Parameter: Age (day) Value: 7
  misc_feature: MA Experiment 20001451 PARAMETER Experiment Name: At_Far-red-induction_P Parameter: Light Value: Far-red vs. White
  misc_feature: MA Experiment 20001451 PARAMETER Experiment Name: At_Far-red-induction_P Parameter: Organism Value: A. thaliana
  misc_feature: MA Experiment 20001451 PARAMETER Experiment Name: At_Far-red-induction_P Parameter: Plant Line Value: Columbia
  misc_feature: MA Experiment 20001451 PARAMETER Experiment Name: At_Far-red-induction_P Parameter: Timepoint (hr) Value: 24
  misc_feature: MA Experiment 20001451 PARAMETER Experiment Name: At_Far-red-induction_P Parameter: Tissue Value: Whole Plant
  misc_feature: MA Experiment ID: 20001905 Result: Down-regulated in Transcription
  misc_feature: MA Experiment 20001905 PARAMETER Experiment Name: At_Drought_Reproduction_P Parameter: Age (day) Value: 40
  misc_feature: MA Experiment 20001905 PARAMETER Experiment Name: At_Drought_Reproduction_P Parameter: Organism Value: A. thaliana
  misc_feature: MA Experiment 20001905 PARAMETER Experiment Name: At_Drought_Reproduction_P Parameter: Plant Line Value: WS
  misc_feature: MA Experiment 20001905 PARAMETER Experiment Name: At_Drought_Reproduction_P Parameter: Timepoint (day) Value: 10
  misc_feature: MA Experiment 20001905 PARAMETER Experiment Name: At_Drought_Reproduction_P Parameter: Tissue Value: Rosettes
  misc_feature: MA Experiment 20001905 PARAMETER Experiment Name: At_Drought_Reproduction_P Parameter: Treatment Value: Drought vs. No Drought
ggtggtcaaagtttccatacgtagcttctcttctctacactcacgtccaccacaatcctcgtgctccttcctctaaacccgtccgattcacgtacttttactatcttttctcaatccaacagctcacagtccacaaacaaatttcaaatcgcgtcctataaaatcccctctcctctgctccacactctctcaaaaccctagaaaaaatggcaggaaccggagttgtggcggtgtacggcgaaggagccatgacggagacgaaacagaaatctcccttctccgtgaaagttggtctcgctcagatgcttcgtggcggtgtaatcatggatgtcgtcaacgcagagcaagctcgaatcgctgaagaagctggcgcatgcgccgtgatggctcttgaacgtgttcccgccgatattcgagctcaaggcggtgttgctcgaatgagcgatccagagatgatcaaagaaatcaaaaacgccgtgacgattccggtgatggcgaaagctagaattggtcatttcgttgaagctcagatcctggaagcaatcggagttgattacgtcgacgagagtgaagttctcactctcgccgacgaagataatcacatcaacaaacataatttcaaaatcccttttgtttgtggatgtaggaatctcggtgaagctttaaggcggatccgtgaaggagccgccatgataagaaccaaaggtgaggctggaactggtaacgttgttgaagccgttaggcacgtgaggagtgtgaacggagctattcggttacttagaagcatggacgatgacgaggttttcacttacgcgaaaaagatcgctgcgccgtatgatttggttgtgcagactaaggagcttgggaggttaccggtggttcagttcgctgctggaggagtggcgacgccggcggatgcggcgttgatgatgcagttgggatgtgatggagtgtttgttgggtcgggtgttttcaagagtggagatccggtgaagagggctaaggctattgttcaggcggttacgaattatagagacgcggcggtgttggcggaggtgagctgtggtttaggtgaagccatggttggtcttaatttggatgataaggttgagaggttcgctagtcgttctgagtaaccaatcaaatttcagatgtttttatccataacgtttgtcactttaatatgtatccacaaaccaatattctcgatttattcaagattttat

SEQ ID NO: 49520 - protein, 309 aa, Arabidopsis thaliana
  peptide (1)..(309): Ceres Seq. ID no. 13588642
  misc_feature (23)..(229): Pfam Name: SOR/SNZ family Pfam Description: SOR/SNZ family
  misc_feature (23)..(229): Pfam Name: SOR/SNZ family Pfam Description: SOR/SNZ family
  misc_feature (21)..(307): Homolog of NCBI NO: 19115894 NR Description: putative stress-induced protein
  misc_feature (20)..(298): Homolog of NCBI NO: 22970419 NR Description: hypothetical protein [Chloroflexus aurantiacus]
  misc_feature (3)..(309): Homolog of NCBI NO: 37530308 NR Description: putative pyridoxine/pyridoxal 5-phosphate
  misc_feature (1)..(309): Homolog of NCBI NO: 13310484 NR Description: Sor-like protein [Ginkgo biloba]
  misc_feature (3)..(309): Homolog of NCBI NO: 34394152 NR Description: putative ethylene-inducible protein
  misc_feature (21)..(307): Homolog of NCBI NO: 19115894 NR Description: putative stress-induced protein
  misc_feature (3)..(309): Homolog of NCBI NO: 37530308 NR Description: putative pyridoxine/pyridoxal 5-phosphate
  misc_feature (3)..(309): Homolog of NCBI NO: 34394152 NR Description: putative ethylene-inducible protein
  misc_feature (1)..(309): Homolog of NCBI NO: 15224470 NR Description: SOR1 from the fungus Cercospora nicotianae
  misc_feature (1)..(309): Homolog of NCBI NO: 15240972 NR Description: pyridoxine biosynthesis protein - like
  misc_feature (1)..(309): Homolog of NCBI NO: 2501578 NR Description: ETHYLENE-INDUCIBLE PROTEIN HEVER
  misc_feature (1)..(309): Homolog of NCBI NO: 21617922 NR Description: pyridoxine biosynthesis protein-like [Arabidopsis
  misc_feature (3)..(309): Homolog of NCBI NO: 10719739 NR Description: putative pyridoxine biosynthetic enzyme
  misc_feature (1)..(309): Homolog of NCBI NO: 13310484 NR Description: Sor-like protein [Ginkgo biloba]
  misc_feature (20)..(298): Homolog of NCBI NO: 22970419 NR Description: hypothetical protein [Chloroflexus aurantiacus]
  misc_feature (3)..(309): Homolog of NCBI NO: 10719739 NR Description: putative pyridoxine biosynthetic enzyme
  misc_feature (1)..(309): Homolog of NCBI NO: 21617922 NR Description: pyridoxine biosynthesis protein-like [Arabidopsis
  misc_feature (1)..(309): Homolog of NCBI NO: 2501578 NR Description: ETHYLENE-INDUCIBLE PROTEIN HEVER
  misc_feature (1)..(309): Homolog of NCBI NO: 15240972 NR Description: pyridoxine biosynthesis protein - like
  misc_feature (1)..(309): Homolog of NCBI NO: 15224470 NR Description: SOR1 from the fungus Cercospora nicotianae
MAGTGVVAVYGEGAMTETKQKSPFSVKVGLAQMLRGGVIMDVVNAEQARIAEEAGACAVMALERVPADIRAQGGVARMSDPEMIKEIKNAVTIPVMAKARIGHFVEAQILEAIGVDYVDESEVLTLADEDNHINKHNFKIPFVCGCRNLGEALRRIREGAAMIRTKGEAGTGNVVEAVRHVRSVNGAIRLLRSMDDDEVFTYAKKIAAPYDLVVQTKELGRLPVVQFAAGGVATPADAALMMQLGCDGVFVGSGVFKSGDPVKRAKAIVQAVTNYRDAAVLAEVSCGLGEAMVGLNLDDKVERFASRSE

SEQ ID NO: 49521 - protein, 295 aa, Arabidopsis thaliana
  peptide (1)..(295): Ceres Seq. ID no. 13588643
  misc_feature (9)..(215): Pfam Name: SOR/SNZ family Pfam Description: SOR/SNZ family
  misc_feature (9)..(215): Pfam Name: SOR/SNZ family Pfam Description: SOR/SNZ family
  misc_feature (7)..(293): Homolog of NCBI NO: 19115894 NR Description: putative stress-induced protein
  misc_feature (6)..(284): Homolog of NCBI NO: 22970419 NR Description: hypothetical protein [Chloroflexus aurantiacus]
  misc_feature (1)..(295): Homolog of NCBI NO: 37530308 NR Description: putative pyridoxine/pyridoxal 5-phosphate
  misc_feature (1)..(295): Homolog of NCBI NO: 13310484 NR Description: Sor-like protein [Ginkgo biloba]
  misc_feature (1)..(295): Homolog of NCBI NO: 34394152 NR Description: putative ethylene-inducible protein
  misc_feature (7)..(293): Homolog of NCBI NO: 19115894 NR Description: putative stress-induced protein
  misc_feature (1)..(295): Homolog of NCBI NO: 37530308 NR Description: putative pyridoxine/pyridoxal 5-phosphate
  misc_feature (1)..(295): Homolog of NCBI NO: 34394152 NR Description: putative ethylene-inducible protein
  misc_feature (1)..(295): Homolog of NCBI NO: 15224470 NR Description: SOR1 from the fungus Cercospora nicotianae
  misc_feature (1)..(295): Homolog of NCBI NO: 15240972 NR Description: pyridoxine biosynthesis protein - like
  misc_feature (1)..(295): Homolog of NCBI NO: 2501578 NR Description: ETHYLENE-INDUCIBLE PROTEIN HEVER
  misc_feature (1)..(295): Homolog of NCBI NO: 21617922 NR Description: pyridoxine biosynthesis protein-like [Arabidopsis
  misc_feature (1)..(295): Homolog of NCBI NO: 10719739 NR Description: putative pyridoxine biosynthetic enzyme
  misc_feature (1)..(295): Homolog of NCBI NO: 13310484 NR Description: Sor-like protein [Ginkgo biloba]
  misc_feature (6)..(284): Homolog of NCBI NO: 22970419 NR Description: hypothetical protein [Chloroflexus aurantiacus]
  misc_feature (1)..(295): Homolog of NCBI NO: 10719739 NR Description: putative pyridoxine biosynthetic enzyme
  misc_feature (1)..(295): Homolog of NCBI NO: 21617922 NR Description: pyridoxine biosynthesis protein-like [Arabidopsis
  misc_feature (1)..(295): Homolog of NCBI NO: 2501578 NR Description: ETHYLENE-INDUCIBLE PROTEIN HEVER
  misc_feature (1)..(295): Homolog of NCBI NO: 15240972 NR Description: pyridoxine biosynthesis protein - like
  misc_feature (1)..(295): Homolog of NCBI NO: 15224470 NR Description: SOR1 from the fungus Cercospora nicotianae
MTETKQKSPFSVKVGLAQMLRGGVIMDVVNAEQARIAEEAGACAVMALERVPADIRAQGGVARMSDPEMIKEIKNAVTIPVMAKARIGHFVEAQILEAIGVDYVDESEVLTLADEDNHINKHNFKIPFVCGCRNLGEALRRIREGAAMIRTKGEAGTGNVVEAVRHVRSVNGAIRLLRSMDDDEVFTYAKKIAAPYDLVVQTKELGRLPVVQFAAGGVATPADAALMMQLGCDGVFVGSGVFKSGDPVKRAKAIVQAVTNYRDAAVLAEVSCGLGEAMVGLNLDDKVERFASRSE

SEQ ID NO: 49522 - protein, 277 aa, Arabidopsis thaliana
  peptide (1)..(277): Ceres Seq. ID no. 13588644
  misc_feature (1)..(197): Pfam Name: SOR/SNZ family Pfam Description: SOR/SNZ family
  misc_feature (1)..(197): Pfam Name: SOR/SNZ family Pfam Description: SOR/SNZ family
  misc_feature (1)..(275): Homolog of NCBI NO: 19115894 NR Description: putative stress-induced protein
  misc_feature (1)..(266): Homolog of NCBI NO: 22970419 NR Description: hypothetical protein [Chloroflexus aurantiacus]
  misc_feature (1)..(277): Homolog of NCBI NO: 37530308 NR Description: putative pyridoxine/pyridoxal 5-phosphate
  misc_feature (1)..(277): Homolog of NCBI NO: 13310484 NR Description: Sor-like protein [Ginkgo biloba]
  misc_feature (1)..(277): Homolog of NCBI NO: 34394152 NR Description: putative ethylene-inducible protein
  misc_feature (1)..(275): Homolog of NCBI NO: 19115894 NR Description: putative stress-induced protein
  misc_feature (1)..(277): Homolog of NCBI NO: 37530308 NR Description: putative pyridoxine/pyridoxal 5-phosphate
  misc_feature (1)..(277): Homolog of NCBI NO: 34394152 NR Description: putative ethylene-inducible protein
  misc_feature (1)..(277): Homolog of NCBI NO: 15224470 NR Description: SOR1 from the fungus Cercospora nicotianae
  misc_feature (1)..(277): Homolog of NCBI NO: 15240972 NR Description: pyridoxine biosynthesis protein - like
  misc_feature (1)..(277): Homolog of NCBI NO: 2501578 NR Description: ETHYLENE-INDUCIBLE PROTEIN HEVER
  misc_feature (1)..(277): Homolog of NCBI NO: 21617922 NR Description: pyridoxine biosynthesis protein-like [Arabidopsis
  misc_feature (1)..(277): Homolog of NCBI NO: 10719739 NR Description: putative pyridoxine biosynthetic enzyme
  misc_feature (1)..(277): Homolog of NCBI NO: 13310484 NR Description: Sor-like protein [Ginkgo biloba]
  misc_feature (1)..(266): Homolog of NCBI NO: 22970419 NR Description: hypothetical protein [Chloroflexus aurantiacus]
  misc_feature (1)..(277): Homolog of NCBI NO: 10719739 NR Description: putative pyridoxine biosynthetic enzyme
  misc_feature (1)..(277): Homolog of NCBI NO: 21617922 NR Description: pyridoxine biosynthesis protein-like [Arabidopsis
  misc_feature (1)..(277): Homolog of NCBI NO: 2501578 NR Description: ETHYLENE-INDUCIBLE PROTEIN HEVER
  misc_feature (1)..(277): Homolog of NCBI NO: 15240972 NR Description: pyridoxine biosynthesis protein - like
  misc_feature (1)..(277): Homolog of NCBI NO: 15224470 NR Description: SOR1 from the fungus Cercospora nicotianae
MLRGGVIMDVVNAEQARIAEEAGACAVMALERVPADIRAQGGVARMSDPEMIKEIKNAVTIPVMAKARIGHFVEAQILEAIGVDYVDESEVLTLADEDNHINKHNFKIPFVCGCRNLGEALRRIREGAAMIRTKGEAGTGNVVEAVRHVRSVNGAIRLLRSMDDDEVFTYAKKIAAPYDLVVQTKELGRLPVVQFAAGGVATPADAALMMQLGCDGVFVGSGVFKSGDPVKRAKAIVQAVTNYRDAAVLAEVSCGLGEAMVGLNLDDKVERFASRSE

SEQ ID NO: 49523 - DNA, 2078 bp, Arabidopsis thaliana; identical to SEQ ID NO: 47217
  misc_feature (1)..(2078): Ceres Seq. ID no. 12601002
  misc_feature: MA Experiment ID: 20000173 Result: Up-regulated in Transcription
  misc_feature: MA Experiment 20000173 PARAMETER Experiment Name: At_42deg_Heat_P Parameter: Age (day) Value: 14
  misc_feature: MA Experiment 20000173 PARAMETER Experiment Name: At_42deg_Heat_P Parameter: Organism Value: A. thaliana
  misc_feature: MA Experiment 20000173 PARAMETER Experiment Name: At_42deg_Heat_P Parameter: Plant Line Value: WS
  misc_feature: MA Experiment 20000173 PARAMETER Experiment Name: At_42deg_Heat_P Parameter: Temperature (deg C) Value: 42 vs. 22
  misc_feature: MA Experiment 20000173 PARAMETER Experiment Name: At_42deg_Heat_P Parameter: Timepoint (hr) Value: 6
  misc_feature: MA Experiment 20000173 PARAMETER Experiment Name: At_42deg_Heat_P Parameter: Tissue Value: Aerial
  misc_feature: MA Experiment ID: 20000438 Result: Up-regulated in Transcription
  misc_feature: MA Experiment 20000438 PARAMETER Experiment Name: At_Shoots__P Parameter: Age (day) Value: 14
  misc_feature: MA Experiment 20000438 PARAMETER Experiment Name: At_Shoots__P Parameter: Tissue Value: Shoots vs. Whole Plant
  misc_feature: MA Experiment ID: 20000441 Result: Up-regulated in Transcription
  misc_feature: MA Experiment 20000441 PARAMETER Experiment Name: At_1uM_BR-BRZ__P Parameter: Tissue Value: Shoot Apices
  misc_feature: MA Experiment 20000441 PARAMETER Experiment Name: At_1uM_BR-BRZ__P Parameter: Treatment Value: 1uM BR vs. No Treatment
  misc_feature: MA Experiment ID: 20000443 Result: Up-regulated in Transcription
  misc_feature: MA Experiment 20000443 PARAMETER Experiment Name: At_1uM_BR-BRZ__P Parameter: Tissue Value: Shoot Apices
  misc_feature: MA Experiment 20000443 PARAMETER Experiment Name: At_1uM_BR-BRZ__P Parameter: Treatment Value: 1uM BRZ vs. No Treatment
  misc_feature: MA Experiment ID: 20000460 Result: Down-regulated in Transcription
  misc_feature: MA Experiment 20000460 PARAMETER Experiment Name: At_10percent_PEG_P Parameter: Age (day) Value: 12
  misc_feature: MA Experiment 20000460 PARAMETER Experiment Name: At_10percent_PEG_P Parameter: Organism Value: A. thaliana
  misc_feature: MA Experiment 20000460 PARAMETER Experiment Name: At_10percent_PEG_P Parameter: Plant Line Value: WS
  misc_feature: MA Experiment 20000460 PARAMETER Experiment Name: At_10percent_PEG_P Parameter: Timepoint (day) Value: 12
  misc_feature: MA Experiment 20000460 PARAMETER Experiment Name: At_10percent_PEG_P Parameter: Tissue Value: Whole Plant
  misc_feature: MA Experiment 20000460 PARAMETER Experiment Name: At_10percent_PEG_P Parameter: Treatment Value: 10percent PEG vs. No Treatment
  misc_feature: MA Experiment ID: 20000574 Result: Down-regulated in Transcription
  misc_feature: MA Experiment 20000574 PARAMETER Experiment Name: At_100uM_ABA_Mutants__P Parameter: Organism Value: A. thaliana
  misc_feature: MA Experiment 20000574 PARAMETER Experiment Name: At_100uM_ABA_Mutants__P Parameter: Plant Line Value: CS23 vs. Ler wt
  misc_feature: MA Experiment 20000574 PARAMETER Experiment Name: At_100uM_ABA_Mutants__P Parameter: Timepoint (hr) Value: N/A
  misc_feature: MA Experiment 20000574 PARAMETER Experiment Name: At_100uM_ABA_Mutants__P Parameter: Tissue Value: Whole Plant
  misc_feature: MA Experiment 20000574 PARAMETER Experiment Name: At_100uM_ABA_Mutants__P Parameter: Treatment Value: None
  misc_feature: MA Experiment ID: 20001247 Result: Down-regulated in Transcription
  misc_feature: MA Experiment 20001247 PARAMETER Experiment Name: At_Far-red-induction_P Parameter: Age (day) Value: 7
  misc_feature: MA Experiment 20001247 PARAMETER Experiment Name: At_Far-red-induction_P Parameter: Light Value: Far-red vs. White
  misc_feature: MA Experiment 20001247 PARAMETER Experiment Name: At_Far-red-induction_P Parameter: Organism Value: A. thaliana
  misc_feature: MA Experiment 20001247 PARAMETER Experiment Name: At_Far-red-induction_P Parameter: Plant Line Value: Columbia
  misc_feature: MA Experiment 20001247 PARAMETER Experiment Name: At_Far-red-induction_P Parameter: Timepoint (hr) Value: 1
  misc_feature: MA Experiment 20001247 PARAMETER Experiment Name: At_Far-red-induction_P Parameter: Tissue Value: Whole Plant
  misc_feature: MA Experiment ID: 20001248 Result: Down-regulated in Transcription
  misc_feature: MA Experiment 20001248 PARAMETER Experiment Name: At_Far-red-induction_P Parameter: Age (day) Value: 7
  misc_feature: MA Experiment 20001248 PARAMETER Experiment Name: At_Far-red-induction_P Parameter: Light Value: Far-red vs. White
  misc_feature: MA Experiment 20001248 PARAMETER Experiment Name: At_Far-red-induction_P Parameter: Organism Value: A. thaliana
  misc_feature: MA Experiment 20001248 PARAMETER Experiment Name: At_Far-red-induction_P Parameter: Plant Line Value: Columbia
  misc_feature: MA Experiment 20001248 PARAMETER Experiment Name: At_Far-red-induction_P Parameter: Timepoint (hr) Value: 4
  misc_feature: MA Experiment 20001248 PARAMETER Experiment Name: At_Far-red-induction_P Parameter: Tissue Value: Whole Plant
  misc_feature: MA Experiment ID: 20001560 Result: Down-regulated in Transcription
  misc_feature: MA Experiment 20001560 PARAMETER Experiment Name: At_Drought_Soil_Dry_P Parameter: Age (day) Value: 28
  misc_feature: MA Experiment 20001560 PARAMETER Experiment Name: At_Drought_Soil_Dry_P Parameter: Organism Value: A. thaliana
  misc_feature: MA Experiment 20001560 PARAMETER Experiment Name: At_Drought_Soil_Dry_P Parameter: Plant Line Value: WS
  misc_feature: MA Experiment 20001560 PARAMETER Experiment Name: At_Drought_Soil_Dry_P Parameter: Post Timepoint (hr) Value: None
  misc_feature: MA Experiment 20001560 PARAMETER Experiment Name: At_Drought_Soil_Dry_P Parameter: Post-Treatment Value: None
  misc_feature: MA Experiment 20001560 PARAMETER Experiment Name: At_Drought_Soil_Dry_P Parameter: Timepoint (day) Value: 14
  misc_feature: MA Experiment 20001560 PARAMETER Experiment Name: At_Drought_Soil_Dry_P Parameter: Treatment Value: Drought vs. No Drought
  misc_feature: MA Experiment ID: 20001911 Result: Up-regulated in Transcription
  misc_feature: MA Experiment 20001911 PARAMETER Experiment Name: At_Drought_Reproduction_P Parameter: Age (day) Value: 40
  misc_feature: MA Experiment 20001911 PARAMETER Experiment Name: At_Drought_Reproduction_P Parameter: Organism Value: A. thaliana
  misc_feature: MA Experiment 20001911 PARAMETER Experiment Name: At_Drought_Reproduction_P Parameter: Plant Line Value: WS
  misc_feature: MA Experiment 20001911 PARAMETER Experiment Name: At_Drought_Reproduction_P Parameter: Timepoint (day) Value: 10
  misc_feature: MA Experiment 20001911 PARAMETER Experiment Name: At_Drought_Reproduction_P Parameter: Tissue Value: Flowers
  misc_feature: MA Experiment 20001911 PARAMETER Experiment Name: At_Drought_Reproduction_P Parameter: Treatment Value: Drought vs. No Drought

SEQ ID NO: 49524 - protein, 442 aa, Arabidopsis thaliana; identical to SEQ ID NO: 47218
  peptide (1)..(442): Ceres Seq. ID no. 12601003
  misc_feature (59)..(389): Homolog of NCBI NO: 22766878 NR Description: Unknown (protein for MGC:47349) [Mus musculus]
  misc_feature (66)..(389): Homolog of NCBI NO: 27677438 NR Description: similar to CG3552-PC [Drosophila melanogaster]
  misc_feature (97)..(402): Homolog of NCBI NO: 34907712 NR Description: P0035F12.16 [Oryza sativa (japonica
  misc_feature (1)..(182): Homolog of NCBI NO: 21070346 NR Description: VTC2 [Arabidopsis thaliana]
  misc_feature (1)..(182): Homolog of NCBI NO: 7452423 NR Description: hypothetical protein F10M23.190 - Arabidopsis
  misc_feature (1)..(416): Homolog of NCBI NO: 15240467 NR Description: putative protein
  misc_feature (41)..(442): Homolog of NCBI NO: 21070346 NR Description: VTC2 [Arabidopsis thaliana]
  misc_feature (41)..(442): Homolog of NCBI NO: 7452423 NR Description: hypothetical protein F10M23.190 - Arabidopsis
  misc_feature (1)..(442): Homolog of NCBI NO: 15810139 NR Description: unknown protein [Arabidopsis thaliana]
  misc_feature (1)..(442): Homolog of NCBI NO: 18416877 NR Description: putative protein
  misc_feature (59)..(389): Homolog of NCBI NO: 22766878 NR Description: Unknown (protein for MGC:47349) [Mus musculus]
  misc_feature (66)..(389): Homolog of NCBI NO: 27677438 NR Description: similar to CG3552-PC [Drosophila melanogaster]
  misc_feature (97)..(402): Homolog of NCBI NO: 34907712 NR Description: P0035F12.16 [Oryza sativa (japonica
  misc_feature (1)..(182): Homolog of NCBI NO: 21070346 NR Description: VTC2 [Arabidopsis thaliana]
  misc_feature (1)..(182): Homolog of NCBI NO: 7452423 NR Description: hypothetical protein F10M23.190 - Arabidopsis
  misc_feature (1)..(416): Homolog of NCBI NO: 15240467 NR Description: putative protein
  misc_feature (41)..(442): Homolog of NCBI NO: 21070346 NR Description: VTC2 [Arabidopsis thaliana]
  misc_feature (41)..(442): Homolog of NCBI NO: 7452423 NR Description: hypothetical protein F10M23.190 - Arabidopsis
  misc_feature (1)..(442): Homolog of NCBI NO: 15810139 NR Description: unknown protein [Arabidopsis thaliana]
  misc_feature (1)..(442): Homolog of NCBI NO: 18416877 NR Description: putative protein
  misc_feature (59)..(389): Homolog of NCBI NO: 22766878 NR Description: Unknown (protein for MGC:47349) [Mus musculus]
  misc_feature (66)..(389): Homolog of NCBI NO: 27677438 NR Description: similar to CG3552-PC [Drosophila melanogaster]
  misc_feature (97)..(402): Homolog of NCBI NO: 34907712 NR Description: P0035F12.16 [Oryza sativa (japonica
  misc_feature (1)..(182): Homolog of NCBI NO: 21070346 NR Description: VTC2 [Arabidopsis thaliana]
  misc_feature (1)..(182): Homolog of NCBI NO: 7452423 NR Description: hypothetical protein F10M23.190 - Arabidopsis
  misc_feature (1)..(416): Homolog of NCBI NO: 15240467 NR Description: putative protein
  misc_feature (41)..(442): Homolog of NCBI NO: 21070346 NR Description: VTC2 [Arabidopsis thaliana]
  misc_feature (41)..(442): Homolog of NCBI NO: 7452423 NR Description: hypothetical protein F10M23.190 - Arabidopsis
  misc_feature (1)..(442): Homolog of NCBI NO: 15810139 NR Description: unknown protein [Arabidopsis thaliana]
  misc_feature (1)..(442): Homolog of NCBI NO: 18416877 NR Description: putative protein

SEQ ID NO: 49525 - protein, 279 aa, Arabidopsis thaliana; identical to SEQ ID NO: 47219
  peptide (1)..(279): Ceres Seq. ID no. 12601004
  misc_feature (1)..(226): Homolog of NCBI NO: 22766878 NR Description: Unknown (protein for MGC:47349) [Mus musculus]
  misc_feature (1)..(226): Homolog of NCBI NO: 27677438 NR Description: similar to CG3552-PC [Drosophila melanogaster]
  misc_feature (1)..(239): Homolog of NCBI NO: 34907712 NR Description: P0035F12.16 [Oryza sativa (japonica
  misc_feature (1)..(19): Homolog of NCBI NO: 21070346 NR Description: VTC2 [Arabidopsis thaliana]
  misc_feature (1)..(19): Homolog of NCBI NO: 7452423 NR Description: hypothetical protein F10M23.190 - Arabidopsis
  misc_feature (1)..(253): Homolog of NCBI NO: 15240467 NR Description: putative protein
  misc_feature (1)..(279): Homolog of NCBI NO: 21070346 NR Description: VTC2 [Arabidopsis thaliana]
  misc_feature (1)..(279): Homolog of NCBI NO: 7452423 NR Description: hypothetical protein F10M23.190 - Arabidopsis
  misc_feature (1)..(279): Homolog of NCBI NO: 15810139 NR Description: unknown protein [Arabidopsis thaliana]
  misc_feature (1)..(279): Homolog of NCBI NO: 18416877 NR Description: putative protein
  misc_feature (1)..(226): Homolog of NCBI NO: 22766878 NR Description: Unknown (protein for MGC:47349) [Mus musculus]
  misc_feature (1)..(226): Homolog of NCBI NO: 27677438 NR Description: similar to CG3552-PC [Drosophila melanogaster]
  misc_feature (1)..(239): Homolog of NCBI NO: 34907712 NR Description: P0035F12.16 [Oryza sativa (japonica
  misc_feature (1)..(19): Homolog of NCBI NO: 21070346 NR Description: VTC2 [Arabidopsis thaliana]
  misc_feature (1)..(19): Homolog of NCBI NO: 7452423 NR Description: hypothetical protein F10M23.190 - Arabidopsis
  misc_feature (1)..(253): Homolog of NCBI NO: 15240467 NR Description: putative protein
  misc_feature (1)..(279): Homolog of NCBI NO: 21070346 NR Description: VTC2 [Arabidopsis thaliana]
  misc_feature (1)..(279): Homolog of NCBI NO: 7452423 NR Description: hypothetical protein F10M23.190 - Arabidopsis
  misc_feature (1)..(279): Homolog of NCBI NO: 15810139 NR Description: unknown protein [Arabidopsis thaliana]
  misc_feature (1)..(279): Homolog of NCBI NO: 18416877 NR Description: putative protein
  misc_feature (1)..(226): Homolog of NCBI NO: 22766878 NR Description: Unknown (protein for MGC:47349) [Mus musculus]
  misc_feature (1)..(226): Homolog of NCBI NO: 27677438 NR Description: similar to CG3552-PC [Drosophila melanogaster]
  misc_feature (1)..(239): Homolog of NCBI NO: 34907712 NR Description: P0035F12.16 [Oryza sativa (japonica
  misc_feature (1)..(19): Homolog of NCBI NO: 21070346 NR Description: VTC2 [Arabidopsis thaliana]
  misc_feature (1)..(19): Homolog of NCBI NO: 7452423 NR Description: hypothetical protein F10M23.190 - Arabidopsis
  misc_feature (1)..(253): Homolog of NCBI NO: 15240467 NR Description: putative protein
  misc_feature (1)..(279): Homolog of NCBI NO: 21070346 NR Description: VTC2 [Arabidopsis thaliana]
  misc_feature (1)..(279): Homolog of NCBI NO: 7452423 NR Description: hypothetical protein F10M23.190 - Arabidopsis
  misc_feature (1)..(279): Homolog of NCBI NO: 15810139 NR Description: unknown protein [Arabidopsis thaliana]
  misc_feature (1)..(279): Homolog of NCBI NO: 18416877 NR Description: putative protein

SEQ ID NO: 49526 - protein, 231 aa, Arabidopsis thaliana; identical to SEQ ID NO: 47220
  peptide (1)..(231): Ceres Seq. ID no. 12601005
  misc_feature (1)..(178): Homolog of NCBI NO: 26351153 NR Description: unnamed protein product [Mus musculus]
  misc_feature (1)..(191): Homolog of NCBI NO: 34527348 NR Description: unnamed protein product [Homo sapiens]
  misc_feature (1)..(178): Homolog of NCBI NO: 22766878 NR Description: Unknown (protein for MGC:47349) [Mus musculus]
  misc_feature (1)..(178): Homolog of NCBI NO: 27677438 NR Description: similar to CG3552-PC [Drosophila melanogaster]
  misc_feature (1)..(191): Homolog of NCBI NO: 34907712 NR Description: P0035F12.16 [Oryza sativa (japonica
  misc_feature (1)..(205): Homolog of NCBI NO: 15240467 NR Description: putative protein
  misc_feature (1)..(231): Homolog of NCBI NO: 21070346 NR Description: VTC2 [Arabidopsis thaliana]
  misc_feature (1)..(231): Homolog of NCBI NO: 7452423 NR Description: hypothetical protein F10M23.190 - Arabidopsis
  misc_feature (1)..(231): Homolog of NCBI NO: 15810139 NR Description: unknown protein [Arabidopsis thaliana]
  misc_feature (1)..(231): Homolog of NCBI NO: 18416877 NR Description: putative protein
  misc_feature (1)..(178): Homolog of NCBI NO: 26351153 NR Description: unnamed protein product [Mus musculus]
  misc_feature (1)..(191): Homolog of NCBI NO: 34527348 NR Description: unnamed protein product [Homo sapiens]
  misc_feature (1)..(178): Homolog of NCBI NO: 22766878 NR Description: Unknown (protein for MGC:47349) [Mus musculus]
  misc_feature (1)..(178): Homolog of NCBI NO: 27677438 NR Description: similar to CG3552-PC [Drosophila melanogaster]
  misc_feature (1)..(191): Homolog of NCBI NO: 34907712 NR Description: P0035F12.16 [Oryza sativa (japonica
  misc_feature (1)..(205): Homolog of NCBI NO: 15240467 NR Description: putative protein
  misc_feature (1)..(231): Homolog of NCBI NO: 21070346 NR Description: VTC2 [Arabidopsis thaliana]
  misc_feature (1)..(231): Homolog of NCBI NO: 7452423 NR Description: hypothetical protein F10M23.190 - Arabidopsis
  misc_feature (1)..(231): Homolog of NCBI NO: 15810139 NR Description: unknown protein [Arabidopsis thaliana]
  misc_feature (1)..(231): Homolog of NCBI NO: 18416877 NR Description: putative protein
  misc_feature (1)..(178): Homolog of NCBI NO: 26351153 NR Description: unnamed protein product [Mus musculus]
  misc_feature (1)..(191): Homolog of NCBI NO: 34527348 NR Description: unnamed protein product [Homo sapiens]
  misc_feature (1)..(178): Homolog of NCBI NO: 22766878 NR Description: Unknown (protein for MGC:47349) [Mus musculus]
  misc_feature (1)..(178): Homolog of NCBI NO: 27677438 NR Description: similar to CG3552-PC [Drosophila melanogaster]
  misc_feature (1)..(191): Homolog of NCBI NO: 34907712 NR Description: P0035F12.16 [Oryza sativa (japonica
  misc_feature (1)..(205): Homolog of NCBI NO: 15240467 NR Description: putative protein
  misc_feature (1)..(231): Homolog of NCBI NO: 21070346 NR Description: VTC2 [Arabidopsis thaliana]
  misc_feature (1)..(231): Homolog of NCBI NO: 7452423 NR Description: hypothetical protein F10M23.190 - Arabidopsis
  misc_feature (1)..(231): Homolog of NCBI NO: 15810139 NR Description: unknown protein [Arabidopsis thaliana]
  misc_feature (1)..(231): Homolog of NCBI NO: 18416877 NR Description: putative protein

SEQ ID NO: 49527 - DNA, 1481 bp, Arabidopsis thaliana
  misc_feature (1)..(1481): Ceres Seq. ID no. 13588020
  misc_feature: MA Experiment ID: 20000315 Result: Down-regulated in Transcription
  misc_feature: MA Experiment 20000315 PARAMETER Experiment Name: At_14day_Shoots-Roots_Sub_P Parameter: Age (day) Value: 14
  misc_feature: MA Experiment 20000315 PARAMETER Experiment Name: At_14day_Shoots-Roots_Sub_P Parameter: Organism Value: A. thaliana
  misc_feature: MA Experiment 20000315 PARAMETER Experiment Name: At_14day_Shoots-Roots_Sub_P Parameter: Plant Line Value: WS
  misc_feature: MA Experiment 20000315 PARAMETER Experiment Name: At_14day_Shoots-Roots_Sub_P Parameter: Tissue Value: Shoots vs. Whole Plant
  misc_feature: MA Experiment ID: 20000329 Result: Down-regulated in Transcription
  misc_feature: MA Experiment 20000329 PARAMETER Experiment Name: At_4deg_Cold_Sub_P Parameter: Age (day) Value: 14
  misc_feature: MA Experiment 20000329 PARAMETER Experiment Name: At_4deg_Cold_Sub_P Parameter: Organism Value: A. thaliana
  misc_feature: MA Experiment 20000329 PARAMETER Experiment Name: At_4deg_Cold_Sub_P Parameter: Plant Line Value: WS
  misc_feature: MA Experiment 20000329 PARAMETER Experiment Name: At_4deg_Cold_Sub_P Parameter: Temperature (deg C) Value: 4 vs. 22
  misc_feature: MA Experiment 20000329 PARAMETER Experiment Name: At_4deg_Cold_Sub_P Parameter: Timepoint (hr) Value: 6
  misc_feature: MA Experiment 20000329 PARAMETER Experiment Name: At_4deg_Cold_Sub_P Parameter: Tissue Value: Aerial
atcttctcgactctgctgcgttgctttatcaactgaggaattttgaatttcatatctccaaagtaatctcttttccaaggaagttcagtaaaaatcttaaaacccccgatcagagtaatccggggacctatctccgccgttgatttcagtctgagggtttctccgatttcagttcgatctgtgtccgggattctctctgtgttgctttctcattgcgtttacgattcttcttcccctttcaagggttttttttttctccgctataagcttcaatccttagtccactgggattcttgaacacctcccggagaatttaggagggaattagctcttctccagatcttgcttagctcttgtacagaatggcggatttgttacccatttacctcattattttggcatttctatgcactgtcggagccattgctttggctttattccatatctacaagcacctattgaactatacggaacccatttatcagagatatattgtgcgcattgtcttcatggtcccggtttatgccttgatgtcattcttggctctcgttttgcccaagagctctatatattttaactctatccgtgaagtgcgttttattagacgatgcaagcaaggttgtctgcaatttgttattctaaagccaatcctagttgctgtcacacttgtgctttatgcaaaagggaaatacaaggatggaaattttagccctgatcaatcctatctctatcttaccatcatctatacaatatcatacactgtagctctgtacgcgctggtcctcttttatgtggcatgcaaagatctgcttcagccattcaatccagtcccaaaatttgtgattataaagtctgttgtctttctaacctattggcagggtgttctagttttcctttttgctaaatctggatttataagggatgaagaagaagcagccctcttccaaaattttataatatgtgtggaaatgcttattgctgcagctgctcatttctatgcatttccgtacaaggaatatgcagaggccaatgttggaggagctcgcagtttctcaggaagtctggcacatgctcttatgctaaacgatttctaccatgatactgttcaccagtttgcaccaacatatcacgattatgtgctctataatcataatgatgggggtgaggaagggacaaggaagtaccgagcacgaacatttgtgccaactggtcaggaaatggatgctgttagaaagaacaaacacatgtttggaaacaagatagatggtgtttcggtctccagtcaatcttcagaaacaagcacacccaaaacctctggtgtaacttatgatcctgcacgccctgagagcatgaaatcttccttgctggtagatgcctcggactctgtttccacaatgtatgacatgtcgctcattgacattgatatatcgagctaccctagcaaggtaccttctgcaaatataagtggaggacctaaatag

SEQ ID NO: 49528 - protein, 372 aa, Arabidopsis thaliana
  peptide (1)..(372): Ceres Seq. ID no. 13588021
  misc_feature (5)..(231): Pfam Name: Domain of unknown function Pfam Description: Domain of unknown function
  misc_feature (1)..(340): Homolog of NCBI NO: 34900750 NR Description: OJ1341_A08.33 [Oryza sativa (japonica
  misc_feature (13)..(77): Homolog of NCBI NO: 34897328 NR Description: putative organic solute transporter [Oryza
  misc_feature (78)..(317): Homolog of NCBI NO: 34897328 NR Description: putative organic solute transporter [Oryza
  misc_feature (1)..(64): Homolog of NCBI NO: 7485938 NR Description: hypothetical protein F21E10.13 - Arabidopsis
  misc_feature (78)..(369): Homolog of NCBI NO: 7485938 NR Description: hypothetical protein F21E10.13 - Arabidopsis
  misc_feature (1)..(77): Homolog of NCBI NO: 30690265 NR Description: expressed protein [Arabidopsis thaliana]
  misc_feature (78)..(369): Homolog of NCBI NO: 30690265 NR Description: expressed protein [Arabidopsis thaliana]
  misc_feature (1)..(77): Homolog of NCBI NO: 6671963 NR Description: unknown protein [Arabidopsis thaliana]
  misc_feature (78)..(372): Homolog of NCBI NO: 6671963 NR Description: unknown protein [Arabidopsis thaliana]
  misc_feature (1)..(372): Homolog of NCBI NO: 15230584 NR Description: expressed protein [Arabidopsis thaliana]
MADLLPIYLIILAFLCTVGAIALALFHIYKHLLNYTEPIYQRYIVRIVFMVPVYALMSFLALVLPKSSIYFNSIREVRFIRRCKQGCLQFVILKPILVAVTLVLYAKGKYKDGNFSPDQSYLYLTIIYTISYTVALYALVLFYVACKDLLQPFNPVPKFVIIKSVVFLTYWQGVLVFLFAKSGFIRDEEEAALFQNFIICVEMLIAAAAHFYAFPYKEYAEANVGGARSFSGSLAHALMLNDFYHDTVHQFAPTYHDYVLYNHNDGGEEGTRKYRARTFVPTGQEMDAVRKNKHMFGNKIDGVSVSSQSSETSTPKTSGVTYDPARPESMKSSLLVDASDSVSTMYDMSLIDIDISSYPSKVPSANISGGPK

SEQ ID NO: 49529 - protein, 323 aa, Arabidopsis thaliana
  peptide (1)..(323): Ceres Seq. ID no. 13588022
  misc_feature (1)..(182): Pfam Name: Domain of unknown function Pfam Description: Domain of unknown function
  misc_feature (1)..(291): Homolog of NCBI NO: 34900750 NR Description: OJ1341_A08.33 [Oryza sativa (japonica
  misc_feature (1)..(28): Homolog of NCBI NO: 34897328 NR Description: putative organic solute transporter [Oryza
  misc_feature (29)..(268): Homolog of NCBI NO: 34897328 NR Description: putative organic solute transporter [Oryza
  misc_feature (1)..(15): Homolog of NCBI NO: 7485938 NR Description: hypothetical protein F21E10.13 - Arabidopsis
  misc_feature (29)..(320): Homolog of NCBI NO: 7485938 NR Description: hypothetical protein F21E10.13 - Arabidopsis
  misc_feature (1)..(28): Homolog of NCBI NO: 30690265 NR Description: expressed protein [Arabidopsis thaliana]
  misc_feature (29)..(320): Homolog of NCBI NO: 30690265 NR Description: expressed protein [Arabidopsis thaliana]
  misc_feature (1)..(28): Homolog of NCBI NO: 6671963 NR Description: unknown protein [Arabidopsis thaliana]
  misc_feature (29)..(323): Homolog of NCBI NO: 6671963 NR Description: unknown protein [Arabidopsis thaliana]
  misc_feature (1)..(323): Homolog of NCBI NO: 15230584 NR Description: expressed protein [Arabidopsis thaliana]
MVPVYALMSFLALVLPKSSIYFNSIREVRFIRRCKQGCLQFVILKPILVAVTLVLYAKGKYKDGNFSPDQSYLYLTIIYTISYTVALYALVLFYVACKDLLQPFNPVPKFVIIKSVVFLTYWQGVLVFLFAKSGFIRDEEEAALFQNFIICVEMLIAAAAHFYAFPYKEYAEANVGGARSFSGSLAHALMLNDFYHDTVHQFAPTYHDYVLYNHNDGGEEGTRKYRARTFVPTGQEMDAVRKNKHMFGNKIDGVSVSSQSSETSTPKTSGVTYDPARPESMKSSLLVDASDSVSTMYDMSLIDIDISSYPSKVPSANISGGPK

SEQ ID NO: 49530 - protein, 316 aa, Arabidopsis thaliana
  peptide (1)..(316): Ceres Seq. ID no. 13588023
  misc_feature (1)..(175): Pfam Name: Domain of unknown function Pfam Description: Domain of unknown function
  misc_feature (21)..(202): Homolog of NCBI NO: 7110635 NR Description: chromosome 22 open reading frame 5 [Homo sapiens]
  misc_feature (1)..(284): Homolog of NCBI NO: 34900750 NR Description: OJ1341_A08.33 [Oryza sativa (japonica
  misc_feature (1)..(21): Homolog of NCBI NO: 34897328 NR Description: putative organic solute transporter [Oryza
  misc_feature (22)..(261): Homolog of NCBI NO: 34897328 NR Description: putative organic solute transporter [Oryza
  misc_feature (22)..(313): Homolog of NCBI NO: 7485938 NR Description: hypothetical protein F21E10.13 - Arabidopsis
  misc_feature (1)..(21): Homolog of NCBI NO: 30690265 NR Description: expressed protein [Arabidopsis thaliana]
  misc_feature (22)..(313): Homolog of NCBI NO: 30690265 NR Description: expressed protein [Arabidopsis thaliana]
  misc_feature (1)..(21): Homolog of NCBI NO: 6671963 NR Description: unknown protein [Arabidopsis thaliana]
  misc_feature (22)..(316): Homolog of NCBI NO: 6671963 NR Description: unknown protein [Arabidopsis thaliana]
  misc_feature (1)..(316): Homolog of NCBI NO: 15230584 NR Description: expressed protein [Arabidopsis thaliana]
MSFLALVLPKSSIYFNSIREVRFIRRCKQGCLQFVILKPILVAVTLVLYAKGKYKDGNFSPDQSYLYLTIIYTISYTVALYALVLFYVACKDLLQPFNPVPKFVIIKSVVFLTYWQGVLVFLFAKSGFIRDEEEAALFQNFIICVEMLIAAAAHFYAFPYKEYAEANVGGARSFSGSLAHALMLNDFYHDTVHQFAPTYHDYVLYNHNDGGEEGTRKYRARTFVPTGQEMDAVRKNKHMFGNKIDGVSVSSQSSETSTPKTSGVTYDPARPESMKSSLLVDASDSVSTMYDMSLIDIDISSYPSKVPSANISGGPK

SEQ ID NO: 49531 - DNA, 1420 bp, Arabidopsis thaliana; identical to SEQ ID NO: 36272
  misc_feature (1)..(1420): Ceres Seq. ID no. 12580277
  misc_feature: MA Experiment ID: 20000179 Result: Up-regulated in Transcription
  misc_feature: MA Experiment 20000179 PARAMETER Experiment Name: At_Germinating_Seeds_P Parameter: Age (hr) Value: 6 vs. 0
  misc_feature: MA Experiment 20000179 PARAMETER Experiment Name: At_Germinating_Seeds_P Parameter: Tissue Value: Germinating Seeds
  misc_feature: MA Experiment ID: 20000180 Result: Up-regulated in Transcription
  misc_feature: MA Experiment 20000180 PARAMETER Experiment Name: At_Germinating_Seeds_P Parameter: Age (hr) Value: 24 vs. 0
  misc_feature: MA Experiment 20000180 PARAMETER Experiment Name: At_Germinating_Seeds_P Parameter: Tissue Value: Germinating Seeds
  misc_feature: MA Experiment ID: 20001905 Result: Down-regulated in Transcription
  misc_feature: MA Experiment 20001905 PARAMETER Experiment Name: At_Drought_Reproduction_P Parameter: Age (day) Value: 40
  misc_feature: MA Experiment 20001905 PARAMETER Experiment Name: At_Drought_Reproduction_P Parameter: Organism Value: A. thaliana
  misc_feature: MA Experiment 20001905 PARAMETER Experiment Name: At_Drought_Reproduction_P Parameter: Plant Line Value: WS
  misc_feature: MA Experiment 20001905 PARAMETER Experiment Name: At_Drought_Reproduction_P Parameter: Timepoint (day) Value: 10
  misc_feature: MA Experiment 20001905 PARAMETER Experiment Name: At_Drought_Reproduction_P Parameter: Tissue Value: Rosettes
  misc_feature: MA Experiment 20001905 PARAMETER Experiment Name: At_Drought_Reproduction_P Parameter: Treatment Value: Drought vs. No Drought

SEQ ID NO: 49532 - protein, 351 aa, Arabidopsis thaliana; identical to SEQ ID NO: 36273
  peptide (1)..(351): Ceres Seq. ID no. 12580278
  misc_feature (284)..(338): Pfam Name: SH3 domain Pfam Description: SH3 domain
  misc_feature (284)..(338): Pfam Name: SH3 domain Pfam Description: SH3 domain
  misc_feature (284)..(338): Pfam Name: SH3 domain Pfam Description: SH3 domain
  misc_feature (284)..(338): Pfam Name: SH3 domain Pfam Description: SH3 domain
  misc_feature (1)..(278): Homolog of NCBI NO: 18418491 NR Description: putative protein
  misc_feature (278)..(344): Homolog of NCBI NO: 15221714 NR Description: unknown protein
  misc_feature (1)..(273): Homolog of NCBI NO: 15221714 NR Description: unknown protein
  misc_feature (260)..(344): Homolog of NCBI NO: 34902022 NR Description: unknown protein [Oryza sativa (japonica
  misc_feature (1)..(266): Homolog of NCBI NO: 34902022 NR Description: unknown protein [Oryza sativa (japonica
  misc_feature (1)..(278): Homolog of NCBI NO: 18418491 NR Description: putative protein
  misc_feature (1)..(273): Homolog of NCBI NO: 15221714 NR Description: unknown protein
  misc_feature (1)..(266): Homolog of NCBI NO: 34902022 NR Description: unknown protein [Oryza sativa (japonica
  misc_feature (260)..(344): Homolog of NCBI NO: 34902022 NR Description: unknown protein [Oryza sativa (japonica
  misc_feature (1)..(273): Homolog of NCBI NO: 15221714 NR Description: unknown protein
  misc_feature (278)..(344): Homolog of NCBI NO: 15221714 NR Description: unknown protein
  misc_feature (1)..(278): Homolog of NCBI NO: 18418491 NR Description: putative protein
  misc_feature (1)..(351): Homolog of NCBI NO: 22328762 NR Description: putative protein
  misc_feature (1)..(351): Homolog of NCBI NO: 21928139 NR Description: AT4g18060/F15J5_30 [Arabidopsis thaliana]
  misc_feature (1)..(351): Homolog of NCBI NO: 16974680 NR Description: SH3 domain-containing protein 3 [Arabidopsis
  misc_feature (1)..(243): Homolog of NCBI NO: 7485521 NR Description: hypothetical protein F15J5.30 - Arabidopsis
  misc_feature (1)..(342): Homolog of NCBI NO: 22093679 NR Description: putative SH3(Src homology) domain-containing
  misc_feature (1)..(351): Homolog of NCBI NO: 22328762 NR Description: putative protein
  misc_feature (1)..(351): Homolog of NCBI NO: 21928139 NR Description: AT4g18060/F15J5_30 [Arabidopsis thaliana]
  misc_feature (1)..(351): Homolog of NCBI NO: 16974680 NR Description: SH3 domain-containing protein 3 [Arabidopsis
  misc_feature (1)..(243): Homolog of NCBI NO: 7485521 NR Description: hypothetical protein F15J5.30 - Arabidopsis
  misc_feature (1)..(342): Homolog of NCBI NO: 22093679 NR Description: putative SH3(Src homology) domain-containing
  misc_feature (1)..(266): Homolog of NCBI NO: 34902022 NR Description: unknown protein [Oryza sativa (japonica
  misc_feature (260)..(344): Homolog of NCBI NO: 34902022 NR Description: unknown protein [Oryza sativa (japonica
  misc_feature (1)..(273): Homolog of NCBI NO: 15221714 NR Description: unknown protein
  misc_feature (278)..(344): Homolog of NCBI NO: 15221714 NR Description: unknown protein
  misc_feature (1)..(278): Homolog of NCBI NO: 18418491 NR Description: putative protein
  misc_feature (1)..(351): Homolog of NCBI NO: 22328762 NR Description: putative protein
  misc_feature (1)..(351): Homolog of NCBI NO: 21928139 NR Description: AT4g18060/F15J5_30 [Arabidopsis thaliana]
  misc_feature (1)..(351): Homolog of NCBI NO: 16974680 NR Description: SH3 domain-containing protein 3 [Arabidopsis
  misc_feature (1)..(243): Homolog of NCBI NO: 7485521 NR Description: hypothetical protein F15J5.30 - Arabidopsis
  misc_feature (1)..(342): Homolog of NCBI NO: 22093679 NR Description: putative SH3(Src homology) domain-containing
  misc_feature (1)..(266): Homolog of NCBI NO: 34902022 NR Description: unknown protein [Oryza sativa (japonica
  misc_feature (260)..(344): Homolog of NCBI NO: 34902022 NR Description: unknown protein [Oryza sativa (japonica
  misc_feature (278)..(344): Homolog of NCBI NO: 15221714 NR Description: unknown protein
  misc_feature (1)..(342): Homolog of NCBI NO: 22093679 NR Description: putative SH3(Src homology) domain-containing
  misc_feature (1)..(243): Homolog of NCBI NO: 7485521 NR Description: hypothetical protein F15J5.30 - Arabidopsis
  misc_feature (1)..(351): Homolog of NCBI NO: 16974680 NR Description: SH3 domain-containing protein 3 [Arabidopsis
  misc_feature (1)..(351): Homolog of NCBI NO: 21928139 NR Description: AT4g18060/F15J5_30 [Arabidopsis thaliana]
  misc_feature (1)..(351): Homolog of NCBI NO: 22328762 NR Description: putative protein

SEQ ID NO: 49533 - protein, 315 aa, Arabidopsis thaliana; identical to SEQ ID NO: 36274
  peptide (1)..(315): Ceres Seq. ID no. 12580279
  misc_feature (248)..(302): Pfam Name: SH3 domain Pfam Description: SH3 domain
  misc_feature (248)..(302): Pfam Name: SH3 domain Pfam Description: SH3 domain
  misc_feature (248)..(302): Pfam Name: SH3 domain Pfam Description: SH3 domain
  misc_feature (248)..(302): Pfam Name: SH3 domain Pfam Description: SH3 domain
  misc_feature (1)..(242): Homolog of NCBI NO: 18418491 NR Description: putative protein
  misc_feature (242)..(308): Homolog of NCBI NO: 15221714 NR Description: unknown protein
  misc_feature (1)..(237): Homolog of NCBI NO: 15221714 NR Description: unknown protein
  misc_feature (224)..(308): Homolog of NCBI NO: 34902022 NR Description: unknown protein [Oryza sativa (japonica
  misc_feature (1)..(230): Homolog of NCBI NO: 34902022 NR Description: unknown protein [Oryza sativa (japonica
  misc_feature (1)..(242): Homolog of NCBI NO: 18418491 NR Description: putative protein
  misc_feature (1)..(237): Homolog of NCBI NO: 15221714 NR Description: unknown protein
  misc_feature (1)..(230): Homolog of NCBI NO: 34902022 NR Description: unknown protein [Oryza sativa (japonica
  misc_feature (224)..(308): Homolog of NCBI NO: 34902022 NR Description: unknown protein [Oryza sativa (japonica
  misc_feature (1)..(237): Homolog of NCBI NO: 15221714 NR Description: unknown protein
  misc_feature (242)..(308): Homolog of NCBI NO: 15221714 NR Description: unknown protein
  misc_feature (1)..(242): Homolog of NCBI NO: 18418491 NR Description: putative protein
  misc_feature (1)..(315): Homolog of NCBI NO: 22328762 NR Description: putative protein
  misc_feature (1)..(315): Homolog of NCBI NO: 21928139 NR Description: AT4g18060/F15J5_30 [Arabidopsis thaliana]
  misc_feature (1)..(315): Homolog of NCBI NO: 16974680 NR Description: SH3 domain-containing protein 3 [Arabidopsis
  misc_feature (1)..(207): Homolog of NCBI NO: 7485521 NR Description: hypothetical protein F15J5.30 - Arabidopsis
  misc_feature (1)..(306): Homolog of NCBI NO: 22093679 NR Description: putative SH3(Src homology) domain-containing
  misc_feature (1)..(315): Homolog of NCBI NO: 22328762 NR Description: putative protein
  misc_feature (1)..(315): Homolog of NCBI NO: 21928139 NR Description: AT4g18060/F15J5_30 [Arabidopsis thaliana]
  misc_feature (1)..(315): Homolog of NCBI NO: 16974680 NR Description: SH3 domain-containing protein 3 [Arabidopsis
  misc_feature (1)..(207): Homolog of NCBI NO: 7485521 NR Description: hypothetical protein F15J5.30 - Arabidopsis
  misc_feature (1)..(306): Homolog of NCBI NO: 22093679 NR Description: putative SH3(Src homology) domain-containing
  misc_feature (1)..(230): Homolog of NCBI NO: 34902022 NR Description: unknown protein [Oryza sativa (japonica
  misc_feature (224)..(308): Homolog of NCBI NO: 34902022 NR Description: unknown protein [Oryza sativa (japonica
  misc_feature (1)..(237): Homolog of NCBI NO: 15221714 NR Description: unknown protein
  misc_feature (242)..(308): Homolog of NCBI NO: 15221714 NR Description: unknown protein
  misc_feature (1)..(242): Homolog of NCBI NO: 18418491 NR Description: putative protein
  misc_feature (1)..(315): Homolog of NCBI NO: 22328762 NR Description: putative protein
  misc_feature (1)..(315): Homolog of NCBI NO: 21928139 NR Description: AT4g18060/F15J5_30 [Arabidopsis thaliana]
  misc_feature (1)..(315): Homolog of NCBI NO: 16974680 NR Description: SH3 domain-containing protein 3 [Arabidopsis
  misc_feature (1)..(207): Homolog of NCBI NO: 7485521 NR Description: hypothetical protein F15J5.30 - Arabidopsis
  misc_feature (1)..(306): Homolog of NCBI NO: 22093679 NR Description: putative SH3(Src homology) domain-containing
  misc_feature (1)..(230): Homolog of NCBI NO: 34902022 NR Description: unknown protein [Oryza sativa (japonica
  misc_feature (224)..(308): Homolog of NCBI NO: 34902022 NR Description: unknown protein [Oryza sativa (japonica
  misc_feature (242)..(308): Homolog of NCBI NO: 15221714 NR Description: unknown protein
  misc_feature (1)..(306): Homolog of NCBI NO: 22093679 NR Description: putative SH3(Src homology) domain-containing
  misc_feature (1)..(207): Homolog of NCBI NO: 7485521 NR Description: hypothetical protein F15J5.30 - Arabidopsis
  misc_feature (1)..(315): Homolog of NCBI NO: 16974680 NR Description: SH3 domain-containing protein 3 [Arabidopsis
  misc_feature (1)..(315): Homolog of NCBI NO: 21928139 NR Description: AT4g18060/F15J5_30 [Arabidopsis thaliana]
  misc_feature (1)..(315): Homolog of NCBI NO: 22328762 NR Description: putative protein

SEQ ID NO: 49534 - protein, 308 aa, Arabidopsis thaliana; identical to SEQ ID NO: 36275
  peptide (1)..(308): Ceres Seq. ID no. 12580280
  misc_feature (241)..(295): Pfam Name: SH3 domain Pfam Description: SH3 domain
  misc_feature (241)..(295): Pfam Name: SH3 domain Pfam Description: SH3 domain
  misc_feature (241)..(295): Pfam Name: SH3 domain Pfam Description: SH3 domain
  misc_feature (241)..(295): Pfam Name: SH3 domain Pfam Description: SH3 domain
  misc_feature (1)..(235): Homolog of NCBI NO: 18418491 NR Description: putative protein
  misc_feature (235)..(301): Homolog of NCBI NO: 15221714 NR Description: unknown protein
  misc_feature (1)..(230): Homolog of NCBI NO: 15221714 NR Description: unknown protein
  misc_feature (217)..(301): Homolog of NCBI NO: 34902022 NR Description: unknown protein [Oryza sativa (japonica
  misc_feature (1)..(223): Homolog of NCBI NO: 34902022 NR Description: unknown protein [Oryza sativa (japonica
  misc_feature (1)..(235): Homolog of NCBI NO: 18418491 NR Description: putative protein
  misc_feature (1)..(230): Homolog of NCBI NO: 15221714 NR Description: unknown protein
  misc_feature (1)..(223): Homolog of NCBI NO: 34902022 NR Description: unknown protein [Oryza sativa (japonica
  misc_feature (217)..(301): Homolog of NCBI NO: 34902022 NR Description: unknown protein [Oryza sativa (japonica
  misc_feature (1)..(230): Homolog of NCBI NO: 15221714 NR Description: unknown protein
  misc_feature (235)..(301): Homolog of NCBI NO: 15221714 NR Description: unknown protein
  misc_feature (1)..(235): Homolog of NCBI NO: 18418491 NR Description: putative protein
  misc_feature (1)..(308): Homolog of NCBI NO: 22328762 NR Description: putative protein
  misc_feature (1)..(308): Homolog of NCBI NO: 21928139 NR Description: AT4g18060/F15J5_30 [Arabidopsis thaliana]
  misc_feature (1)..(308): Homolog of NCBI NO: 16974680 NR Description: SH3 domain-containing protein 3 [Arabidopsis
  misc_feature (1)..(200): Homolog of NCBI NO: 7485521 NR Description: hypothetical protein F15J5.30 - Arabidopsis
  misc_feature (1)..(299): Homolog of NCBI NO: 22093679 NR Description: putative SH3(Src homology) domain-containing
  misc_feature (1)..(308): Homolog of NCBI NO: 22328762 NR Description: putative protein
  misc_feature (1)..(308): Homolog of NCBI NO: 21928139 NR Description: AT4g18060/F15J5_30 [Arabidopsis thaliana]
  misc_feature (1)..(308): Homolog of NCBI NO: 16974680 NR Description: SH3 domain-containing protein 3 [Arabidopsis
  misc_feature (1)..(200): Homolog of NCBI NO: 7485521 NR Description: hypothetical protein F15J5.30 - Arabidopsis
  misc_feature (1)..(299): Homolog of NCBI NO: 22093679 NR Description: putative SH3(Src homology) domain-containing
  misc_feature (1)..(223): Homolog of NCBI NO: 34902022 NR Description: unknown protein [Oryza sativa (japonica
  misc_feature (217)..(301): Homolog of NCBI NO: 34902022 NR Description: unknown protein [Oryza sativa (japonica
  misc_feature (1)..(230): Homolog of NCBI NO: 15221714 NR Description: unknown protein
  misc_feature (235)..(301): Homolog of NCBI NO: 15221714 NR Description: unknown protein
  misc_feature (1)..(235): Homolog of NCBI NO: 18418491 NR Description: putative protein
  misc_feature (1)..(308): Homolog of NCBI NO: 22328762 NR Description: putative protein
  misc_feature (1)..(308): Homolog of NCBI NO: 21928139 NR Description: AT4g18060/F15J5_30 [Arabidopsis thaliana]
  misc_feature (1)..(308): Homolog of NCBI NO: 16974680 NR Description: SH3 domain-containing protein 3 [Arabidopsis
  misc_feature (1)..(200): Homolog of NCBI NO: 7485521 NR Description: hypothetical protein F15J5.30 - Arabidopsis
  misc_feature (1)..(299): Homolog of NCBI NO: 22093679 NR Description: putative SH3(Src homology) domain-containing
  misc_feature (1)..(223): Homolog of NCBI NO: 34902022 NR Description: unknown protein [Oryza sativa (japonica
  misc_feature (217)..(301): Homolog of NCBI NO: 34902022 NR Description: unknown protein [Oryza sativa (japonica
  misc_feature (235)..(301): Homolog of NCBI NO: 15221714 NR Description: unknown protein
  misc_feature (1)..(299): Homolog of NCBI NO: 22093679 NR Description: putative SH3(Src homology) domain-containing
  misc_feature (1)..(200): Homolog of NCBI NO: 7485521 NR Description: hypothetical protein F15J5.30 - Arabidopsis
  misc_feature (1)..(308): Homolog of NCBI NO: 16974680 NR Description: SH3 domain-containing protein 3 [Arabidopsis
  misc_feature (1)..(308): Homolog of NCBI NO: 21928139 NR Description: AT4g18060/F15J5_30 [Arabidopsis thaliana]
  misc_feature (1)..(308): Homolog of NCBI NO: 22328762 NR Description: putative protein

SEQ ID NO: 49535 - DNA, 983 bp, Arabidopsis thaliana
  misc_feature (1)..(983): Ceres Seq. ID no. 13592284
  misc_feature: MA Experiment ID: 20001451 Result: Down-regulated in Transcription
  misc_feature: MA Experiment 20001451 PARAMETER Experiment Name: At_Far-red-induction_P Parameter: Age (day) Value: 7
  misc_feature: MA Experiment 20001451 PARAMETER Experiment Name: At_Far-red-induction_P Parameter: Light Value: Far-red vs. White
  misc_feature: MA Experiment 20001451 PARAMETER Experiment Name: At_Far-red-induction_P Parameter: Organism Value: A. thaliana
  misc_feature: MA Experiment 20001451 PARAMETER Experiment Name: At_Far-red-induction_P Parameter: Plant Line Value: Columbia
  misc_feature: MA Experiment 20001451 PARAMETER Experiment Name: At_Far-red-induction_P Parameter: Timepoint (hr) Value: 24
  misc_feature: MA Experiment 20001451 PARAMETER Experiment Name: At_Far-red-induction_P Parameter: Tissue Value: Whole Plant
gaggaagagaagaagaaaaaatgttgggaagcataagcctcatctcctgcaacttctctcgccttccacgtcttcttaaaccctccactcgacctcaaaccctaacacaatcctcaagcctccttcttcttcttcaatcacgagcttcttcttcaccacatagaattgcccttttcccgaaatacgagaagaaagtcacattcttccatatctgcaaaagctcttcaaacaacccagaagaaccagagaagactcaaattcaagatgaaggaagagactggtctagctcaattttgctttttgcgctttggggtgcgctcttgtactattgcttcaatctcgctcctgatcaaacacccacacaagacttgtactttttgaaaaagcttttgaatttgaaaggtgatgatggttttagaatgaatcagatccttgttgggttatggtacatcatgggtttgtggcctttggtttatgccatgctcttgcttcccactggtacaagtaaaacaccggcttggcctttcgttgtgctttcctttttcggtggtgtttatgctttgttaccttattttgcactgtggaatcctccttctcctcctgtttcagagactgagctgagacaatggcctttgaatgttctggaatcaaaagtaactgctggggtcactctagttgcaggactgggtataattctttattcagttgtcggtaatgccggtgattggacggagttttatcagtactttcgagagagcaaatttattcatgttacaagtcttgatttctgtttactctctgcatttgctccgttttgggtttacaacgacatgaccacccgaaaatggtttgataaaggcagttggctgttaccggtatcggtgattccattcttgggaccttctttgtatctactcctacgaccagcagtgtcagagacgatagctcccaaagatactgcatcatctgacccaaatcaatag

SEQ ID NO: 49536 - protein, 326 aa, Arabidopsis thaliana
  peptide (1)..(326): Ceres Seq. ID no. 13592285
  misc_feature (97)..(310): Homolog of NCBI NO: 37519830 NR Description: hypothetical protein gll0261 [Gloeobacter
  misc_feature (97)..(308): Homolog of NCBI NO: 16329989 NR Description: unknown protein [Synechocystis sp. PCC 6803]
  misc_feature (102)..(312): Homolog of NCBI NO: 23127747 NR Description: hypothetical protein [Nostoc punctiforme]
  misc_feature (102)..(313): Homolog of NCBI NO: 28976133 NR Description: hypothetical protein [Nodularia spumigena]
  misc_feature (96)..(325): Homolog of NCBI NO: 22652039 NR Description: hypothetical protein [Synechococcus sp. PCC 7002]
  misc_feature (97)..(308): Homolog of NCBI NO: 22299194 NR Description: ORF_ID:tll1651~hypothetical protein
  misc_feature (102)..(326): Homolog of NCBI NO: 17231537 NR Description: hypothetical protein [Nostoc sp. PCC 7120]
  misc_feature (92)..(323): Homolog of NCBI NO: 29647433 NR Description: P0410E11.16 [Oryza sativa (japonica
  misc_feature (54)..(107): Homolog of NCBI NO: 15228138 NR Description: expressed protein [Arabidopsis thaliana]
  misc_feature (168)..(326): Homolog of NCBI NO: 15228138 NR Description: expressed protein [Arabidopsis thaliana]
GREEEKMLGSISLISCNFSRLPRLLKPSTRPQTLTQSSSLLLLLQSRASSSPHRIALFPKYEKKVTFFHICKSSSNNPEEPEKTQIQDEGRDWSSSILLFALWGALLYYCFNLAPDQTPTQDLYFLKKLLNLKGDDGFRMNQILVGLWYIMGLWPLVYAMLLLPTGTSKTPAWPFVVLSFFGGVYALLPYFALWNPPSPPVSETELRQWPLNVLESKVTAGVTLVAGLGIILYSVVGNAGDWTEFYQYFRESKFIHVTSLDFCLLSAFAPFWVYNDMTTRKWFDKGSWLLPVSVIPFLGPSLYLLLRPAVSETIAPKDTASSDPNQ

SEQ ID NO: 49537 - protein, 320 aa, Arabidopsis thaliana
  peptide (1)..(320): Ceres Seq. ID no. 13592286
  misc_feature (91)..(304): Homolog of NCBI NO: 37519830 NR Description: hypothetical protein gll0261 [Gloeobacter
  misc_feature (91)..(302): Homolog of NCBI NO: 16329989 NR Description: unknown protein [Synechocystis sp. PCC 6803]
  misc_feature (96)..(306): Homolog of NCBI NO: 23127747 NR Description: hypothetical protein [Nostoc punctiforme]
  misc_feature (96)..(307): Homolog of NCBI NO: 28976133 NR Description: hypothetical protein [Nodularia spumigena]
  misc_feature (90)..(319): Homolog of NCBI NO: 22652039 NR Description: hypothetical protein [Synechococcus sp. PCC 7002]
  misc_feature (91)..(302): Homolog of NCBI NO: 22299194 NR Description: ORF_ID:tll1651~hypothetical protein
  misc_feature (96)..(320): Homolog of NCBI NO: 17231537 NR Description: hypothetical protein [Nostoc sp. PCC 7120]
  misc_feature (86)..(317): Homolog of NCBI NO: 29647433 NR Description: P0410E11.16 [Oryza sativa (japonica
  misc_feature (48)..(101): Homolog of NCBI NO: 15228138 NR Description: expressed protein [Arabidopsis thaliana]
  misc_feature (162)..(320): Homolog of NCBI NO: 15228138 NR Description: expressed protein [Arabidopsis thaliana]
MLGSISLISCNFSRLPRLLKPSTRPQTLTQSSSLLLLLQSRASSSPHRIALFPKYEKKVTFFHICKSSSNNPEEPEKTQIQDEGRDWSSSILLFALWGALLYYCFNLAPDQTPTQDLYFLKKLLNLKGDDGFRMNQILVGLWYIMGLWPLVYAMLLLPTGTSKTPAWPFVVLSFFGGVYALLPYFALWNPPSPPVSETELRQWPLNVLESKVTAGVTLVAGLGIILYSVVGNAGDWTEFYQYFRESKFIHVTSLDFCLLSAFAPFWVYNDMTTRKWFDKGSWLLPVSVIPFLGPSLYLLLRPAVSETIAPKDTASSDPNQ

SEQ ID NO: 49538 - protein, 187 aa, Arabidopsis thaliana
  peptide (1)..(187): Ceres Seq. ID no. 13592287
  misc_feature (1)..(171): Homolog of NCBI NO: 37519830 NR Description: hypothetical protein gll0261 [Gloeobacter
  misc_feature (1)..(169): Homolog of NCBI NO: 16329989 NR Description: unknown protein [Synechocystis sp. PCC 6803]
  misc_feature (1)..(173): Homolog of NCBI NO: 23127747 NR Description: hypothetical protein [Nostoc punctiforme]
  misc_feature (1)..(174): Homolog of NCBI NO: 28976133 NR Description: hypothetical protein [Nodularia spumigena]
  misc_feature (1)..(186): Homolog of NCBI NO: 22652039 NR Description: hypothetical protein [Synechococcus sp. PCC 7002]
  misc_feature (1)..(169): Homolog of NCBI NO: 22299194 NR Description: ORF_ID:tll1651~hypothetical protein
  misc_feature (1)..(187): Homolog of NCBI NO: 17231537 NR Description: hypothetical protein [Nostoc sp. PCC 7120]
  misc_feature (1)..(184): Homolog of NCBI NO: 29647433 NR Description: P0410E11.16 [Oryza sativa (japonica
  misc_feature (29)..(187): Homolog of NCBI NO: 15228138 NR Description: expressed protein [Arabidopsis thaliana]
MNQILVGLWYIMGLWPLVYAMLLLPTGTSKTPAWPFVVLSFFGGVYALLPYFALWNPPSPPVSETELRQWPLNVLESKVTAGVTLVAGLGIILYSVVGNAGDWTEFYQYFRESKFIHVTSLDFCLLSAFAPFWVYNDMTTRKWFDKGSWLLPVSVIPFLGPSLYLLLRPAVSETIAPKDTASSDPNQ

SEQ ID NO: 49539 - DNA, 1125 bp, Arabidopsis thaliana
  misc_feature (1)..(1125): Ceres Seq. ID no. 12591213
  misc_feature: MA Experiment ID: 20000111 Result: Up-regulated in Transcription
  misc_feature: MA Experiment 20000111 PARAMETER Experiment Name: At_42deg_Heat_cDNA_P Parameter: Temperature (deg C) Value: 42 vs. 22
  misc_feature: MA Experiment 20000111 PARAMETER Experiment Name: At_42deg_Heat_cDNA_P Parameter: Timepoint (hr) Value: 6
  misc_feature: MA Experiment 20000111 PARAMETER Experiment Name: At_42deg_Heat_cDNA_P Parameter: Tissue Value: Aerial
  misc_feature: MA Experiment ID: 20000179 Result: Up-regulated in Transcription
  misc_feature: MA Experiment 20000179 PARAMETER Experiment Name: At_Germinating_Seeds_P Parameter: Age (hr) Value: 6 vs. 0
  misc_feature: MA Experiment 20000179 PARAMETER Experiment Name: At_Germinating_Seeds_P Parameter: Tissue Value: Germinating Seeds
  misc_feature: MA Experiment ID: 20000180 Result: Up-regulated in Transcription
  misc_feature: MA Experiment 20000180 PARAMETER Experiment Name: At_Germinating_Seeds_P Parameter: Age (hr) Value: 24 vs. 0
  misc_feature: MA Experiment 20000180 PARAMETER Experiment Name: At_Germinating_Seeds_P Parameter: Tissue Value: Germinating Seeds
  misc_feature: MA Experiment ID: 20000182 Result: Up-regulated in Transcription
  misc_feature: MA Experiment 20000182 PARAMETER Experiment Name: At_2mM_SA_P Parameter: Age (day) Value: 14
  misc_feature: MA Experiment 20000182 PARAMETER Experiment Name: At_2mM_SA_P Parameter: Organism Value: A. thaliana
  misc_feature: MA Experiment 20000182 PARAMETER Experiment Name: At_2mM_SA_P Parameter: Plant Line Value: WS
  misc_feature: MA Experiment 20000182 PARAMETER Experiment Name: At_2mM_SA_P Parameter: Timepoint (hr) Value: 6
  misc_feature: MA Experiment 20000182 PARAMETER Experiment Name: At_2mM_SA_P Parameter: Tissue Value: Aerial
  misc_feature: MA Experiment 20000182 PARAMETER Experiment Name: At_2mM_SA_P Parameter: Treatment Value: 2mM SA vs. No Treatment
  misc_feature: MA Experiment ID: 20000184 Result: Down-regulated in Transcription
  misc_feature: MA Experiment 20000184 PARAMETER Experiment Name: At_Shoots__P Parameter: Age (day) Value: 7
  misc_feature: MA Experiment 20000184 PARAMETER Experiment Name: At_Shoots__P Parameter: Tissue Value: Shoots vs. Whole Plant
  misc_feature: MA Experiment ID: 20000185 Result: Up-regulated in Transcription
  misc_feature: MA Experiment 20000185 PARAMETER Experiment Name: At_Roots__P Parameter: Age (day) Value: 7 vs. 21
  misc_feature: MA Experiment 20000185 PARAMETER Experiment Name: At_Roots__P Parameter: Organism Value: A. thaliana
  misc_feature: MA Experiment 20000185 PARAMETER Experiment Name: At_Roots__P Parameter: Tissue Value: Roots vs. Whole Plant
  misc_feature: MA Experiment ID: 20000227 Result: Up-regulated in Transcription
  misc_feature: MA Experiment 20000227 PARAMETER Experiment Name: At_Root-Tips-vs-Tops_P Parameter: Tissue Value: Root Tips vs. Root Tops
  misc_feature: MA Experiment ID: 20000438 Result: Down-regulated in Transcription
  misc_feature: MA Experiment 20000438 PARAMETER Experiment Name: At_Shoots__P Parameter: Age (day) Value: 14
  misc_feature: MA Experiment 20000438 PARAMETER Experiment Name: At_Shoots__P Parameter: Tissue Value: Shoots vs. Whole Plant
  misc_feature: MA Experiment ID: 20001557 Result: Up-regulated in Transcription
  misc_feature: MA Experiment 20001557 PARAMETER Experiment Name: At_Drought_Soil_Dry_P Parameter: Age (day) Value: 27
  misc_feature: MA Experiment 20001557 PARAMETER Experiment Name: At_Drought_Soil_Dry_P Parameter: Organism Value: A. thaliana
  misc_feature: MA Experiment 20001557 PARAMETER Experiment Name: At_Drought_Soil_Dry_P Parameter: Plant Line Value: WS
  misc_feature: MA Experiment 20001557 PARAMETER Experiment Name: At_Drought_Soil_Dry_P Parameter: Post Timepoint (hr) Value: 3
  misc_feature: MA Experiment 20001557 PARAMETER Experiment Name: At_Drought_Soil_Dry_P Parameter: Post-Treatment Value: Re-Water vs. No Drought
  misc_feature: MA Experiment 20001557 PARAMETER Experiment Name: At_Drought_Soil_Dry_P Parameter: Timepoint (day) Value: 13
  misc_feature: MA Experiment 20001557 PARAMETER Experiment Name: At_Drought_Soil_Dry_P Parameter: Treatment Value: Drought vs. No Drought
atggcgtctaaatcgaagcagcatcttcgttatcagccgcgaaaatctgtgtcacgatcaacacaagctttcacggtgcttatacttcttctcgtagtgattctgattcttctgggtctcgggattttgtcactacctaatgctaatagaaactcttccaagacgaatgatttgaccaacattgtacgaaagagtgagacgagttctggagatgaagaagggaatggtgaacgttgggttgaagttatttcttgggagcctcgtgctgttgtttatcacaatttcttgactaatgaagaatgtgagcacttgatcagccttgctaaaccgagtatggttaagtcaaccgtggtagatgagaaaaccggtgggagcaaagatagcagagtgagaactagctcaggaacttttcttagaagaggacatgacgaagttgtcgaggtgattgagaaaaggatttcagatttcaccttcattcctgttgaaaatggtgaaggtcttcaagttcttcactaccaagttgggcagaagtatgagcctcactatgactatttcttagatgagttcaacaccaagaatggaggacaacgaatagctactgtgcttatgtacctctctgatgtcgatgatggtggcgagactgtgttccctgcagcaagaggaaacattagtgctgtcccatggtggaacgagctctcaaaatgtggtaaagaaggactatctgttctaccaaagaagcgagatgctttacttttctggaacatgaggcctgatgcatctctagacccttcgagcttgcacggtggatgtccagtggtgaaaggaaacaaatggtcatccacgaaatggttccatgtccacgagttcaaggtttaagagaaaccaaacaaagaaagctaaaatatgaggaggttttcatggaagcttcgaatttgtgtggatacagttaaacaggtataatgtgtatttcccttttgaagtgagagatctttaggaaattggaggctgttctttcatgggggatatttgaaattttttgtactttttaaaaaaaactattttgaatgatttgtactttacgacatattcgaatctgagtcttgtaacttttaacaactcaatacg

SEQ ID NO: 49540 - protein, 291 aa, Arabidopsis thaliana; identical to SEQ ID NO: 23298
  peptide (1)..(291): Ceres Seq. ID no. 12591214
  misc_feature (163)..(286): Pfam Name: 2OG-Fe(II) oxygenase superfamily Pfam Description: 2OG-Fe(II) oxygenase superfamily
  misc_feature (28)..(291): Homolog of NCBI NO: 18086437 NR Description: AT3g28480/MFJ20_16 [Arabidopsis thaliana]
  misc_feature (15)..(273): Homolog of NCBI NO: 37535718 NR Description: putative prolyl 4-hydroxylase, alpha subunit
  misc_feature (1)..(268): Homolog of NCBI NO: 15239240 NR Description: prolyl 4-hydroxylase, alpha subunit-like protein
  misc_feature (7)..(291): Homolog of NCBI NO: 21537370 NR Description: putative prolyl 4-hydroxylase, alpha subunit
  misc_feature (7)..(291): Homolog of NCBI NO: 18394842 NR Description: expressed protein
  misc_feature (1)..(132): Homolog of NCBI NO: 15233341 NR Description: putative protein; protein id: At4g35810.1
  misc_feature (129)..(268): Homolog of NCBI NO: 15233341 NR Description: putative protein; protein id: At4g35810.1
  misc_feature (1)..(268): Homolog of NCBI NO: 7488226 NR Description: procollagen-proline dioxygenase alpha chain
  misc_feature (1)..(291): Homolog of NCBI NO: 21593091 NR Description: putative prolyl 4-hydroxylase, alpha subunit
  misc_feature (1)..(291): Homolog of NCBI NO: 15227885 NR Description: putative prolyl 4-hydroxylase, alpha subunit

SEQ ID NO: 49541 - protein, 180 aa, Arabidopsis thaliana; identical to SEQ ID NO: 23299
  peptide (1)..(180): Ceres Seq. ID no. 12591215
  misc_feature (52)..(175): Pfam Name: 2OG-Fe(II) oxygenase superfamily Pfam Description: 2OG-Fe(II) oxygenase superfamily
  misc_feature (1)..(180): Homolog of NCBI NO: 18086437 NR Description: AT3g28480/MFJ20_16 [Arabidopsis thaliana]
  misc_feature (1)..(162): Homolog of NCBI NO: 37535718 NR Description: putative prolyl 4-hydroxylase, alpha subunit
  misc_feature (1)..(157): Homolog of NCBI NO: 15239240 NR Description: prolyl 4-hydroxylase, alpha subunit-like protein
  misc_feature (1)..(180): Homolog of NCBI NO: 21537370 NR Description: putative prolyl 4-hydroxylase, alpha subunit
  misc_feature (1)..(180): Homolog of NCBI NO: 18394842 NR Description: expressed protein
  misc_feature (1)..(21): Homolog of NCBI NO: 15233341 NR Description: putative protein; protein id: At4g35810.1
  misc_feature (18)..(157): Homolog of NCBI NO: 15233341 NR Description: putative protein; protein id: At4g35810.1
  misc_feature (1)..(157): Homolog of NCBI NO: 7488226 NR Description: procollagen-proline dioxygenase alpha chain
  misc_feature (1)..(180): Homolog of NCBI NO: 21593091 NR Description: putative prolyl 4-hydroxylase, alpha subunit
  misc_feature (1)..(180): Homolog of NCBI NO: 15227885 NR Description: putative prolyl 4-hydroxylase, alpha subunit

SEQ ID NO: 49542 - DNA, 1386 bp, Arabidopsis thaliana
  misc_feature (1)..(1386): Ceres Seq. ID no. 13588653
  misc_feature: MA Experiment ID: 20000184 Result: Up-regulated in Transcription
  misc_feature: MA Experiment 20000184 PARAMETER Experiment Name: At_Shoots__P Parameter: Age (day) Value: 7
  misc_feature: MA Experiment 20000184 PARAMETER Experiment Name: At_Shoots__P Parameter: Tissue Value: Shoots vs. Whole Plant
  misc_feature: MA Experiment ID: 20000234 Result: Up-regulated in Transcription
  misc_feature: MA Experiment 20000234 PARAMETER Experiment Name: At_Siliques_P Parameter: Age (day) Value: 21
  misc_feature: MA Experiment 20000234 PARAMETER Experiment Name: At_Siliques_P Parameter: Organism Value: A. thaliana
  misc_feature: MA Experiment 20000234 PARAMETER Experiment Name: At_Siliques_P Parameter: Plant Line Value: WS
  misc_feature: MA Experiment 20000234 PARAMETER Experiment Name: At_Siliques_P Parameter: Tissue Value: Less Than 5mm Siliques vs. Whole Plant
  misc_feature: MA Experiment ID: 20000235 Result: Up-regulated in Transcription
  misc_feature: MA Experiment 20000235 PARAMETER Experiment Name: At_Siliques_P Parameter: Age (day) Value: 21
  misc_feature: MA Experiment 20000235 PARAMETER Experiment Name: At_Siliques_P Parameter: Organism Value: A. thaliana
  misc_feature: MA Experiment 20000235 PARAMETER Experiment Name: At_Siliques_P Parameter: Plant Line Value: WS
  misc_feature: MA Experiment 20000235 PARAMETER Experiment Name: At_Siliques_P Parameter: Tissue Value: 5-10mm Siliques vs. Whole Plant
  misc_feature: MA Experiment ID: 20000438 Result: Up-regulated in Transcription
  misc_feature: MA Experiment 20000438 PARAMETER Experiment Name: At_Shoots__P Parameter: Age (day) Value: 14
  misc_feature: MA Experiment 20000438 PARAMETER Experiment Name: At_Shoots__P Parameter: Tissue Value: Shoots vs. Whole Plant
  misc_feature: MA Experiment ID: 20001248 Result: Down-regulated in Transcription
  misc_feature: MA Experiment 20001248 PARAMETER Experiment Name: At_Far-red-induction_P Parameter: Age (day) Value: 7
  misc_feature: MA Experiment 20001248 PARAMETER Experiment Name: At_Far-red-induction_P Parameter: Light Value: Far-red vs. White
  misc_feature: MA Experiment 20001248 PARAMETER Experiment Name: At_Far-red-induction_P Parameter: Organism Value: A. thaliana
  misc_feature: MA Experiment 20001248 PARAMETER Experiment Name: At_Far-red-induction_P Parameter: Plant Line Value: Columbia
  misc_feature: MA Experiment 20001248 PARAMETER Experiment Name: At_Far-red-induction_P Parameter: Timepoint (hr) Value: 4
  misc_feature: MA Experiment 20001248 PARAMETER Experiment Name: At_Far-red-induction_P Parameter: Tissue Value: Whole Plant
gcacaaaacccttctcactctctctcaagggttcctctcatcttcttcctctgttctttcctctctcttttcctcctcccgccgtcaaatatcgccgccgtgagtaaccacaacaaatacctaaagcttccactactacgcaaatctccgtttccttctccaacacaagctctagctttagacactcgccgtctccattttctctctctccgtagaaaaccaatcccattcgtcaaatctccggtggtctccggcgcagcttccgggtcgggtcaatactttgtggatcttcgtatcggacaaccgcctcaatcgttacttctgatcgccgacacaggaagcgatctcgtttgggttaaatgttcagcttgccggaactgttctcatcattctccggccaccgtcttcttccctcgccactcctcaacattctctcccgcccattgctacgacccggtttgtcgtttagtacctaaaccggatcgagctccgatatgtaaccatacccggatccattccacgtgtcattacgagtatggttacgctgacggttcattaacttccggtttattcgctagagaaacgacgtcgttgaaaacaagctctggtaaagaagcgaggttaaaaagcgttgcttttggatgcgggtttcggatctcgggtcaatccgtatcaggtacgagtttcaatggagccaatggagtaatgggcttgggccgtgggcctatttcttttgcttctcagttgggccgtcgttttggtaacaagttttcttattgcttaatggattacacactctctccgccgccgacgagttatctcatcatcggtaacggcggcgacggcatttcaaagcttttcttcactccgttgctcacgaatccgttatcgccaactttttactacgttaaattaaaatctgttttcgttaacggtgcgaaattacgaatcgatccttcaatttgggaaatcgatgattcaggtaacggcggaaccgtcgtggattccggcacaaccttagcgtttttagctgaaccggcgtatcgatcggttatcgccgccgtgagacgacgggtaaagctccctatcgctgatgcgctgactccggggtttgatttatgcgttaacgtctccggcgtcacgaaaccggaaaagatattaccgaggttgaaatttgaattctccggtggtgctgtgtttgttccgccgccgaggaattactttattgagacggaggagcagattcagtgtctggcgattcaatcggtggatccgaaagttggattttcagtgattgggaatttgatgcaacaaggtttcttgtttgaattcgatagagatagatcacggttaggtttttctcgtcgtggttgtgctctgccgtga

SEQ ID NO: 49543 - protein, 461 aa, Arabidopsis thaliana
  peptide (1)..(461): Ceres Seq. ID no. 13588654
  misc_feature (41)..(456): Pfam Name: Eukaryotic aspartyl protease Pfam Description: Eukaryotic aspartyl protease
  misc_feature (45)..(458): Homolog of NCBI NO: 17979392 NR Description: unknown protein [Arabidopsis thaliana]
  misc_feature (21)..(458): Homolog of NCBI NO: 34910676 NR Description: P0690B02.2 [Oryza sativa (japonica
  misc_feature (77)..(458): Homolog of NCBI NO: 15290061 NR Description: nucleoid DNA-binding protein cnd41-like protein
  misc_feature (82)..(419): Homolog of NCBI NO: 15228618 NR Description: expressed protein [Arabidopsis thaliana]
  misc_feature (289)..(458): Homolog of NCBI NO: 34911162 NR Description: putative chloroplast nucleoid DNA
  misc_feature (31)..(277): Homolog of NCBI NO: 34911162 NR Description: putative chloroplast nucleoid DNA
  misc_feature (84)..(459): Homolog of NCBI NO: 15231625 NR Description: expressed protein [Arabidopsis thaliana]
  misc_feature (84)..(459): Homolog of NCBI NO: 25408826 NR Description: hypothetical protein At2g42980 [imported] -
  misc_feature (84)..(459): Homolog of NCBI NO: 15228044 NR Description: chloroplast nucleoid DNA binding protein -related
  misc_feature (12)..(461): Homolog of NCBI NO: 15230868 NR Description: expressed protein [Arabidopsis thaliana]
AQNPSHSLSRVPLIFFLCSFLSLFLLPPSNIAAVSNHNKYLKLPLLRKSPFPSPTQALALDTRRLHFLSLRRKPIPFVKSPVVSGAASGSGQYFVDLRIGQPPQSLLLIADTGSDLVWVKCSACRNCSHHSPATVFFPRHSSTFSPAHCYDPVCRLVPKPDRAPICNHTRIHSTCHYEYGYADGSLTSGLFARETTSLKTSSGKEARLKSVAFGCGFRISGQSVSGTSFNGANGVMGLGRGPISFASQLGRRFGNKFSYCLMDYTLSPPPTSYLIIGNGGDGISKLFFTPLLTNPLSPTFYYVKLKSVFVNGAKLRIDPSIWEIDDSGNGGTVVDSGTTLAFLAEPAYRSVIAAVRRRVKLPIADALTPGFDLCVNVSGVTKPEKILPRLKFEFSGGAVFVPPPRNYFIETEEQIQCLAIQSVDPKVGFSVIGNLMQQGFLFEFDRDRSRLGFSRRGCALP

SEQ ID NO: 49544 - DNA, 1194 bp, Arabidopsis thaliana
  misc_feature (1)..(1194): Ceres Seq. ID no. 13588747
  misc_feature: MA Experiment ID: 20000234 Result: Up-regulated in Transcription
  misc_feature: MA Experiment 20000234 PARAMETER Experiment Name: At_Siliques_P Parameter: Age (day) Value: 21
  misc_feature: MA Experiment 20000234 PARAMETER Experiment Name: At_Siliques_P Parameter: Organism Value: A. thaliana
  misc_feature: MA Experiment 20000234 PARAMETER Experiment Name: At_Siliques_P Parameter: Plant Line Value: WS
  misc_feature: MA Experiment 20000234 PARAMETER Experiment Name: At_Siliques_P Parameter: Tissue Value: Less Than 5mm Siliques vs. Whole Plant
gatccctcgtaactcctatagaaaaacagaagtaaaacaaaaataaaataaaaacacaaagatggagtgctatgagcagagtcgtcagagagctgcgttcgttgtgctgttgtttatcgttatgttgggatcccaggcacaggcccaactacgcactgacttctattcggacagctgtccatcactgctccctacggtgaggcgggtggtgcagcgagaggtggccaaagagcgtcggatagctgcttccctcctccgactattcttccatgattgcttcgtcaacggctgtgatgcgtcaatattattggatgatacacgttcattcctcggagaaaagacggctggacctaacaataattccgttcgaggatatgaagtcatcgacgcaatcaaatcaagggttgagagactctgcccaggcgtggtgtcatgcgctgacatcctggcaatcacggctcgggactcggtccttctaatgggtggccgcggctggagcgtaaaactagggagacgtgattctatcacggcgagcttctccactgctaactccggcgtcctgccacctccaacctctactcttgataaccttattaaccttttccgagcaaacggtttatccccacgcgacatggtggcgctctccggggctcacaccattgggcaagccaggtgcgtcaccttcaggagccggatatataactcaacaaacatcgacctttcatttgccttatccagacggaggagctgccctgcggcaactggctccggcgataacaacgccgccattctcgatctccgcacacctgaaaagttcgacggcagctacttcatgcagcttgtcaaccacaggggacttctcacatcagatcaggtcttgttcaacggaggttccaccgactcgatcgtcgtatcctacagccggagtgtccaagcattctacagagattttgtagcggcgatgataaaaatgggcgacatcagcccactcaccgggtccaatggacagatccgtcgcagctgtcgcaggcccaactaaaatagtctctactattaagcccataataatctcttagtgaactgtttttttcttattttaatgtgcatcattctgatgttattgcgatatgtcaattaattaaaccggaaatatctattgtttaatcgatataatatataatataattaagtaac

SEQ ID NO: 49545 - protein, 325 aa, Arabidopsis thaliana
  peptide (1)..(325): Ceres Seq. ID no. 13588748
  misc_feature (46)..(289): Pfam Name: Peroxidase Pfam Description: Peroxidase
  misc_feature (7)..(325): Homolog of NCBI NO: 15239075 NR Description: peroxidase, putative [Arabidopsis thaliana]
  misc_feature (26)..(325): Homolog of NCBI NO: 28400798 NR Description: peroxidase [Asparagus officinalis]
  misc_feature (14)..(325): Homolog of NCBI NO: 1854581 NR Description: peroxidase precursor [Linum usitatissimum]
  misc_feature (14)..(325): Homolog of NCBI NO: 39777532 NR Description: peroxidase precursor [Quercus suber]
  misc_feature (1)..(325): Homolog of NCBI NO: 39777536 NR Description: peroxidase precursor [Quercus suber]
  misc_feature (12)..(325): Homolog of NCBI NO: 5381253 NR Description: peroxidase [Nicotiana tabacum]
  misc_feature (13)..(325): Homolog of NCBI NO: 19698446 NR Description: gaiacol peroxidase [Gossypium hirsutum]
  misc_feature (14)..(325): Homolog of NCBI NO: 21537247 NR Description: peroxidase [Arabidopsis thaliana]
  misc_feature (14)..(325): Homolog of NCBI NO: 15237187 NR Description: peroxidase, putative [Arabidopsis thaliana]
  misc_feature (1)..(325): Homolog of NCBI NO: 15237190 NR Description: peroxidase, putative [Arabidopsis thaliana]
MECYEQSRQRAAFVVLLFIVMLGSQAQAQLRTDFYSDSCPSLLPTVRRVVQREVAKERRIAASLLRLFFHDCFVNGCDASILLDDTRSFLGEKTAGPNNNSVRGYEVIDAIKSRVERLCPGVVSCADILAITARDSVLLMGGRGWSVKLGRRDSITASFSTANSGVLPPPTSTLDNLINLFRANGLSPRDMVALSGAHTIGQARCVTFRSRIYNSTNIDLSFALSRRRSCPAATGSGDNNAAILDLRTPEKFDGSYFMQLVNHRGLLTSDQVLFNGGSTDSIVVSYSRSVQAFYRDFVAAMIKMGDISPLTGSNGQIRRSCRRPN

SEQ ID NO: 49546 - protein, 305 aa, Arabidopsis thaliana
  peptide (1)..(305): Ceres Seq. ID no. 13588749
  misc_feature (26)..(269): Pfam Name: Peroxidase Pfam Description: Peroxidase
  misc_feature (1)..(305): Homolog of NCBI NO: 15239075 NR Description: peroxidase, putative [Arabidopsis thaliana]
  misc_feature (6)..(305): Homolog of NCBI NO: 28400798 NR Description: peroxidase [Asparagus officinalis]
  misc_feature (1)..(305): Homolog of NCBI NO: 1854581 NR Description: peroxidase precursor [Linum usitatissimum]
  misc_feature (1)..(305): Homolog of NCBI NO: 39777532 NR Description: peroxidase precursor [Quercus suber]
  misc_feature (1)..(305): Homolog of NCBI NO: 39777536 NR Description: peroxidase precursor [Quercus suber]
  misc_feature (1)..(305): Homolog of NCBI NO: 5381253 NR Description: peroxidase [Nicotiana tabacum]
  misc_feature (1)..(305): Homolog of NCBI NO: 19698446 NR Description: gaiacol peroxidase [Gossypium hirsutum]
  misc_feature (1)..(305): Homolog of NCBI NO: 21537247 NR Description: peroxidase [Arabidopsis thaliana]
  misc_feature (1)..(305): Homolog of NCBI NO: 15237187 NR Description: peroxidase, putative [Arabidopsis thaliana]
  misc_feature (1)..(305): Homolog of NCBI NO: 15237190 NR Description: peroxidase, putative [Arabidopsis thaliana]
MLGSQAQAQLRTDFYSDSCPSLLPTVRRVVQREVAKERRIAASLLRLFFHDCFVNGCDASILLDDTRSFLGEKTAGPNNNSVRGYEVIDAIKSRVERLCPGVVSCADILAITARDSVLLMGGRGWSVKLGRRDSITASFSTANSGVLPPPTSTLDNLINLFRANGLSPRDMVALSGAHTIGQARCVTFRSRIYNSTNIDLSFALSRRRSCPAATGSGDNNAAILDLRTPEKFDGSYFMQLVNHRGLLTSDQVLFNGGSTDSIVVSYSRSVQAFYRDFVAAMIKMGDISPLTGSNGQIRRSCRRPN

SEQ ID NO: 49547 - protein, 186 aa, Arabidopsis thaliana
  peptide (1)..(186): Ceres Seq. ID no. 13588750
  misc_feature (1)..(150): Pfam Name: Peroxidase Pfam Description: Peroxidase
  misc_feature (1)..(186): Homolog of NCBI NO: 15239075 NR Description: peroxidase, putative [Arabidopsis thaliana]
  misc_feature (1)..(186): Homolog of NCBI NO: 28400798 NR Description: peroxidase [Asparagus officinalis]
  misc_feature (1)..(186): Homolog of NCBI NO: 1854581 NR Description: peroxidase precursor [Linum usitatissimum]
  misc_feature (1)..(186): Homolog of NCBI NO: 39777532 NR Description: peroxidase precursor [Quercus suber]
  misc_feature (1)..(186): Homolog of NCBI NO: 39777536 NR Description: peroxidase precursor [Quercus suber]
  misc_feature (1)..(186): Homolog of NCBI NO: 5381253 NR Description: peroxidase [Nicotiana tabacum]
  misc_feature (1)..(186): Homolog of NCBI NO: 19698446 NR Description: gaiacol peroxidase [Gossypium hirsutum]
  misc_feature (1)..(186): Homolog of NCBI NO: 21537247 NR Description: peroxidase [Arabidopsis thaliana]
  misc_feature (1)..(186): Homolog of NCBI NO: 15237187 NR Description: peroxidase, putative [Arabidopsis thaliana]
  misc_feature (1)..(186): Homolog of NCBI NO: 15237190 NR Description: peroxidase, putative [Arabidopsis thaliana]
MGGRGWSVKLGRRDSITASFSTANSGVLPPPTSTLDNLINLFRANGLSPRDMVALSGAHTIGQARCVTFRSRIYNSTNIDLSFALSRRRSCPAATGSGDNNAAILDLRTPEKFDGSYFMQLVNHRGLLTSDQVLFNGGSTDSIVVSYSRSVQAFYRDFVAAMIKMGDISPLTGSNGQIRRSCRRPN

SEQ ID NO: 49548 - DNA, 1581 bp, Arabidopsis thaliana
  misc_feature (1)..(1581): Ceres Seq. ID no. 13588795
  misc_feature: MA Experiment ID: 20000495 Result: Down-regulated in Transcription
  misc_feature: MA Experiment 20000495 PARAMETER Experiment Name: At_Guard_Cells_P Parameter: Harvest Date Value: 8/2/2002
  misc_feature: MA Experiment 20000495 PARAMETER Experiment Name: At_Guard_Cells_P Parameter: Organism Value: A. thaliana
  misc_feature: MA Experiment 20000495 PARAMETER Experiment Name: At_Guard_Cells_P Parameter: Tissue Value: Guard Cells vs. Leaves
tggagaaatcgctgatagagagtagagagacacacgcagattttgagctgcgtgctctgttttaagcttgaaggaggaaaaacatggcagaccaagaatcagataagaacattgagatttggaagattaagaagctaatcaaaggacttgaaaccgcaagaggtaatggaacaagtatgatctctcttataatgcctcctagagatcaagtagctcgtgtcactaagatgcttgctgatgaatacggaaccgcctcaaacatcaagagtcgagtgaatcgtcaatctgttttatctgccattacttctgctcaacaaagattgaagctttacaacaaagttcctccgaatggtcttgttctctatactggaaccattgttactgatgatggtaaagagaagaaagtgacgattgatttcgagccttttaaaccgattaatgcttcgttgtatttgtgtgacaataagttccacaccgagcctttgaatgagcttttggagtctgatgataagtttggtttcattgttatggatggaaatggaactttgtttggtactttgagtgggaatacaagagaggttcttcataagttcactgtcgatcttccgaaaaagcacggaagaggaggacaatctgcgttgcgatttgctcgtcttaggatggagaagagacataactatgtgaggaaaaccgcggagcttgccactcagttttacattaatccagctacgagtcagcctaatgtctctggtcttatacttgctggttcagcggattttaagaccgagctaagtcaatcagaactgtttgatcctcgtcttcaagctaagatattgaatgtggttgatgtttcttacggaggagagaatggtttcaaccaagcaattgagctgtctgctgagattctatctaatgtgaagttcatacaagaaaagaaattgattgggaagtactttgaggagattagtcaagacactgggaaatatgttttcggtgttgaagatactttaaaggctctggaaatgggtgctgttgagactcttatagtgtgggagaatctagatattaataggtatgagttaaagaacaacacgaccggagaaatcgtgattaagcatttgggaaaggatcaagagaacaaccaaagcaatttccatgatgcagagactaatgcagagttagaagttcaggagaagatgcctctgcttgaatggtttgctaacgaatataaacgttttggttgtacacttgagtttgtgactaacaagtcccaagaaggatcacaattttgcagaggctttggcggtattggtggattgttgcggtaccagcttgatatgaggacattcgatgaattatccgatggtgaagtttatgaagactcagattaagtaagagaaaatgtggtttaagatctgaagaaggatttgaagtttggggaaaaaaagaaagactatgaacttttgtttgatatactttgtctctctctattatcttctgttgccgcttttaagtttttctgaaacagttatgttaaaatgtatgagaaatttgagcttcattatactctattttgaagac

SEQ ID NO: 49549 - protein, 435 aa, Arabidopsis thaliana
  peptide (1)..(435): Ceres Seq. ID no. 13588796
  misc_feature (280)..(418): Pfam Name: eRF1 domain 3 Pfam Description: eRF1 domain 3
  misc_feature (3)..(419): Homolog of NCBI NO: 17563932 NR Description: Eukaryotic peptide chain release factor
  misc_feature (1)..(433): Homolog of NCBI NO: 15213995 NR Description: Eukaryotic peptide chain release factor subunit 1
  misc_feature (1)..(435): Homolog of NCBI NO: 18250310 NR Description: eukaryotic release factor 1 [Chlamydomonas
  misc_feature (1)..(433): Homolog of NCBI NO: 34907268 NR Description: putative peptide chain release factor subunit 1
  misc_feature (1)..(433): Homolog of NCBI NO: 15215863 NR Description: AT5g47880/MCA23_22 [Arabidopsis thaliana]
  misc_feature (1)..(433): Homolog of NCBI NO: 1155261 NR Description: eukaryotic release factor 1 homolog
  misc_feature (1)..(433): Homolog of NCBI NO: 15238829 NR Description: eukaryotic release factor 1 homolog
  misc_feature (49)..(435): Homolog of NCBI NO: 22331351 NR Description: Eukaryotic peptide chain release factor subunit 1
  misc_feature (4)..(435): Homolog of NCBI NO: 15222115 NR Description: eukaryotic peptide chain release factor subunit 1
  misc_feature (1)..(435): Homolog of NCBI NO: 549010 NR Description: Eukaryotic peptide chain release factor subunit (eRF1-3) (Eukaryotic release factor 1-3) (Omnipotent suppressor
MADQESDKNIEIWKIKKLIKGLETARGNGTSMISLIMPPRDQVARVTKMLADEYGTASNIKSRVNRQSVLSAITSAQQRLKLYNKVPPNGLVLYTGTIVTDDGKEKKVTIDFEPFKPINASLYLCDNKFHTEPLNELLESDDKFGFIVMDGNGTLFGTLSGNTREVLHKFTVDLPKKHGRGGQSALRFARLRMEKRHNYVRKTAELATQFYINPATSQPNVSGLILAGSADFKTELSQSELFDPRLQAKILNVVDVSYGGENGFNQAIELSAEILSNVKFIQEKKLIGKYFEEISQDTGKYVFGVEDTLKALEMGAVETLIVWENLDINRYELKNNTTGEIVIKHLGKDQENNQSNFHDAETNAELEVQEKMPLLEWFANEYKRFGCTLEFVTNKSQEGSQFCRGFGGIGGLLRYQLDMRTFDELSDGEVYEDSD

SEQ ID NO: 49550 - protein, 404 aa, Arabidopsis thaliana
  peptide (1)..(404): Ceres Seq. ID no. 13588797
  misc_feature (249)..(387): Pfam Name: eRF1 domain 3 Pfam Description: eRF1 domain 3
  misc_feature (1)..(388): Homolog of NCBI NO: 17563932 NR Description: Eukaryotic peptide chain release factor
  misc_feature (1)..(402): Homolog of NCBI NO: 15213995 NR Description: Eukaryotic peptide chain release factor subunit 1
  misc_feature (1)..(404): Homolog of NCBI NO: 18250310 NR Description: eukaryotic release factor 1 [Chlamydomonas
  misc_feature (1)..(402): Homolog of NCBI NO: 34907268 NR Description: putative peptide chain release factor subunit 1
  misc_feature (1)..(402): Homolog of NCBI NO: 15215863 NR Description: AT5g47880/MCA23_22 [Arabidopsis thaliana]
  misc_feature (1)..(402): Homolog of NCBI NO: 1155261 NR Description: eukaryotic release factor 1 homolog
  misc_feature (1)..(402): Homolog of NCBI NO: 15238829 NR Description: eukaryotic release factor 1 homolog
  misc_feature (18)..(404): Homolog of NCBI NO: 22331351 NR Description: Eukaryotic peptide chain release factor subunit 1
  misc_feature (1)..(404): Homolog of NCBI NO: 15222115 NR Description: eukaryotic peptide chain release factor subunit 1
  misc_feature (1)..(404): Homolog of NCBI NO: 549010 NR Description: Eukaryotic peptide chain release factor subunit (eRF1-3) (Eukaryotic release factor 1-3) (Omnipotent suppressor
MISLIMPPRDQVARVTKMLADEYGTASNIKSRVNRQSVLSAITSAQQRLKLYNKVPPNGLVLYTGTIVTDDGKEKKVTIDFEPFKPINASLYLCDNKFHTEPLNELLESDDKFGFIVMDGNGTLFGTLSGNTREVLHKFTVDLPKKHGRGGQSALRFARLRMEKRHNYVRKTAELATQFYINPATSQPNVSGLILAGSADFKTELSQSELFDPRLQAKILNVVDVSYGGENGFNQAIELSAEILSNVKFIQEKKLIGKYFEEISQDTGKYVFGVEDTLKALEMGAVETLIVWENLDINRYELKNNTTGEIVIKHLGKDQENNQSNFHDAETNAELEVQEKMPLLEWFANEYKRFGCTLEFVTNKSQEGSQFCRGFGGIGGLLRYQLDMRTFDELSDGEVYEDSD

SEQ ID NO: 49551 - protein, 399 aa, Arabidopsis thaliana
  peptide (1)..(399): Ceres Seq. ID no. 13588798
  misc_feature (244)..(382): Pfam Name: eRF1 domain 3 Pfam Description: eRF1 domain 3
  misc_feature (1)..(383): Homolog of NCBI NO: 17563932 NR Description: Eukaryotic peptide chain release factor
  misc_feature (1)..(397): Homolog of NCBI NO: 15213995 NR Description: Eukaryotic peptide chain release factor subunit 1
  misc_feature (1)..(399): Homolog of NCBI NO: 18250310 NR Description: eukaryotic release factor 1 [Chlamydomonas
  misc_feature (1)..(397): Homolog of NCBI NO: 34907268 NR Description: putative peptide chain release factor subunit 1
  misc_feature (1)..(397): Homolog of NCBI NO: 15215863 NR Description: AT5g47880/MCA23_22 [Arabidopsis thaliana]
  misc_feature (1)..(397): Homolog of NCBI NO: 1155261 NR Description: eukaryotic release factor 1 homolog
  misc_feature (1)..(397): Homolog of NCBI NO: 15238829 NR Description: eukaryotic release factor 1 homolog
  misc_feature (13)..(399): Homolog of NCBI NO: 22331351 NR Description: Eukaryotic peptide chain release factor subunit 1
  misc_feature (1)..(399): Homolog of NCBI NO: 15222115 NR Description: eukaryotic peptide chain release factor subunit 1
  misc_feature (1)..(399): Homolog of NCBI NO: 549010 NR Description: Eukaryotic peptide chain release factor subunit (eRF1-3) (Eukaryotic release factor 1-3) (Omnipotent suppressor
MPPRDQVARVTKMLADEYGTASNIKSRVNRQSVLSAITSAQQRLKLYNKVPPNGLVLYTGTIVTDDGKEKKVTIDFEPFKPINASLYLCDNKFHTEPLNELLESDDKFGFIVMDGNGTLFGTLSGNTREVLHKFTVDLPKKHGRGGQSALRFARLRMEKRHNYVRKTAELATQFYINPATSQPNVSGLILAGSADFKTELSQSELFDPRLQAKILNVVDVSYGGENGFNQAIELSAEILSNVKFIQEKKLIGKYFEEISQDTGKYVFGVEDTLKALEMGAVETLIVWENLDINRYELKNNTTGEIVIKHLGKDQENNQSNFHDAETNAELEVQEKMPLLEWFANEYKRFGCTLEFVTNKSQEGSQFCRGFGGIGGLLRYQLDMRTFDELSDGEVYEDSD

SEQ ID NO: 49552 - DNA, 1873 bp, Arabidopsis thaliana
  misc_feature (1)..(1873): Ceres Seq. ID no. 12591220
  misc_feature: MA Experiment ID: 20000185 Result: Up-regulated in Transcription
  misc_feature: MA Experiment 20000185 PARAMETER Experiment Name: At_Roots__P Parameter: Age (day) Value: 7 vs. 21
  misc_feature: MA Experiment 20000185 PARAMETER Experiment Name: At_Roots__P Parameter: Organism Value: A. thaliana
  misc_feature: MA Experiment 20000185 PARAMETER Experiment Name: At_Roots__P Parameter: Tissue Value: Roots vs. Whole Plant
  misc_feature: MA Experiment ID: 20000227 Result: Down-regulated in Transcription
  misc_feature: MA Experiment 20000227 PARAMETER Experiment Name: At_Root-Tips-vs-Tops_P Parameter: Tissue Value: Root Tips vs. Root Tops
  misc_feature: MA Experiment ID: 20000235 Result: Down-regulated in Transcription
  misc_feature: MA Experiment 20000235 PARAMETER Experiment Name: At_Siliques_P Parameter: Age (day) Value: 21
  misc_feature: MA Experiment 20000235 PARAMETER Experiment Name: At_Siliques_P Parameter: Organism Value: A. thaliana
  misc_feature: MA Experiment 20000235 PARAMETER Experiment Name: At_Siliques_P Parameter: Plant Line Value: WS
  misc_feature: MA Experiment 20000235 PARAMETER Experiment Name: At_Siliques_P Parameter: Tissue Value: 5-10mm Siliques vs. Whole Plant
  misc_feature: MA Experiment ID: 20000265 Result: Down-regulated in Transcription
  misc_feature: MA Experiment 20000265 PARAMETER Experiment Name: At_Open_Flower_P Parameter: Age (day) Value: 21
  misc_feature: MA Experiment 20000265 PARAMETER Experiment Name: At_Open_Flower_P Parameter: Plant Line Value: WS
  misc_feature: MA Experiment 20000265 PARAMETER Experiment Name: At_Open_Flower_P Parameter: Tissue Value: Closed Flower vs. Whole Plant
  misc_feature: MA Experiment ID: 20000286 Result: Down-regulated in Transcription
  misc_feature: MA Experiment 20000286 PARAMETER Experiment Name: At_Open_Flower_P Parameter: Age (day) Value: 21
  misc_feature: MA Experiment 20000286 PARAMETER Experiment Name: At_Open_Flower_P Parameter: Plant Line Value: WS
  misc_feature: MA Experiment 20000286 PARAMETER Experiment Name: At_Open_Flower_P Parameter: Tissue Value: Half Open vs. Whole Plant
  misc_feature: MA Experiment ID: 20000438 Result: Down-regulated in Transcription
  misc_feature: MA Experiment 20000438 PARAMETER Experiment Name: At_Shoots__P Parameter: Age (day) Value: 14
  misc_feature: MA Experiment 20000438 PARAMETER Experiment Name: At_Shoots__P Parameter: Tissue Value: Shoots vs. Whole Plant
  misc_feature: MA Experiment ID: 20000439 Result: Up-regulated in Transcription
  misc_feature: MA Experiment 20000439 PARAMETER Experiment Name: At_Roots__P Parameter: Age (day) Value: 14 vs. 21
  misc_feature: MA Experiment 20000439 PARAMETER Experiment Name: At_Roots__P Parameter: Organism Value: A. thaliana
  misc_feature: MA Experiment 20000439 PARAMETER Experiment Name: At_Roots__P Parameter: Tissue Value: Roots vs. Whole Plant
  misc_feature: MA Experiment ID: 20000495 Result: Up-regulated in Transcription
  misc_feature: MA Experiment 20000495 PARAMETER Experiment Name: At_Guard_Cells_P Parameter: Harvest Date Value: 8/2/2002
  misc_feature: MA Experiment 20000495 PARAMETER Experiment Name: At_Guard_Cells_P Parameter: Organism Value: A. thaliana
  misc_feature: MA Experiment 20000495 PARAMETER Experiment Name: At_Guard_Cells_P Parameter: Tissue Value: Guard Cells vs. Leaves
  misc_feature: MA Experiment ID: 20000794 Result: Up-regulated in Transcription
  misc_feature: MA Experiment 20000794 PARAMETER Experiment Name: At_Petals_P Parameter: Age (day) Value: 23-25 days
  misc_feature: MA Experiment 20000794 PARAMETER Experiment Name: At_Petals_P Parameter: Plant Line Value: WS
  misc_feature: MA Experiment 20000794 PARAMETER Experiment Name: At_Petals_P Parameter: Tissue Value: Petals vs. Whole plant
  misc_feature: MA Experiment ID: 20001556 Result: Down-regulated in Transcription
  misc_feature: MA Experiment 20001556 PARAMETER Experiment Name: At_Drought_Soil_Dry_P Parameter: Age (day) Value: 26
  misc_feature: MA Experiment 20001556 PARAMETER Experiment Name: At_Drought_Soil_Dry_P Parameter: Organism Value: A. thaliana
  misc_feature: MA Experiment 20001556 PARAMETER Experiment Name: At_Drought_Soil_Dry_P Parameter: Plant Line Value: WS
  misc_feature: MA Experiment 20001556 PARAMETER Experiment Name: At_Drought_Soil_Dry_P Parameter: Post Timepoint (hr) Value: None
  misc_feature: MA Experiment 20001556 PARAMETER Experiment Name: At_Drought_Soil_Dry_P Parameter: Post-Treatment Value: None
  misc_feature: MA Experiment 20001556 PARAMETER Experiment Name: At_Drought_Soil_Dry_P Parameter: Timepoint (day) Value: 12
  misc_feature: MA Experiment 20001556 PARAMETER Experiment Name: At_Drought_Soil_Dry_P Parameter: Treatment Value: Drought vs. No Drought
  misc_feature: MA Experiment ID: 20001560 Result: Down-regulated in Transcription
  misc_feature: MA Experiment 20001560 PARAMETER Experiment Name: At_Drought_Soil_Dry_P Parameter: Age (day) Value: 28
  misc_feature: MA Experiment 20001560 PARAMETER Experiment Name: At_Drought_Soil_Dry_P Parameter: Organism Value: A. thaliana
  misc_feature: MA Experiment 20001560 PARAMETER Experiment Name: At_Drought_Soil_Dry_P Parameter: Plant Line Value: WS
  misc_feature: MA Experiment 20001560 PARAMETER Experiment Name: At_Drought_Soil_Dry_P Parameter: Post Timepoint (hr) Value: None
  misc_feature: MA Experiment 20001560 PARAMETER Experiment Name: At_Drought_Soil_Dry_P Parameter: Post-Treatment Value: None
  misc_feature: MA Experiment 20001560 PARAMETER Experiment Name: At_Drought_Soil_Dry_P Parameter: Timepoint (day) Value: 14
  misc_feature: MA Experiment 20001560 PARAMETER Experiment Name: At_Drought_Soil_Dry_P Parameter: Treatment Value: Drought vs. No Drought
  misc_feature: MA Experiment ID: 20001905 Result: Down-regulated in Transcription
  misc_feature: MA Experiment 20001905 PARAMETER Experiment Name: At_Drought_Reproduction_P Parameter: Age (day) Value: 40
  misc_feature: MA Experiment 20001905 PARAMETER Experiment Name: At_Drought_Reproduction_P Parameter: Organism Value: A. thaliana
  misc_feature: MA Experiment 20001905 PARAMETER Experiment Name: At_Drought_Reproduction_P Parameter: Plant Line Value: WS
  misc_feature: MA Experiment 20001905 PARAMETER Experiment Name: At_Drought_Reproduction_P Parameter: Timepoint (day) Value: 10
  misc_feature: MA Experiment 20001905 PARAMETER Experiment Name: At_Drought_Reproduction_P Parameter: Tissue Value: Rosettes
  misc_feature: MA Experiment 20001905 PARAMETER Experiment Name: At_Drought_Reproduction_P Parameter: Treatment Value: Drought vs. No Drought
acacacacttagagaaagcagagcagagcatagagaaaaacataacaatggaggttgagaagacagagaagaacattgcagaggatgatgagtctaagatcatctacagaggatggaaagtcatgcccttcatcattggaaatgagacatttgaaaaattggggattgttggaagttcatcgaatctggttatatacttaacgacggttttcaacatgaagagcatcacggctgcgaaagtcgtcaacatctacggtggcacaagcaactttggcaccatcgtcgctgctttcctctgtgactcctactttggccgctacaagaccctatctttcgccatgatcgcttgctttctcggttcggtggcaatggatctaacggctgtgattcatcccctgcatccagctcaatgcgctaaggaaataggaagcgtgtgcaatgggccatccatcggacaaatcatgtttctcgccggagcaatggttttgctggtgatcggagccggtgggattaggccatgcaatcttccatttggtgctgatcagttcgatccgaagacaaaagaagggaaacgagggattgagagtttcttcaattggtatttcttcaccttcacgtttgctcagatggtgtcgttaaccctcatcgtctatgttcagtcaaacgtgagctggagcattggtttagccatcccagctattctaatgctacttggttgcatcatattcttcgctggttctaagctctatgtcaaggttaaagctagtggcagtcccattcacagcataactcgtgtcattgttgtcgcgatcaagaagaggcggttaaagcccgttgggcctaacgagctttacaactacatcgccagtgatttcaagaactcgaaattgggccatacagagcagttcaggtttcttgacaaatcggcaatccaaacacaagacgacaagctgaacaaagatgggtcgccggtggatgcatggaaactctgcagtatgcaacaagtggaggaagttaaatgcgtgatccgggtgcttccggtttggctctcggccgccttattctacctagcttacattcaacaaacaacctacacaatctttcagtctcttcaatccgatagacgccttggtccaggaagtttccagatcccggccggttcttataccgtcttcctaatgcttggaatgacgatattcatacctatctatgaccgcgtccttgtacctttccttagaaagtatacaggcagagacggcggtatcacacaactgcagagagttggagcaggactgtttctatgcatcacaagtatgatggtgtctgcaattgtagaacaatacagaagaaaggtagctctcacaaaaccgacgctagggttggccccaagaaaaggcgcaatctcttcgatgtccggtatgtggttgattcctcagctagtgctaatgggtatcgcggacgccctcgctggagttggacaaatggagttttactacaaacagtttccagagaacatgcgaagttttgctggttctctgtattattgtggaatcggattggcgagttacctcagcacctttttgttatcggcggtacacgataccacagagggattttcaggaggaagttggcttccggaagatttaaacaagggaagattggagtatttctacttcttggttgctggtatgatgactctaaacttggcctatttcttgttggtctcacattggtaccgttacaaagatgttgtggccaaggacaaggacatggacaagacttctgctgagtttgataaggtgtcagtgtaataaagatctttcctttgactctttggtttaggggctttgagacaataaaaatacaacctttg

SEQ ID NO: 49553 - protein, 602 aa, Arabidopsis thaliana
  peptide (1)..(602): Ceres Seq. ID no. 12591221
  misc_feature (106)..(517): Pfam Name: POT family Pfam Description: POT family
  misc_feature (27)..(590): Homolog of NCBI NO: 16226701 NR Description: AT3g47960/T17F15_170 [Arabidopsis thaliana]
  misc_feature (27)..(590): Homolog of NCBI NO: 18408546 NR Description: putative peptide transporter
  misc_feature (27)..(590): Homolog of NCBI NO: 7488141 NR Description: probable peptide transport protein T17F15.170 -
  misc_feature (18)..(581): Homolog of NCBI NO: 15241927 NR Description: peptide transporter; protein id: At5g62680.1
  misc_feature (16)..(602): Homolog of NCBI NO: 15221883 NR Description: peptide transporter, putative
THLEKAEQSIEKNITMEVEKTEKNIAEDDESKIIYRGWKVMPFIIGNETFEKLGIVGSSSNLVIYLTTVFNMKSITAAKVVNIYGGTSNFGTIVAAFLCDSYFGRYKTLSFAMIACFLGSVAMDLTAVIHPLHPAQCAKEIGSVCNGPSIGQIMFLAGAMVLLVIGAGGIRPCNLPFGADQFDPKTKEGKRGIESFFNWYFFTFTFAQMVSLTLIVYVQSNVSWSIGLAIPAILMLLGCIIFFAGSKLYVKVKASGSPIHSITRVIVVAIKKRRLKPVGPNELYNYIASDFKNSKLGHTEQFRFLDKSAIQTQDDKLNKDGSPVDAWKLCSMQQVEEVKCVIRVLPVWLSAALFYLAYIQQTTYTIFQSLQSDRRLGPGSFQIPAGSYTVFLMLGMTIFIPIYDRVLVPFLRKYTGRDGGITQLQRVGAGLFLCITSMMVSAIVEQYRRKVALTKPTLGLAPRKGAISSMSGMWLIPQLVLMGIADALAGVGQMEFYYKQFPENMRSFAGSLYYCGIGLASYLSTFLLSAVHDTTEGFSGGSWLPEDLNKGRLEYFYFLVAGMMTLNLAYFLLVSHWYRYKDVVAKDKDMDKTSAEFDKVSV

SEQ ID NO: 49554 - protein, 587 aa, Arabidopsis thaliana
  peptide (1)..(587): Ceres Seq. ID no. 12591222
  misc_feature (91)..(502): Pfam Name: POT family Pfam Description: POT family
  misc_feature (12)..(575): Homolog of NCBI NO: 16226701 NR Description: AT3g47960/T17F15_170 [Arabidopsis thaliana]
  misc_feature (12)..(575): Homolog of NCBI NO: 18408546 NR Description: putative peptide transporter
  misc_feature (12)..(575): Homolog of NCBI NO: 7488141 NR Description: probable peptide transport protein T17F15.170 -
  misc_feature (3)..(566): Homolog of NCBI NO: 15241927 NR Description: peptide transporter; protein id: At5g62680.1
  misc_feature (1)..(587): Homolog of NCBI NO: 15221883 NR Description: peptide transporter, putative
MEVEKTEKNIAEDDESKIIYRGWKVMPFIIGNETFEKLGIVGSSSNLVIYLTTVFNMKSITAAKVVNIYGGTSNFGTIVAAFLCDSYFGRYKTLSFAMIACFLGSVAMDLTAVIHPLHPAQCAKEIGSVCNGPSIGQIMFLAGAMVLLVIGAGGIRPCNLPFGADQFDPKTKEGKRGIESFFNWYFFTFTFAQMVSLTLIVYVQSNVSWSIGLAIPAILMLLGCIIFFAGSKLYVKVKASGSPIHSITRVIVVAIKKRRLKPVGPNELYNYIASDFKNSKLGHTEQFRFLDKSAIQTQDDKLNKDGSPVDAWKLCSMQQVEEVKCVIRVLPVWLSAALFYLAYIQQTTYTIFQSLQSDRRLGPGSFQIPAGSYTVFLMLGMTIFIPIYDRVLVPFLRKYTGRDGGITQLQRVGAGLFLCITSMMVSAIVEQYRRKVALTKPTLGLAPRKGAISSMSGMWLIPQLVLMGIADALAGVGQMEFYYKQFPENMRSFAGSLYYCGIGLASYLSTFLLSAVHDTTEGFSGGSWLPEDLNKGRLEYFYFLVAGMMTLNLAYFLLVSHWYRYKDVVAKDKDMDKTSAEFDKVSV

SEQ ID NO: 49555 - protein, 562 aa, Arabidopsis thaliana
  peptide (1)..(562): Ceres Seq. ID no. 12591223
  misc_feature (66)..(477): Pfam Name: POT family Pfam Description: POT family
  misc_feature (1)..(550): Homolog of NCBI NO: 16226701 NR Description: AT3g47960/T17F15_170 [Arabidopsis thaliana]
  misc_feature (1)..(550): Homolog of NCBI NO: 18408546 NR Description: putative peptide transporter
  misc_feature (1)..(550): Homolog of NCBI NO: 7488141 NR Description: probable peptide transport protein T17F15.170 -
  misc_feature (1)..(541): Homolog of NCBI NO: 15241927 NR Description: peptide transporter; protein id: At5g62680.1
  misc_feature (1)..(562): Homolog of NCBI NO: 15221883 NR Description: peptide transporter, putative
MPFIIGNETFEKLGIVGSSSNLVIYLTTVFNMKSITAAKVVNIYGGTSNFGTIVAAFLCDSYFGRYKTLSFAMIACFLGSVAMDLTAVIHPLHPAQCAKEIGSVCNGPSIGQIMFLAGAMVLLVIGAGGIRPCNLPFGADQFDPKTKEGKRGIESFFNWYFFTFTFAQMVSLTLIVYVQSNVSWSIGLAIPAILMLLGCIIFFAGSKLYVKVKASGSPIHSITRVIVVAIKKRRLKPVGPNELYNYIASDFKNSKLGHTEQFRFLDKSAIQTQDDKLNKDGSPVDAWKLCSMQQVEEVKCVIRVLPVWLSAALFYLAYIQQTTYTIFQSLQSDRRLGPGSFQIPAGSYTVFLMLGMTIFIPIYDRVLVPFLRKYTGRDGGITQLQRVGAGLFLCITSMMVSAIVEQYRRKVALTKPTLGLAPRKGAISSMSGMWLIPQLVLMGIADALAGVGQMEFYYKQFPENMRSFAGSLYYCGIGLASYLSTFLLSAVHDTTEGFSGGSWLPEDLNKGRLEYFYFLVAGMMTLNLAYFLLVSHWYRYKDVVAKDKDMDKTSAEFDKVSV

SEQ ID NO: 49556 - DNA, 874 bp, Arabidopsis thaliana
  misc_feature (1)..(874): Ceres Seq. ID no. 12592182
  misc_feature: MA Experiment ID: 20000227 Result: Up-regulated in Transcription
  misc_feature: MA Experiment 20000227 PARAMETER Experiment Name: At_Root-Tips-vs-Tops_P Parameter: Tissue Value: Root Tips vs. Root Tops
  misc_feature: MA Experiment ID: 20001558 Result: Up-regulated in Transcription
  misc_feature: MA Experiment 20001558 PARAMETER Experiment Name: At_Drought_Soil_Dry_P Parameter: Age (day) Value: 27
  misc_feature: MA Experiment 20001558 PARAMETER Experiment Name: At_Drought_Soil_Dry_P Parameter: Organism Value: A. thaliana
  misc_feature: MA Experiment 20001558 PARAMETER Experiment Name: At_Drought_Soil_Dry_P Parameter: Plant Line Value: WS
  misc_feature: MA Experiment 20001558 PARAMETER Experiment Name: At_Drought_Soil_Dry_P Parameter: Post Timepoint (hr) Value: 6
  misc_feature: MA Experiment 20001558 PARAMETER Experiment Name: At_Drought_Soil_Dry_P Parameter: Post-Treatment Value: Re-Water vs. No Drought
  misc_feature: MA Experiment 20001558 PARAMETER Experiment Name: At_Drought_Soil_Dry_P Parameter: Timepoint (day) Value: 13
  misc_feature: MA Experiment 20001558 PARAMETER Experiment Name: At_Drought_Soil_Dry_P Parameter: Treatment Value: Drought vs. No Drought
  misc_feature: MA Experiment ID: 20001911 Result: Down-regulated in Transcription
  misc_feature: MA Experiment 20001911 PARAMETER Experiment Name: At_Drought_Reproduction_P Parameter: Age (day) Value: 40
  misc_feature: MA Experiment 20001911 PARAMETER Experiment Name: At_Drought_Reproduction_P Parameter: Organism Value: A. thaliana
  misc_feature: MA Experiment 20001911 PARAMETER Experiment Name: At_Drought_Reproduction_P Parameter: Plant Line Value: WS
  misc_feature: MA Experiment 20001911 PARAMETER Experiment Name: At_Drought_Reproduction_P Parameter: Timepoint (day) Value: 10
  misc_feature: MA Experiment 20001911 PARAMETER Experiment Name: At_Drought_Reproduction_P Parameter: Tissue Value: Flowers
  misc_feature: MA Experiment 20001911 PARAMETER Experiment Name: At_Drought_Reproduction_P Parameter: Treatment Value: Drought vs. No Drought
gcactgacatgaattctcaacgaagctaagatcaattcgatagagagtgaaaactatgaggaatctgcgaatcatctcctctcacttctcacgagttttgaaatccaccgagacacgctcaagttccgttcaattattcacgatccaatctcggagctactcatctccggcgacgcaatcggagaacgtgtccaaaatcgtcaatgagctatcgaatctcactcttttggaaacaatggatcttactgagatccttaggcagaagctaaacatcagtgaattgcctgtgatggcggcgatgatgccagggatgtcattaccgggatctggagctagtaaatccgccggcggagaagggaaagagaagaagaaggaagcaaagactgcgtttgatgtgatgcttcaagcgtacgatgcagtgtcgaagataaaggtgattaaagaagtgagaacgattacggcattggggttgaaggaagcgaaagatttggtggagaaagctccaacattgttgaagaaaggagttagtaaggaagaagcagagaagatcattgagaagttgaaggctgttggagctaaagttgctatggagtgaccatttttaggtgttattaaaatggagcatgagcaagaacaaatgaagcttctgctgagtagtccttcctagtgtttattacaaatgtaagatgtgatggaaagtcatcagcagctcttttctttagagatagaaacagatttttgtcttctatcaaatatacacgaaggcttgttagaagcaaagttctctcttctttggatcaatcattctctcagttcttggtttgtactaacagttgatgatttctttcatataataatgaatcatgttatttcc

SEQ ID NO: 49557 - protein, 179 aa, Arabidopsis thaliana
  peptide (1)..(179): Ceres Seq. ID no. 12592183
  misc_feature (112)..(179): Pfam Name: Ribosomal protein L7/L12 C-terminal domain Pfam Description: Ribosomal protein L7/L12 C-terminal domain
  misc_feature (86)..(179): Homolog of NCBI NO: 15230614 NR Description: hypothetical protein
  misc_feature (3)..(179): Homolog of NCBI NO: 32411687 NR Description: hypothetical protein [Neurospora crassa]
  misc_feature (7)..(179): Homolog of NCBI NO: 19075581 NR Description: putative 60s ribosomal protein l7/l12
  misc_feature (3)..(179): Homolog of NCBI NO: 6321369 NR Description: Protein required for cell viability; Ygl068wp
  misc_feature (7)..(179): Homolog of NCBI NO: 15235649 NR Description: ribosomal - like protein
  misc_feature (26)..(179): Homolog of NCBI NO: 34913132 NR Description: contains EST AU058363(E50673)~ribosomal-like
  misc_feature (53)..(179): Homolog of NCBI NO: 15209174 NR Description: hypothetical protein [Solanum demissum]
  misc_feature (14)..(179): Homolog of NCBI NO: 40745733 NR Description: hypothetical protein AN2057.2 [Aspergillus
  misc_feature (29)..(179): Homolog of NCBI NO: 18409467 NR Description: expressed protein
  misc_feature (1)..(179): Homolog of NCBI NO: 15234393 NR Description: ribosomal protein
MRNLRIISSHFSRVLKSTETRSSSVQLFTIQSRSYSSPATQSENVSKIVNELSNLTLLETMDLTEILRQKLNISELPVMAAMMPGMSLPGSGASKSAGGEGKEKKKEAKTAFDVMLQAYDAVSKIKVIKEVRTITALGLKEAKDLVEKAPTLLKKGVSKEEAEKIIEKLKAVGAKVAME

SEQ ID NO: 49558 - protein, 119 aa, Arabidopsis thaliana
  peptide (1)..(119): Ceres Seq. ID no. 12592184
  misc_feature (52)..(119): Pfam Name: Ribosomal protein L7/L12 C-terminal domain Pfam Description: Ribosomal protein L7/L12 C-terminal domain
  misc_feature (26)..(119): Homolog of NCBI NO: 15230614 NR Description: hypothetical protein
  misc_feature (1)..(119): Homolog of NCBI NO: 32411687 NR Description: hypothetical protein [Neurospora crassa]
  misc_feature (1)..(119): Homolog of NCBI NO: 19075581 NR Description: putative 60s ribosomal protein l7/l12
  misc_feature (1)..(119): Homolog of NCBI NO: 6321369 NR Description: Protein required for cell viability; Ygl068wp
  misc_feature (1)..(119): Homolog of NCBI NO: 15235649 NR Description: ribosomal - like protein
  misc_feature (1)..(119): Homolog of NCBI NO: 34913132 NR Description: contains EST AU058363(E50673)~ribosomal-like
  misc_feature (1)..(119): Homolog of NCBI NO: 15209174 NR Description: hypothetical protein [Solanum demissum]
  misc_feature (1)..(119): Homolog of NCBI NO: 40745733 NR Description: hypothetical protein AN2057.2 [Aspergillus
  misc_feature (1)..(119): Homolog of NCBI NO: 18409467 NR Description: expressed protein
  misc_feature (1)..(119): Homolog of NCBI NO: 15234393 NR Description: ribosomal protein
MDLTEILRQKLNISELPVMAAMMPGMSLPGSGASKSAGGEGKEKKKEAKTAFDVMLQAYDAVSKIKVIKEVRTITALGLKEAKDLVEKAPTLLKKGVSKEEAEKIIEKLKAVGAKVAME

SEQ ID NO: 49559 - protein, 101 aa, Arabidopsis thaliana
  peptide (1)..(101): Ceres Seq. ID no. 12592185
  misc_feature (34)..(101): Pfam Name: Ribosomal protein L7/L12 C-terminal domain Pfam Description: Ribosomal protein L7/L12 C-terminal domain
  misc_feature (8)..(101): Homolog of NCBI NO: 15230614 NR Description: hypothetical protein
  misc_feature (1)..(101): Homolog of NCBI NO: 32411687 NR Description: hypothetical protein [Neurospora crassa]
  misc_feature (1)..(101): Homolog of NCBI NO: 19075581 NR Description: putative 60s ribosomal protein l7/l12
  misc_feature (1)..(101): Homolog of NCBI NO: 6321369 NR Description: Protein required for cell viability; Ygl068wp
  misc_feature (1)..(101): Homolog of NCBI NO: 15235649 NR Description: ribosomal - like protein
  misc_feature (1)..(101): Homolog of NCBI NO: 34913132 NR Description: contains EST AU058363(E50673)~ribosomal-like
  misc_feature (1)..(101): Homolog of NCBI NO: 15209174 NR Description: hypothetical protein [Solanum demissum]
  misc_feature (1)..(101): Homolog of NCBI NO: 40745733 NR Description: hypothetical protein AN2057.2 [Aspergillus
  misc_feature (1)..(101): Homolog of NCBI NO: 18409467 NR Description: expressed protein
  misc_feature (1)..(101): Homolog of NCBI NO: 15234393 NR Description: ribosomal protein
MAAMMPGMSLPGSGASKSAGGEGKEKKKEAKTAFDVMLQAYDAVSKIKVIKEVRTITALGLKEAKDLVEKAPTLLKKGVSKEEAEKIIEKLKAVGAKVAME

SEQ ID NO: 49560 - DNA, 1592 bp, Arabidopsis thaliana
  misc_feature (1)..(1592): Ceres Seq. ID no. 14302961
  misc_feature: MA Experiment ID: 20000173 Result: Down-regulated in Transcription
  misc_feature: MA Experiment 20000173 PARAMETER Experiment Name: At_42deg_Heat_P Parameter: Age (day) Value: 14
  misc_feature: MA Experiment 20000173 PARAMETER Experiment Name: At_42deg_Heat_P Parameter: Organism Value: A. thaliana
  misc_feature: MA Experiment 20000173 PARAMETER Experiment Name: At_42deg_Heat_P Parameter: Plant Line Value: WS
  misc_feature: MA Experiment 20000173 PARAMETER Experiment Name: At_42deg_Heat_P Parameter: Temperature (deg C) Value: 42 vs. 22
  misc_feature: MA Experiment 20000173 PARAMETER Experiment Name: At_42deg_Heat_P Parameter: Timepoint (hr) Value: 6
  misc_feature: MA Experiment 20000173 PARAMETER Experiment Name: At_42deg_Heat_P Parameter: Tissue Value: Aerial
  misc_feature: MA Experiment ID: 20000179 Result: Up-regulated in Transcription
  misc_feature: MA Experiment 20000179 PARAMETER Experiment Name: At_Germinating_Seeds_P Parameter: Age (hr) Value: 6 vs. 0
  misc_feature: MA Experiment 20000179 PARAMETER Experiment Name: At_Germinating_Seeds_P Parameter: Tissue Value: Germinating Seeds
  misc_feature: MA Experiment ID: 20000180 Result: Up-regulated in Transcription
  misc_feature: MA Experiment 20000180 PARAMETER Experiment Name: At_Germinating_Seeds_P Parameter: Age (hr) Value: 24 vs. 0
  misc_feature: MA Experiment 20000180 PARAMETER Experiment Name: At_Germinating_Seeds_P Parameter: Tissue Value: Germinating Seeds
  misc_feature: MA Experiment ID: 20000794 Result: Down-regulated in Transcription
  misc_feature: MA Experiment 20000794 PARAMETER Experiment Name: At_Petals_P Parameter: Age (day) Value: 23-25 days
  misc_feature: MA Experiment 20000794 PARAMETER Experiment Name: At_Petals_P Parameter: Plant Line Value: WS
  misc_feature: MA Experiment 20000794 PARAMETER Experiment Name: At_Petals_P Parameter: Tissue Value: Petals vs. Whole plant
  misc_feature: MA Experiment ID: 20001911 Result: Down-regulated in Transcription
  misc_feature: MA Experiment 20001911 PARAMETER Experiment Name: At_Drought_Reproduction_P Parameter: Age (day) Value: 40
  misc_feature: MA Experiment 20001911 PARAMETER Experiment Name: At_Drought_Reproduction_P Parameter: Organism Value: A. thaliana
  misc_feature: MA Experiment 20001911 PARAMETER Experiment Name: At_Drought_Reproduction_P Parameter: Plant Line Value: WS
  misc_feature: MA Experiment 20001911 PARAMETER Experiment Name: At_Drought_Reproduction_P Parameter: Timepoint (day) Value: 10
  misc_feature: MA Experiment 20001911 PARAMETER Experiment Name: At_Drought_Reproduction_P Parameter: Tissue Value: Flowers
  misc_feature: MA Experiment 20001911 PARAMETER Experiment Name: At_Drought_Reproduction_P Parameter: Treatment Value: Drought vs. No Drought
atcgtcttcatcgttaacttcgcagactctgttgattagtcaacacagatcagaatctgaggctttggccgagacgagagaagcagaagaagaaaatggcggagactgtacattctccgatcgttacttacgcatcgatgttatcgcttctcgccttctgtccacctttcgtcattctcctatggtacacaatggttcatcaggatggttctgttactcagacctttggcttcttttgggagaatggagttcaaggacttatcaacatatggccaagacccactttgattgcttggaaaattatattttgctatggagcatttgaagctattcttcagctgcttctgcctggtaaaagagttgagggtccaatatctccagccggaaaccgaccagtttacaaggccaatggtctggctgcttactttgtgacactagcaacctatcttggtctttggtggtttggaatcttcaaccctgcaattgtctatgatcacttgggtgaaatattttcggcactaatattcggaagcttcatattttgtgttttgttgtacataaaaggccatgttgcaccttcatcaagtgactctggttcatgtggtaacctaataattgacttctattggggcatggagttgtaccctcgaattggtaagagctttgacatcaaggtgtttactaattgcagattcggaatgatgtcttgggcagttcttgcagtcacgtactgcataaaacagtatgaaataaatggcaaagtatctgattcaatgctggtgaacaccatcctgatgctggtgtatgtcacaaaattcttctggtgggaagctggttattggaacaccatggacattgcacatgaccgagctggattctatatatgctggggttgcccagtgtgggtgccttctgtctacacttctccaggcatgtaccttgtgaaccaccccgtcgaactcggaactcagttggcaatatacattctcgttgcaggaattctgtgcatttacataaactatgactgtgatagacaaaggcaagagttcaggaggacaaacgggaaatgtttggtttggggaagagccccgtcaaagattgtggcgtcgtatactacaacatctggtgaaactaaaactagtcttctcttaacgtctggatggtggggattggctcgtcatttccattatgttcctgagatcttaagtgctttcttctggaccgtaccggctctcttcgataacttcttggcatacttctacgtcatatttctcacccttcttctctttgatcgagccaagagagacgatgaccgatgccgatcaaagtatgggaaatattggaagctgtattgtgagaaagtcaaatacaggatcattccgggaatttattgattgtaacgaagtctgttgttctcattttctagttattacgttaattcgaacgttggaatcatcaaaagaccgtgccaaaacaaaaatgcaaattgatgcgatagacattcttttgctgatttgtatgctataggttttcaaatctctagctacgcttatgtatttccctagattatcaaagttagcctgccgttttct

SEQ ID NO: 49561 - protein, 432 aa, Arabidopsis thaliana
  peptide (1)..(432): Ceres Seq. ID no. 14302962
  misc_feature (3)..(432): Pfam Name: Ergosterol biosynthesis ERG4/ERG24 family Pfam Description: Ergosterol biosynthesis ERG4/ERG24 family
  misc_feature (13)..(432): Homolog of NCBI NO: 4503321 NR Description: 7-dehydrocholesterol reductase
  misc_feature (13)..(432): Homolog of NCBI NO: 3171089 NR Description: 7-dehydrocholesterol reductase [Homo sapiens]
  misc_feature (14)..(432): Homolog of NCBI NO: 11693158 NR Description: 7-dehydrocholesterol reductase [Rattus
  misc_feature (13)..(432): Homolog of NCBI NO: 6681179 NR Description: 7-dehydrocholesterol reductase [Mus musculus]
  misc_feature (13)..(432): Homolog of NCBI NO: 27924199 NR Description: Similar to 7-dehydrocholesterol reductase
  misc_feature (13)..(432): Homolog of NCBI NO: 38969866 NR Description: 7-dehydrocholesterol reductase [Silurana
  misc_feature (16)..(429): Homolog of NCBI NO: 29654463 NR Description: ergosterol biosynthesis ERG4/ERG24 family protein
  misc_feature (2)..(432): Homolog of NCBI NO: 39726086 NR Description: sterol delta-7 reductase [Tropaeolum majus]
  misc_feature (1)..(432): Homolog of NCBI NO: 1245182 NR Description: sterol delta-7 reductase
  misc_feature (1)..(432): Homolog of NCBI NO: 15222967 NR Description: sterol delta-7 reductase (7-dehydrocholesterol
MAETVHSPIVTYASMLSLLAFCPPFVILLWYTMVHQDGSVTQTFGFFWENGVQGLINIWPRPTLIAWKIIFCYGAFEAILQLLLPGKRVEGPISPAGNRPVYKANGLAAYFVTLATYLGLWWFGIFNPAIVYDHLGEIFSALIFGSFIFCVLLYIKGHVAPSSSDSGSCGNLIIDFYWGMELYPRIGKSFDIKVFTNCRFGMMSWAVLAVTYCIKQYEINGKVSDSMLVNTILMLVYVTKFFWWEAGYWNTMDIAHDRAGFYICWGCPVWVPSVYTSPGMYLVNHPVELGTQLAIYILVAGILCIYINYDCDRQRQEFRRTNGKCLVWGRAPSKIVASYTTTSGETKTSLLLTSGWWGLARHFHYVPEILSAFFWTVPALFDNFLAYFYVIFLTLLLFDRAKRDDDRCRSKYGKYWKLYCEKVKYRIIPGIY

SEQ ID NO: 49562 - protein, 418 aa, Arabidopsis thaliana
  peptide (1)..(418): Ceres Seq. ID no. 14302963
  misc_feature (1)..(418): Pfam Name: Ergosterol biosynthesis ERG4/ERG24 family Pfam Description: Ergosterol biosynthesis ERG4/ERG24 family
  misc_feature (1)..(418): Homolog of NCBI NO: 4503321 NR Description: 7-dehydrocholesterol reductase
  misc_feature (1)..(418): Homolog of NCBI NO: 3171089 NR Description: 7-dehydrocholesterol reductase [Homo sapiens]
  misc_feature (1)..(418): Homolog of NCBI NO: 11693158 NR Description: 7-dehydrocholesterol reductase [Rattus
  misc_feature (1)..(418): Homolog of NCBI NO: 6681179 NR Description: 7-dehydrocholesterol reductase [Mus musculus]
  misc_feature (1)..(418): Homolog of NCBI NO: 27924199 NR Description: Similar to 7-dehydrocholesterol reductase
  misc_feature (1)..(418): Homolog of NCBI NO: 38969866 NR Description: 7-dehydrocholesterol reductase [Silurana
  misc_feature (2)..(415): Homolog of NCBI NO: 29654463 NR Description: ergosterol biosynthesis ERG4/ERG24 family protein
  misc_feature (1)..(418): Homolog of NCBI NO: 39726086 NR Description: sterol delta-7 reductase [Tropaeolum majus]
  misc_feature (1)..(418): Homolog of NCBI NO: 1245182 NR Description: sterol delta-7 reductase
  misc_feature (1)..(418): Homolog of NCBI NO: 15222967 NR Description: sterol delta-7 reductase (7-dehydrocholesterol
MLSLLAFCPPFVILLWYTMVHQDGSVTQTFGFFWENGVQGLINIWPRPTLIAWKIIFCYGAFEAILQLLLPGKRVEGPISPAGNRPVYKANGLAAYFVTLATYLGLWWFGIFNPAIVYDHLGEIFSALIFGSFIFCVLLYIKGHVAPSSSDSGSCGNLIIDFYWGMELYPRIGKSFDIKVFTNCRFGMMSWAVLAVTYCIKQYEINGKVSDSMLVNTILMLVYVTKFFWWEAGYWNTMDIAHDRAGFYICWGCPVWVPSVYTSPGMYLVNHPVELGTQLAIYILVAGILCIYINYDCDRQRQEFRRTNGKCLVWGRAPSKIVASYTTTSGETKTSLLLTSGWWGLARHFHYVPEILSAFFWTVPALFDNFLAYFYVIFLTLLLFDRAKRDDDRCRSKYGKYWKLYCEKVKYRIIPGIY

SEQ ID NO: 49563 - protein, 400 aa, Arabidopsis thaliana
  peptide (1)..(400): Ceres Seq. ID no. 14302964
  misc_feature (1)..(400): Pfam Name: Ergosterol biosynthesis ERG4/ERG24 family Pfam Description: Ergosterol biosynthesis ERG4/ERG24 family
  misc_feature (1)..(400): Homolog of NCBI NO: 4503321 NR Description: 7-dehydrocholesterol reductase
  misc_feature (1)..(400): Homolog of NCBI NO: 3171089 NR Description: 7-dehydrocholesterol reductase [Homo sapiens]
  misc_feature (1)..(400): Homolog of NCBI NO: 11693158 NR Description: 7-dehydrocholesterol reductase [Rattus
  misc_feature (1)..(400): Homolog of NCBI NO: 6681179 NR Description: 7-dehydrocholesterol reductase [Mus musculus]
  misc_feature (1)..(400): Homolog of NCBI NO: 27924199 NR Description: Similar to 7-dehydrocholesterol reductase
  misc_feature (1)..(400): Homolog of NCBI NO: 38969866 NR Description: 7-dehydrocholesterol reductase [Silurana
  misc_feature (1)..(397): Homolog of NCBI NO: 29654463 NR Description: ergosterol biosynthesis ERG4/ERG24 family protein
  misc_feature (1)..(400): Homolog of NCBI NO: 39726086 NR Description: sterol delta-7 reductase [Tropaeolum majus]
  misc_feature (1)..(400): Homolog of NCBI NO: 1245182 NR Description: sterol delta-7 reductase
  misc_feature (1)..(400): Homolog of NCBI NO: 15222967 NR Description: sterol delta-7 reductase (7-dehydrocholesterol
MVHQDGSVTQTFGFFWENGVQGLINIWPRPTLIAWKIIFCYGAFEAILQLLLPGKRVEGPISPAGNRPVYKANGLAAYFVTLATYLGLWWFGIFNPAIVYDHLGEIFSALIFGSFIFCVLLYIKGHVAPSSSDSGSCGNLIIDFYWGMELYPRIGKSFDIKVFTNCRFGMMSWAVLAVTYCIKQYEINGKVSDSMLVNTILMLVYVTKFFWWEAGYWNTMDIAHDRAGFYICWGCPVWVPSVYTSPGMYLVNHPVELGTQLAIYILVAGILCIYINYDCDRQRQEFRRTNGKCLVWGRAPSKIVASYTTTSGETKTSLLLTSGWWGLARHFHYVPEILSAFFWTVPALFDNFLAYFYVIFLTLLLFDRAKRDDDRCRSKYGKYWKLYCEKVKYRIIPGIY

SEQ ID NO: 49564 - DNA, 1698 bp, Arabidopsis thaliana; identical to SEQ ID NO: 46504
  misc_feature (1)..(1698): Ceres Seq. ID no. 12574979
  misc_feature: MA Experiment ID: 20000171 Result: Down-regulated in Transcription
  misc_feature: MA Experiment 20000171 PARAMETER Experiment Name: At_42deg_Heat_P Parameter: Age (day) Value: 14
  misc_feature: MA Experiment 20000171 PARAMETER Experiment Name: At_42deg_Heat_P Parameter: Organism Value: A. thaliana
  misc_feature: MA Experiment 20000171 PARAMETER Experiment Name: At_42deg_Heat_P Parameter: Plant Line Value: WS
  misc_feature: MA Experiment 20000171 PARAMETER Experiment Name: At_42deg_Heat_P Parameter: Temperature (deg C) Value: 42 vs. 22
  misc_feature: MA Experiment 20000171 PARAMETER Experiment Name: At_42deg_Heat_P Parameter: Timepoint (hr) Value: 1
  misc_feature: MA Experiment 20000171 PARAMETER Experiment Name: At_42deg_Heat_P Parameter: Tissue Value: Aerial
  misc_feature: MA Experiment ID: 20000180 Result: Up-regulated in Transcription
  misc_feature: MA Experiment 20000180 PARAMETER Experiment Name: At_Germinating_Seeds_P Parameter: Age (hr) Value: 24 vs. 0
  misc_feature: MA Experiment 20000180 PARAMETER Experiment Name: At_Germinating_Seeds_P Parameter: Tissue Value: Germinating Seeds
  misc_feature: MA Experiment ID: 20000184 Result: Up-regulated in Transcription
  misc_feature: MA Experiment 20000184 PARAMETER Experiment Name: At_Shoots__P Parameter: Age (day) Value: 7
  misc_feature: MA Experiment 20000184 PARAMETER Experiment Name: At_Shoots__P Parameter: Tissue Value: Shoots vs. Whole Plant
  misc_feature: MA Experiment ID: 20000185 Result: Down-regulated in Transcription
  misc_feature: MA Experiment 20000185 PARAMETER Experiment Name: At_Roots__P Parameter: Age (day) Value: 7 vs. 21
  misc_feature: MA Experiment 20000185 PARAMETER Experiment Name: At_Roots__P Parameter: Organism Value: A. thaliana
  misc_feature: MA Experiment 20000185 PARAMETER Experiment Name: At_Roots__P Parameter: Tissue Value: Roots vs. Whole Plant
  misc_feature: MA Experiment ID: 20000234 Result: Up-regulated in Transcription
  misc_feature: MA Experiment 20000234 PARAMETER Experiment Name: At_Siliques_P Parameter: Age (day) Value: 21
  misc_feature: MA Experiment 20000234 PARAMETER Experiment Name: At_Siliques_P Parameter: Organism Value: A. thaliana
  misc_feature: MA Experiment 20000234 PARAMETER Experiment Name: At_Siliques_P Parameter: Plant Line Value: WS
  misc_feature: MA Experiment 20000234 PARAMETER Experiment Name: At_Siliques_P Parameter: Tissue Value: Less Than 5mm Siliques vs. Whole Plant
  misc_feature: MA Experiment ID: 20000286 Result: Up-regulated in Transcription
  misc_feature: MA Experiment 20000286 PARAMETER Experiment Name: At_Open_Flower_P Parameter: Age (day) Value: 21
  misc_feature: MA Experiment 20000286 PARAMETER Experiment Name: At_Open_Flower_P Parameter: Plant Line Value: WS
  misc_feature: MA Experiment 20000286 PARAMETER Experiment Name: At_Open_Flower_P Parameter: Tissue Value: Half Open vs. Whole Plant
  misc_feature: MA Experiment ID: 20000438 Result: Up-regulated in Transcription
  misc_feature: MA Experiment 20000438 PARAMETER Experiment Name: At_Shoots__P Parameter: Age (day) Value: 14
  misc_feature: MA Experiment 20000438 PARAMETER Experiment Name: At_Shoots__P Parameter: Tissue Value: Shoots vs. Whole Plant
  misc_feature: MA Experiment ID: 20000794 Result: Up-regulated in Transcription
  misc_feature: MA Experiment 20000794 PARAMETER Experiment Name: At_Petals_P Parameter: Age (day) Value: 23-25 days
  misc_feature: MA Experiment 20000794 PARAMETER Experiment Name: At_Petals_P Parameter: Plant Line Value: WS
  misc_feature: MA Experiment 20000794 PARAMETER Experiment Name: At_Petals_P Parameter: Tissue Value: Petals vs. Whole plant
  misc_feature: MA Experiment ID: 20001247 Result: Down-regulated in Transcription
  misc_feature: MA Experiment 20001247 PARAMETER Experiment Name: At_Far-red-induction_P Parameter: Age (day) Value: 7
  misc_feature: MA Experiment 20001247 PARAMETER Experiment Name: At_Far-red-induction_P Parameter: Light Value: Far-red vs. White
  misc_feature: MA Experiment 20001247 PARAMETER Experiment Name: At_Far-red-induction_P Parameter: Organism Value: A. thaliana
  misc_feature: MA Experiment 20001247 PARAMETER Experiment Name: At_Far-red-induction_P Parameter: Plant Line Value: Columbia
  misc_feature: MA Experiment 20001247 PARAMETER Experiment Name: At_Far-red-induction_P Parameter: Timepoint (hr) Value: 1
  misc_feature: MA Experiment 20001247 PARAMETER Experiment Name: At_Far-red-induction_P Parameter: Tissue Value: Whole Plant
  misc_feature: MA Experiment ID: 20001248 Result: Down-regulated in Transcription
  misc_feature: MA Experiment 20001248 PARAMETER Experiment Name: At_Far-red-induction_P Parameter: Age (day) Value: 7
  misc_feature: MA Experiment 20001248 PARAMETER Experiment Name: At_Far-red-induction_P Parameter: Light Value: Far-red vs. White
  misc_feature: MA Experiment 20001248 PARAMETER Experiment Name: At_Far-red-induction_P Parameter: Organism Value: A. thaliana
  misc_feature: MA Experiment 20001248 PARAMETER Experiment Name: At_Far-red-induction_P Parameter: Plant Line Value: Columbia
  misc_feature: MA Experiment 20001248 PARAMETER Experiment Name: At_Far-red-induction_P Parameter: Timepoint (hr) Value: 4
  misc_feature: MA Experiment 20001248 PARAMETER Experiment Name: At_Far-red-induction_P Parameter: Tissue Value: Whole Plant
  misc_feature: MA Experiment ID: 20001450 Result: Down-regulated in Transcription
  misc_feature: MA Experiment 20001450 PARAMETER Experiment Name: At_Far-red-induction_P Parameter: Age (day) Value: 7
  misc_feature: MA Experiment 20001450 PARAMETER Experiment Name: At_Far-red-induction_P Parameter: Light Value: Far-red vs. White
  misc_feature: MA Experiment 20001450 PARAMETER Experiment Name: At_Far-red-induction_P Parameter: Organism Value: A. thaliana
  misc_feature: MA Experiment 20001450 PARAMETER Experiment Name: At_Far-red-induction_P Parameter: Plant Line Value: Columbia
  misc_feature: MA Experiment 20001450 PARAMETER Experiment Name: At_Far-red-induction_P Parameter: Timepoint (hr) Value: 8
  misc_feature: MA Experiment 20001450 PARAMETER Experiment Name: At_Far-red-induction_P Parameter: Tissue Value: Whole Plant

SEQ ID NO: 49565 - protein, 485 aa, Arabidopsis thaliana; identical to SEQ ID NO: 46505
  peptide (1)..(485): Ceres Seq. ID no. 12574980
  misc_feature (23)..(484): Pfam Name: UDP-glucoronosyl and UDP-glucosyl transferase Pfam Description: UDP-glucoronosyl and UDP-glucosyl transferase
  misc_feature (23)..(484): Pfam Name: UDP-glucoronosyl and UDP-glucosyl transferase Pfam Description: UDP-glucoronosyl and UDP-glucosyl transferase
  misc_feature (1)..(480): Homolog of NCBI NO: 15222348 NR Description: UDP-glucose glucosyltransferase, putative
  misc_feature (55)..(485): Homolog of NCBI NO: 15233155 NR Description: putative UDP-glucose glucosyltransferase; protein
  misc_feature (1)..(466): Homolog of NCBI NO: 13605541 NR Description: AT3g21750/MSD21_6 [Arabidopsis thaliana]
  misc_feature (2)..(485): Homolog of NCBI NO: 15233158 NR Description: putative UDP-glucose glucosyltransferase; protein
  misc_feature (1)..(484): Homolog of NCBI NO: 15233149 NR Description: UDP-glycosyltransferase family; protein id:
  misc_feature (1)..(480): Homolog of NCBI NO: 15222348 NR Description: UDP-glucose glucosyltransferase, putative
  misc_feature (1)..(466): Homolog of NCBI NO: 13605541 NR Description: AT3g21750/MSD21_6 [Arabidopsis thaliana]
  misc_feature (1)..(484): Homolog of NCBI NO: 15233149 NR Description: UDP-glycosyltransferase family; protein id:
  misc_feature (1)..(485): Homolog of NCBI NO: 15233151 NR Description: putative UDP-glucose glucosyltransferase
  misc_feature (1)..(484): Homolog of NCBI NO: 15233761 NR Description: UTP-glucose glucosyltransferase; protein id:
  misc_feature (1)..(485): Homolog of NCBI NO: 11994645 NR Description: UTP-glucose glucosyltransferase [Arabidopsis
  misc_feature (1)..(484): Homolog of NCBI NO: 11994646 NR Description: UTP-glucose glucosyltransferase [Arabidopsis
  misc_feature (1)..(484): Homolog of NCBI NO: 15233157 NR Description: putative UDP-glucose glucosyltransferase; protein
  misc_feature (2)..(485): Homolog of NCBI NO: 15233158 NR Description: putative UDP-glucose glucosyltransferase; protein
  misc_feature (55)..(485): Homolog of NCBI NO: 15233155 NR Description: putative UDP-glucose glucosyltransferase; protein
  misc_feature (1)..(484): Homolog of NCBI NO: 15233157 NR Description: putative UDP-glucose glucosyltransferase; protein
  misc_feature (1)..(484): Homolog of NCBI NO: 11994646 NR Description: UTP-glucose glucosyltransferase [Arabidopsis
  misc_feature (1)..(485): Homolog of NCBI NO: 11994645 NR Description: UTP-glucose glucosyltransferase [Arabidopsis
  misc_feature (1)..(484): Homolog of NCBI NO: 15233761 NR Description: UTP-glucose glucosyltransferase; protein id:
  misc_feature (1)..(485): Homolog of NCBI NO: 15233151 NR Description: putative UDP-glucose glucosyltransferase

SEQ ID NO: 49566 - protein, 443 aa, Arabidopsis thaliana; identical to SEQ ID NO: 46506
  peptide (1)..(443): Ceres Seq. ID no. 12574981
  misc_feature (1)..(442): Pfam Name: UDP-glucoronosyl and UDP-glucosyl transferase Pfam Description: UDP-glucoronosyl and UDP-glucosyl transferase
  misc_feature (1)..(442): Pfam Name: UDP-glucoronosyl and UDP-glucosyl transferase Pfam Description: UDP-glucoronosyl and UDP-glucosyl transferase
  misc_feature (1)..(438): Homolog of NCBI NO: 15222348 NR Description: UDP-glucose glucosyltransferase, putative
  misc_feature (13)..(443): Homolog of NCBI NO: 15233155 NR Description: putative UDP-glucose glucosyltransferase; protein
  misc_feature (1)..(424): Homolog of NCBI NO: 13605541 NR Description: AT3g21750/MSD21_6 [Arabidopsis thaliana]
  misc_feature (1)..(443): Homolog of NCBI NO: 15233158 NR Description: putative UDP-glucose glucosyltransferase; protein
  misc_feature (1)..(442): Homolog of NCBI NO: 15233149 NR Description: UDP-glycosyltransferase family; protein id:
  misc_feature (1)..(438): Homolog of NCBI NO: 15222348 NR Description: UDP-glucose glucosyltransferase, putative
  misc_feature (1)..(424): Homolog of NCBI NO: 13605541 NR Description: AT3g21750/MSD21_6 [Arabidopsis thaliana]
  misc_feature (1)..(442): Homolog of NCBI NO: 15233149 NR Description: UDP-glycosyltransferase family; protein id:
  misc_feature (1)..(443): Homolog of NCBI NO: 15233151 NR Description: putative UDP-glucose glucosyltransferase
  misc_feature (1)..(442): Homolog of NCBI NO: 15233761 NR Description: UTP-glucose glucosyltransferase; protein id:
  misc_feature (1)..(443): Homolog of NCBI NO: 11994645 NR Description: UTP-glucose glucosyltransferase [Arabidopsis
  misc_feature (1)..(442): Homolog of NCBI NO: 11994646 NR Description: UTP-glucose glucosyltransferase [Arabidopsis
  misc_feature (1)..(442): Homolog of NCBI NO: 15233157 NR Description: putative UDP-glucose glucosyltransferase; protein
  misc_feature (1)..(443): Homolog of NCBI NO: 15233158 NR Description: putative UDP-glucose glucosyltransferase; protein
  misc_feature (13)..(443): Homolog of NCBI NO: 15233155 NR Description: putative UDP-glucose glucosyltransferase; protein
  misc_feature (1)..(442): Homolog of NCBI NO: 15233157 NR Description: putative UDP-glucose glucosyltransferase; protein
  misc_feature (1)..(442): Homolog of NCBI NO: 11994646 NR Description: UTP-glucose glucosyltransferase [Arabidopsis
  misc_feature (1)..(443): Homolog of NCBI NO: 11994645 NR Description: UTP-glucose glucosyltransferase [Arabidopsis
  misc_feature (1)..(442): Homolog of NCBI NO: 15233761 NR Description: UTP-glucose glucosyltransferase; protein id:
  misc_feature (1)..(443): Homolog of NCBI NO: 15233151 NR Description: putative UDP-glucose glucosyltransferase

SEQ ID NO: 49567 - protein, 363 aa, Arabidopsis thaliana; identical to SEQ ID NO: 46507
  peptide (1)..(363): Ceres Seq. ID no. 12574982
  misc_feature (1)..(362): Pfam Name: UDP-glucoronosyl and UDP-glucosyl transferase Pfam Description: UDP-glucoronosyl and UDP-glucosyl transferase
  misc_feature (1)..(362): Pfam Name: UDP-glucoronosyl and UDP-glucosyl transferase Pfam Description: UDP-glucoronosyl and UDP-glucosyl transferase
  misc_feature (1)..(358): Homolog of NCBI NO: 15222348 NR Description: UDP-glucose glucosyltransferase, putative
  misc_feature (1)..(363): Homolog of NCBI NO: 15233155 NR Description: putative UDP-glucose glucosyltransferase; protein
  misc_feature (1)..(344): Homolog of NCBI NO: 13605541 NR Description: AT3g21750/MSD21_6 [Arabidopsis thaliana]
  misc_feature (1)..(363): Homolog of NCBI NO: 15233158 NR Description: putative UDP-glucose glucosyltransferase; protein
  misc_feature (1)..(362): Homolog of NCBI NO: 15233149 NR Description: UDP-glycosyltransferase family; protein id:
  misc_feature (1)..(358): Homolog of NCBI NO: 15222348 NR Description: UDP-glucose glucosyltransferase, putative
  misc_feature (1)..(344): Homolog of NCBI NO: 13605541 NR Description: AT3g21750/MSD21_6 [Arabidopsis thaliana]
  misc_feature (1)..(362): Homolog of NCBI NO: 15233149 NR Description: UDP-glycosyltransferase family; protein id:
  misc_feature (1)..(363): Homolog of NCBI NO: 15233151 NR Description: putative UDP-glucose glucosyltransferase
  misc_feature (1)..(362): Homolog of NCBI NO: 15233761 NR Description: UTP-glucose glucosyltransferase; protein id:
  misc_feature (1)..(363): Homolog of NCBI NO: 11994645 NR Description: UTP-glucose glucosyltransferase [Arabidopsis
  misc_feature (1)..(362): Homolog of NCBI NO: 11994646 NR Description: UTP-glucose glucosyltransferase [Arabidopsis
  misc_feature (1)..(362): Homolog of NCBI NO: 15233157 NR Description: putative UDP-glucose glucosyltransferase; protein
  misc_feature (1)..(363): Homolog of NCBI NO: 15233158 NR Description: putative UDP-glucose glucosyltransferase; protein
  misc_feature (1)..(363): Homolog of NCBI NO: 15233155 NR Description: putative UDP-glucose glucosyltransferase; protein
  misc_feature (1)..(362): Homolog of NCBI NO: 15233157 NR Description: putative UDP-glucose glucosyltransferase; protein
  misc_feature (1)..(362): Homolog of NCBI NO: 11994646 NR Description: UTP-glucose glucosyltransferase [Arabidopsis
  misc_feature (1)..(363): Homolog of NCBI NO: 11994645 NR Description: UTP-glucose glucosyltransferase [Arabidopsis
  misc_feature (1)..(362): Homolog of NCBI NO: 15233761 NR Description: UTP-glucose glucosyltransferase; protein id:
  misc_feature (1)..(363): Homolog of NCBI NO: 15233151 NR Description: putative UDP-glucose glucosyltransferase

SEQ ID NO: 49568 - DNA, 1451 bp, Arabidopsis thaliana
  misc_feature (1)..(1451): Ceres Seq. ID no. 14312108
  misc_feature: MA Experiment ID: 108434 Result: Down-regulated in Transcription
  misc_feature: MA Experiment 108434 PARAMETER Experiment Name: At_Root_Tips_cDNA_P Parameter: Tissue Value: Root Tips
  misc_feature: MA Experiment ID: 108462 Result: Down-regulated in Transcription
  misc_feature: MA Experiment 108462 PARAMETER Experiment Name: At_Germinating_Seeds_cDNA_P Parameter: Age (day) Value: 2 vs. 0
  misc_feature: MA Experiment 108462 PARAMETER Experiment Name: At_Germinating_Seeds_cDNA_P Parameter: Tissue Value: Germinating Seeds
  misc_feature: MA Experiment ID: 108463 Result: Down-regulated in Transcription
  misc_feature: MA Experiment 108463 PARAMETER Experiment Name: At_Germinating_Seeds_cDNA_P Parameter: Age (day) Value: 3 vs. 0
  misc_feature: MA Experiment 108463 PARAMETER Experiment Name: At_Germinating_Seeds_cDNA_P Parameter: Tissue Value: Germinating Seeds
  misc_feature: MA Experiment ID: 108488 Result: Down-regulated in Transcription
  misc_feature: MA Experiment ID: 108573 Result: Up-regulated in Transcription
  misc_feature: MA Experiment 108573 PARAMETER Experiment Name: At_Drought_cDNA_P Parameter: Timepoint (hr) Value: 6
  misc_feature: MA Experiment 108573 PARAMETER Experiment Name: At_Drought_cDNA_P Parameter: Tissue Value: Aerial
  misc_feature: MA Experiment 108573 PARAMETER Experiment Name: At_Drought_cDNA_P Parameter: Treatment Value: Drought vs. No Drought
  misc_feature: MA Experiment ID: 108577 Result: Down-regulated in Transcription
  misc_feature: MA Experiment 108577 PARAMETER Experiment Name: At_42deg_Heat_cDNA_P Parameter: Temperature (deg C) Value: 42 vs. 22
  misc_feature: MA Experiment 108577 PARAMETER Experiment Name: At_42deg_Heat_cDNA_P Parameter: Timepoint (hr) Value: 6
  misc_feature: MA Experiment 108577 PARAMETER Experiment Name: At_42deg_Heat_cDNA_P Parameter: Tissue Value: Aerial
  misc_feature: MA Experiment ID: 108595 Result: Down-regulated in Transcription
  misc_feature: MA Experiment 108595 PARAMETER Experiment Name: At_Ler-pi_Ovule_cDNA_P Parameter: Plant Line Value: null
  misc_feature: MA Experiment ID: 20000179 Result: Up-regulated in Transcription
  misc_feature: MA Experiment 20000179 PARAMETER Experiment Name: At_Germinating_Seeds_P Parameter: Age (hr) Value: 6 vs. 0
  misc_feature: MA Experiment 20000179 PARAMETER Experiment Name: At_Germinating_Seeds_P Parameter: Tissue Value: Germinating Seeds
  misc_feature: MA Experiment ID: 20000184 Result: Down-regulated in Transcription
  misc_feature: MA Experiment 20000184 PARAMETER Experiment Name: At_Shoots__P Parameter: Age (day) Value: 7
  misc_feature: MA Experiment 20000184 PARAMETER Experiment Name: At_Shoots__P Parameter: Tissue Value: Shoots vs. Whole Plant
  misc_feature: MA Experiment ID: 20000185 Result: Down-regulated in Transcription
  misc_feature: MA Experiment 20000185 PARAMETER Experiment Name: At_Roots__P Parameter: Age (day) Value: 7 vs. 21
  misc_feature: MA Experiment 20000185 PARAMETER Experiment Name: At_Roots__P Parameter: Organism Value: A. thaliana
  misc_feature: MA Experiment 20000185 PARAMETER Experiment Name: At_Roots__P Parameter: Tissue Value: Roots vs. Whole Plant
  misc_feature: MA Experiment ID: 20000213 Result: Up-regulated in Transcription
  misc_feature: MA Experiment 20000213 PARAMETER Experiment Name: At_4deg_Cold_P Parameter: Timepoint (hr) Value: 2
  misc_feature: MA Experiment ID: 20000234 Result: Down-regulated in Transcription
  misc_feature: MA Experiment 20000234 PARAMETER Experiment Name: At_Siliques_P Parameter: Age (day) Value: 21
  misc_feature: MA Experiment 20000234 PARAMETER Experiment Name: At_Siliques_P Parameter: Organism Value: A. thaliana
  misc_feature: MA Experiment 20000234 PARAMETER Experiment Name: At_Siliques_P Parameter: Plant Line Value: WS
  misc_feature: MA Experiment 20000234 PARAMETER Experiment Name: At_Siliques_P Parameter: Tissue Value: Less Than 5mm Siliques vs. Whole Plant
  misc_feature: MA Experiment ID: 20000235 Result: Down-regulated in Transcription
  misc_feature: MA Experiment 20000235 PARAMETER Experiment Name: At_Siliques_P Parameter: Age (day) Value: 21
  misc_feature: MA Experiment 20000235 PARAMETER Experiment Name: At_Siliques_P Parameter: Organism Value: A. thaliana
  misc_feature: MA Experiment 20000235 PARAMETER Experiment Name: At_Siliques_P Parameter: Plant Line Value: WS
  misc_feature: MA Experiment 20000235 PARAMETER Experiment Name: At_Siliques_P Parameter: Tissue Value: 5-10mm Siliques vs. Whole Plant
  misc_feature: MA Experiment ID: 20000264 Result: Down-regulated in Transcription
  misc_feature: MA Experiment 20000264 PARAMETER Experiment Name: At_Open_Flower_P Parameter: Age (day) Value: 21
  misc_feature: MA Experiment 20000264 PARAMETER Experiment Name: At_Open_Flower_P Parameter: Plant Line Value: WS
  misc_feature: MA Experiment 20000264 PARAMETER Experiment Name: At_Open_Flower_P Parameter: Tissue Value: Open Flower vs. Whole Plant
  misc_feature: MA Experiment ID: 20000265 Result: Down-regulated in Transcription
  misc_feature: MA Experiment 20000265 PARAMETER Experiment Name: At_Open_Flower_P Parameter: Age (day) Value: 21
  misc_feature: MA Experiment 20000265 PARAMETER Experiment Name: At_Open_Flower_P Parameter: Plant Line Value: WS
  misc_feature: MA Experiment 20000265 PARAMETER Experiment Name: At_Open_Flower_P Parameter: Tissue Value: Closed Flower vs. Whole Plant
  misc_feature: MA Experiment ID: 20000268 Result: Down-regulated in Transcription
  misc_feature: MA Experiment 20000268 PARAMETER Experiment Name: At_100mM_NaCl__P Parameter: Age (day) Value: 14
  misc_feature: MA Experiment 20000268 PARAMETER Experiment Name: At_100mM_NaCl__P Parameter: Organism Value: A. thaliana
  misc_feature: MA Experiment 20000268 PARAMETER Experiment Name: At_100mM_NaCl__P Parameter: Plant Line Value: WS
  misc_feature: MA Experiment 20000268 PARAMETER Experiment Name: At_100mM_NaCl__P Parameter: Timepoint (hr) Value: 6
  misc_feature: MA Experiment 20000268 PARAMETER Experiment Name: At_100mM_NaCl__P Parameter: Tissue Value: Whole Plant
  misc_feature: MA Experiment 20000268 PARAMETER Experiment Name: At_100mM_NaCl__P Parameter: Treatment Value: 100mM NaCl vs. No Treatment
  misc_feature: MA Experiment ID: 20000286 Result: Down-regulated in Transcription
  misc_feature: MA Experiment 20000286 PARAMETER Experiment Name: At_Open_Flower_P Parameter: Age (day) Value: 21
  misc_feature: MA Experiment 20000286 PARAMETER Experiment Name: At_Open_Flower_P Parameter: Plant Line Value: WS
  misc_feature: MA Experiment 20000286 PARAMETER Experiment Name: At_Open_Flower_P Parameter: Tissue Value: Half Open vs. Whole Plant
  misc_feature: MA Experiment ID: 20000437 Result: Up-regulated in Transcription
  misc_feature: MA Experiment 20000437 PARAMETER Experiment Name: At_Drought_P Parameter: Age (day) Value: 8
  misc_feature: MA Experiment 20000437 PARAMETER Experiment Name: At_Drought_P Parameter: Organism Value: A. thaliana
  misc_feature: MA Experiment 20000437 PARAMETER Experiment Name: At_Drought_P Parameter: Plant Line Value: WS
  misc_feature: MA Experiment 20000437 PARAMETER Experiment Name: At_Drought_P Parameter: Timepoint (hr) Value: 24
  misc_feature: MA Experiment 20000437 PARAMETER Experiment Name: At_Drought_P Parameter: Tissue Value: Whole Plant
  misc_feature: MA Experiment 20000437 PARAMETER Experiment Name: At_Drought_P Parameter: Treatment Value: Drought vs. No Drought
  misc_feature: MA Experiment ID: 20000438 Result: Down-regulated in Transcription
  misc_feature: MA Experiment 20000438 PARAMETER Experiment Name: At_Shoots__P Parameter: Age (day) Value: 14
  misc_feature: MA Experiment 20000438 PARAMETER Experiment Name: At_Shoots__P Parameter: Tissue Value: Shoots vs. Whole Plant
  misc_feature: MA Experiment ID: 20000439 Result: Down-regulated in Transcription
  misc_feature: MA Experiment 20000439 PARAMETER Experiment Name: At_Roots__P Parameter: Age (day) Value: 14 vs. 21
  misc_feature: MA Experiment 20000439 PARAMETER Experiment Name: At_Roots__P Parameter: Organism Value: A. thaliana
  misc_feature: MA Experiment 20000439 PARAMETER Experiment Name: At_Roots__P Parameter: Tissue Value: Roots vs. Whole Plant
  misc_feature: MA Experiment ID: 20000451 Result: Down-regulated in Transcription
  misc_feature: MA Experiment 20000451 PARAMETER Experiment Name: At_CS6879_Shoots-Roots_P Parameter: Age (day) Value: 14
  misc_feature: MA Experiment 20000451 PARAMETER Experiment Name: At_CS6879_Shoots-Roots_P Parameter: Organism Value: A. thaliana
  misc_feature: MA Experiment 20000451 PARAMETER Experiment Name: At_CS6879_Shoots-Roots_P Parameter: Plant Line Value: CS6879 vs. WS
  misc_feature: MA Experiment 20000451 PARAMETER Experiment Name: At_CS6879_Shoots-Roots_P Parameter: Tissue Value: Roots
  misc_feature: MA Experiment ID: 20000452 Result: Down-regulated in Transcription
  misc_feature: MA Experiment 20000452 PARAMETER Experiment Name: At_CS6879_Shoots-Roots_P Parameter: Age (day) Value: 14
  misc_feature: MA Experiment 20000452 PARAMETER Experiment Name: At_CS6879_Shoots-Roots_P Parameter: Organism Value: A. thaliana
  misc_feature: MA Experiment 20000452 PARAMETER Experiment Name: At_CS6879_Shoots-Roots_P Parameter: Plant Line Value: CS6879 vs. WS
  misc_feature: MA Experiment 20000452 PARAMETER Experiment Name: At_CS6879_Shoots-Roots_P Parameter: Tissue Value: Shoots
  misc_feature: MA Experiment ID: 20000606 Result: Up-regulated in Transcription
  misc_feature: MA Experiment 20000606 PARAMETER Experiment Name: At_CS8548_Mutant_P Parameter: Age (day) Value: 14
  misc_feature: MA Experiment 20000606 PARAMETER Experiment Name: At_CS8548_Mutant_P Parameter: Plant Line Value: CS8548 vs. wt
  misc_feature: MA Experiment 20000606 PARAMETER Experiment Name: At_CS8548_Mutant_P Parameter: Tissue Value: Whole Plant
  misc_feature: MA Experiment ID: 20001557 Result: Up-regulated in Transcription
  misc_feature: MA Experiment 20001557 PARAMETER Experiment Name: At_Drought_Soil_Dry_P Parameter: Age (day) Value: 27
  misc_feature: MA Experiment 20001557 PARAMETER Experiment Name: At_Drought_Soil_Dry_P Parameter: Organism Value: A. thaliana
  misc_feature: MA Experiment 20001557 PARAMETER Experiment Name: At_Drought_Soil_Dry_P Parameter: Plant Line Value: WS
  misc_feature: MA Experiment 20001557 PARAMETER Experiment Name: At_Drought_Soil_Dry_P Parameter: Post Timepoint (hr) Value: 3
  misc_feature: MA Experiment 20001557 PARAMETER Experiment Name: At_Drought_Soil_Dry_P Parameter: Post-Treatment Value: Re-Water vs. No Drought
  misc_feature: MA Experiment 20001557 PARAMETER Experiment Name: At_Drought_Soil_Dry_P Parameter: Timepoint (day) Value: 13
  misc_feature: MA Experiment 20001557 PARAMETER Experiment Name: At_Drought_Soil_Dry_P Parameter: Treatment Value: Drought vs. No Drought
  misc_feature: MA Experiment ID: 20001910 Result: Down-regulated in Transcription
  misc_feature: MA Experiment 20001910 PARAMETER Experiment Name: At_Drought_Reproduction_P Parameter: Age (day) Value: 37
  misc_feature: MA Experiment 20001910 PARAMETER Experiment Name: At_Drought_Reproduction_P Parameter: Organism Value: A. thaliana
  misc_feature: MA Experiment 20001910 PARAMETER Experiment Name: At_Drought_Reproduction_P Parameter: Plant Line Value: WS
  misc_feature: MA Experiment 20001910 PARAMETER Experiment Name: At_Drought_Reproduction_P Parameter: Timepoint (day) Value: 7
  misc_feature: MA Experiment 20001910 PARAMETER Experiment Name: At_Drought_Reproduction_P Parameter: Tissue Value: Flowers
  misc_feature: MA Experiment 20001910 PARAMETER Experiment Name: At_Drought_Reproduction_P Parameter: Treatment Value: Drought vs. No Drought
gcaccagtccccccccccccgaccgtacacacatccccatacgaacactcacaatcgttaaaaagaagagaagagaagagagagaaagcttaaatcggaaaaaatggtttcgtggatgatgacaaccaaggcggtgctaatctcaagcggcgtcgccaccgtggctctgttactgaaactctctgttccggtagctgttgatttctccgtgtcacgagctccgatcttgtggagctccttgttgtcatggctgaaaccaccgtatctttacgttgttaccaacggaatcatcatcactatcgttgcttcttctaagtattaccgaagtcaccatgaccgtgatgaagaagatgagatcgtcgtgtacggtggtggaggttataaggtccagacgggggagccgattgtgaatcaacatcaagcttctccgaggattctggaggttaaggatttggatactggtgcgcattttggtttcgttatggcgaatccggaagcggaggaactggaatcagaggcggttacggcggttgtgtttgatgatgaggaggaggagaacaagattatagatgaggcggcgacggtggaggatggaattgaagaggagcttaagagtgtgattatggctgagaattcagatctggttgaatccgatgtcataccgccgccgatcccaatcgaatcggagaatattcctccgattgagaagcctctcgttacttcaaggttcgggtcaccggaaattgatgaaagcaagtcacgaaggtggaagagctctgagagtgacgaagccgaagaagaacgagacgttggagaatacgtggaagatgataacggaagggaagtcaacgccgttgactagacagttataccggagatctgacacgtttggacgtggagattccgggggagttgacggtgaggtgaaaccggtttataagaaatcggatacgtttagggacaggactaattattatcagttggcggagacggcgaaggtgaggaaagagccgtcgctgagtcaggaagagttgaatcggcgagttgaagcgtttataaagaagtttaatgaggagatgaagttgcagagaatggagtctctcagacagtacaaagagataactagccgtggggtttagttaactgtttttattttctggttaaaatttttttattggcttttttatacacagaaaaaaatagaaaaagaagattagtcagagtggatttaacttaaaagaaaaaaaagttacagtagaaaaaaaatctctttattaatttgtgaagcttgaaggttttttttttgtcaacgctttgaagttacataggttttttttctttgctttgttgttgtgtgtgtgattttactgagatatagtttggtttgtatatattaatgtgttggttttacaagtaaaaattagatatatatacacttgtggttttgttgc

SEQ ID NO: 49569 - protein, 252 aa, Arabidopsis thaliana
  peptide (1)..(252): Ceres Seq. ID no. 14312109
  misc_feature (9)..(210): Pfam Name: Cotton fibre expressed protein Pfam Description: Cotton fibre expressed protein
  misc_feature (1)..(183): Homolog of NCBI NO: 18391249 NR Description: expressed protein [Arabidopsis thaliana]
  misc_feature (193)..(209): Homolog of NCBI NO: 25373437 NR Description: hypothetical protein [imported] - Arabidopsis
  misc_feature (9)..(163): Homolog of NCBI NO: 25373437 NR Description: hypothetical protein [imported] - Arabidopsis
  misc_feature (193)..(209): Homolog of NCBI NO: 15220323 NR Description: hypothetical protein [Arabidopsis thaliana]
  misc_feature (9)..(163): Homolog of NCBI NO: 15220323 NR Description: hypothetical protein [Arabidopsis thaliana]
  misc_feature (1)..(201): Homolog of NCBI NO: 15220310 NR Description: expressed protein [Arabidopsis thaliana]
  misc_feature (1)..(201): Homolog of NCBI NO: 25373435 NR Description: hypothetical protein [imported] - Arabidopsis
  misc_feature (3)..(85): Homolog of NCBI NO: 7484716 NR Description: fiber protein 1 [imported] - upland cotton
  misc_feature (6)..(210): Homolog of NCBI NO: 25373438 NR Description: hypothetical protein F11P17.2 [imported] -
  misc_feature (1)..(210): Homolog of NCBI NO: 30696552 NR Description: cotton fiber expressed protein -related
MVSWMMTTKAVLISSGVATVALLLKLSVPVAVDFSVSRAPILWSSLLSWLKPPYLYVVTNGIIITIVASSKYYRSHHDRDEEDEIVVYGGGGYKVQTGEPIVNQHQASPRILEVKDLDTGAHFGFVMANPEAEELESEAVTAVVFDDEEEENKIIDEAATVEDGIEEELKSVIMAENSDLVESDVIPPPIPIESENIPPIEKPLVTSRFGSPEIDESKSRRWKSSESDEAEEERDVGEYVEDDNGREVNAVD

SEQ ID NO: 49570 - protein, 248 aa, Arabidopsis thaliana
  peptide (1)..(248): Ceres Seq. ID no. 14312110
  misc_feature (5)..(206): Pfam Name: Cotton fibre expressed protein Pfam Description: Cotton fibre expressed protein
  misc_feature (1)..(179): Homolog of NCBI NO: 18391249 NR Description: expressed protein [Arabidopsis thaliana]
  misc_feature (189)..(205): Homolog of NCBI NO: 25373437 NR Description: hypothetical protein [imported] - Arabidopsis
  misc_feature (5)..(159): Homolog of NCBI NO: 25373437 NR Description: hypothetical protein [imported] - Arabidopsis
  misc_feature (189)..(205): Homolog of NCBI NO: 15220323 NR Description: hypothetical protein [Arabidopsis thaliana]
  misc_feature (5)..(159): Homolog of NCBI NO: 15220323 NR Description: hypothetical protein [Arabidopsis thaliana]
  misc_feature (1)..(197): Homolog of NCBI NO: 15220310 NR Description: expressed protein [Arabidopsis thaliana]
  misc_feature (1)..(197): Homolog of NCBI NO: 25373435 NR Description: hypothetical protein [imported] - Arabidopsis
  misc_feature (1)..(81): Homolog of NCBI NO: 7484716 NR Description: fiber protein 1 [imported] - upland cotton
  misc_feature (2)..(206): Homolog of NCBI NO: 25373438 NR Description: hypothetical protein F11P17.2 [imported] -
  misc_feature (1)..(206): Homolog of NCBI NO: 30696552 NR Description: cotton fiber expressed protein -related
MMTTKAVLISSGVATVALLLKLSVPVAVDFSVSRAPILWSSLLSWLKPPYLYVVTNGIIITIVASSKYYRSHHDRDEEDEIVVYGGGGYKVQTGEPIVNQHQASPRILEVKDLDTGAHFGFVMANPEAEELESEAVTAVVFDDEEEENKIIDEAATVEDGIEEELKSVIMAENSDLVESDVIPPPIPIESENIPPIEKPLVTSRFGSPEIDESKSRRWKSSESDEAEEERDVGEYVEDDNGREVNAVD

SEQ ID NO: 49571 - protein, 247 aa, Arabidopsis thaliana
  peptide (1)..(247): Ceres Seq. ID no. 14312111
  misc_feature (4)..(205): Pfam Name: Cotton fibre expressed protein Pfam Description: Cotton fibre expressed protein
  misc_feature (1)..(178): Homolog of NCBI NO: 18391249 NR Description: expressed protein [Arabidopsis thaliana]
  misc_feature (188)..(204): Homolog of NCBI NO: 25373437 NR Description: hypothetical protein [imported] - Arabidopsis
  misc_feature (4)..(158): Homolog of NCBI NO: 25373437 NR Description: hypothetical protein [imported] - Arabidopsis
  misc_feature (188)..(204): Homolog of NCBI NO: 15220323 NR Description: hypothetical protein [Arabidopsis thaliana]
  misc_feature (4)..(158): Homolog of NCBI NO: 15220323 NR Description: hypothetical protein [Arabidopsis thaliana]
  misc_feature (1)..(196): Homolog of NCBI NO: 15220310 NR Description: expressed protein [Arabidopsis thaliana]
  misc_feature (1)..(196): Homolog of NCBI NO: 25373435 NR Description: hypothetical protein [imported] - Arabidopsis
  misc_feature (1)..(80): Homolog of NCBI NO: 7484716 NR Description: fiber protein 1 [imported] - upland cotton
  misc_feature (1)..(205): Homolog of NCBI NO: 25373438 NR Description: hypothetical protein F11P17.2 [imported] -
  misc_feature (1)..(205): Homolog of NCBI NO: 30696552 NR Description: cotton fiber expressed protein -related
MTTKAVLISSGVATVALLLKLSVPVAVDFSVSRAPILWSSLLSWLKPPYLYVVTNGIIITIVASSKYYRSHHDRDEEDEIVVYGGGGYKVQTGEPIVNQHQASPRILEVKDLDTGAHFGFVMANPEAEELESEAVTAVVFDDEEEENKIIDEAATVEDGIEEELKSVIMAENSDLVESDVIPPPIPIESENIPPIEKPLVTSRFGSPEIDESKSRRWKSSESDEAEEERDVGEYVEDDNGREVNAVD

SEQ ID NO: 49572 - DNA, 1762 bp, Arabidopsis thaliana
  misc_feature (1)..(1762): Ceres Seq. ID no. 12591232
  misc_feature: MA Experiment ID: 20000182 Result: Up-regulated in Transcription
  misc_feature: MA Experiment 20000182 PARAMETER Experiment Name: At_2mM_SA_P Parameter: Age (day) Value: 14
  misc_feature: MA Experiment 20000182 PARAMETER Experiment Name: At_2mM_SA_P Parameter: Organism Value: A. thaliana
  misc_feature: MA Experiment 20000182 PARAMETER Experiment Name: At_2mM_SA_P Parameter: Plant Line Value: WS
  misc_feature: MA Experiment 20000182 PARAMETER Experiment Name: At_2mM_SA_P Parameter: Timepoint (hr) Value: 6
  misc_feature: MA Experiment 20000182 PARAMETER Experiment Name: At_2mM_SA_P Parameter: Tissue Value: Aerial
  misc_feature: MA Experiment 20000182 PARAMETER Experiment Name: At_2mM_SA_P Parameter: Treatment Value: 2mM SA vs. No Treatment
  misc_feature: MA Experiment ID: 20000184 Result: Down-regulated in Transcription
  misc_feature: MA Experiment 20000184 PARAMETER Experiment Name: At_Shoots__P Parameter: Age (day) Value: 7
  misc_feature: MA Experiment 20000184 PARAMETER Experiment Name: At_Shoots__P Parameter: Tissue Value: Shoots vs. Whole Plant
  misc_feature: MA Experiment ID: 20000234 Result: Down-regulated in Transcription
  misc_feature: MA Experiment 20000234 PARAMETER Experiment Name: At_Siliques_P Parameter: Age (day) Value: 21
  misc_feature: MA Experiment 20000234 PARAMETER Experiment Name: At_Siliques_P Parameter: Organism Value: A. thaliana
  misc_feature: MA Experiment 20000234 PARAMETER Experiment Name: At_Siliques_P Parameter: Plant Line Value: WS
  misc_feature: MA Experiment 20000234 PARAMETER Experiment Name: At_Siliques_P Parameter: Tissue Value: Less Than 5mm Siliques vs. Whole Plant
  misc_feature: MA Experiment ID: 20000264 Result: Down-regulated in Transcription
  misc_feature: MA Experiment 20000264 PARAMETER Experiment Name: At_Open_Flower_P Parameter: Age (day) Value: 21
  misc_feature: MA Experiment 20000264 PARAMETER Experiment Name: At_Open_Flower_P Parameter: Plant Line Value: WS
  misc_feature: MA Experiment 20000264 PARAMETER Experiment Name: At_Open_Flower_P Parameter: Tissue Value: Open Flower vs. Whole Plant
  misc_feature: MA Experiment ID: 20000265 Result: Down-regulated in Transcription
  misc_feature: MA Experiment 20000265 PARAMETER Experiment Name: At_Open_Flower_P Parameter: Age (day) Value: 21
  misc_feature: MA Experiment 20000265 PARAMETER Experiment Name: At_Open_Flower_P Parameter: Plant Line Value: WS
  misc_feature: MA Experiment 20000265 PARAMETER Experiment Name: At_Open_Flower_P Parameter: Tissue Value: Closed Flower vs. Whole Plant
  misc_feature: MA Experiment ID: 20000286 Result: Down-regulated in Transcription
  misc_feature: MA Experiment 20000286 PARAMETER Experiment Name: At_Open_Flower_P Parameter: Age (day) Value: 21
  misc_feature: MA Experiment 20000286 PARAMETER Experiment Name: At_Open_Flower_P Parameter: Plant Line Value: WS
  misc_feature: MA Experiment 20000286 PARAMETER Experiment Name: At_Open_Flower_P Parameter: Tissue Value: Half Open vs. Whole Plant
  misc_feature: MA Experiment ID: 20000438 Result: Down-regulated in Transcription
  misc_feature: MA Experiment 20000438 PARAMETER Experiment Name: At_Shoots__P Parameter: Age (day) Value: 14
  misc_feature: MA Experiment 20000438 PARAMETER Experiment Name: At_Shoots__P Parameter: Tissue Value: Shoots vs. Whole Plant
  misc_feature: MA Experiment ID: 20001248 Result: Up-regulated in Transcription
  misc_feature: MA Experiment 20001248 PARAMETER Experiment Name: At_Far-red-induction_P Parameter: Age (day) Value: 7
  misc_feature: MA Experiment 20001248 PARAMETER Experiment Name: At_Far-red-induction_P Parameter: Light Value: Far-red vs. White
  misc_feature: MA Experiment 20001248 PARAMETER Experiment Name: At_Far-red-induction_P Parameter: Organism Value: A. thaliana
  misc_feature: MA Experiment 20001248 PARAMETER Experiment Name: At_Far-red-induction_P Parameter: Plant Line Value: Columbia
  misc_feature: MA Experiment 20001248 PARAMETER Experiment Name: At_Far-red-induction_P Parameter: Timepoint (hr) Value: 4
  misc_feature: MA Experiment 20001248 PARAMETER Experiment Name: At_Far-red-induction_P Parameter: Tissue Value: Whole Plant
agtttttctcttgccgttgaagcaagtgagaaccaaatccccctctgttcgatcccgccgcggtgagaagcgatgaagtcggagactttaacattagttctggtgtatctcgccggaatcatggagagagccgatgagtctctgcttccaggagtttacaaagaagttggagatgctctacacgtggatcccacagctcttggaacattaactctgttccgctctattgttcagtcttcttgttaccctttagccgcttacttgtcttctagacataaccgagctcacgtcatcgctctcggtgctttcctctgggccactgccactttcctcgtcgccgtctccactactttcttccaggtggcagtatcaagaggcttgaacgggatagggctagccattgtgacacccgcgattcagtccctagtcgctgactcaactgatgactataaccgtgggatggcatttgggtggttaggattcacatcaaacattggttccatacttggctatgtatgttccatcctctttgcctcaaaatctttcaatggtgtcgctggatggagaatcgctttccttttggtagcagtcgttagcgtgatagtaggcattttggtccgtctcttcgcaacagatcctcactacagcgacagaaagatcacaaaacatgtcaaagacaaacctttctggtcagacataagagatctattgaaagaagctaagatggtgataaagattccgtctttccaaatctttgtcgctcagggagtttcgggttctttcccttggtcagctttggcttttgcaccattgtggctagaactcattggtttctcccacaaaacaaccgcggttctcgtgactcttttcaccatttcttgctctcttggaggtttgtttggaggatacatgggagatactctcgccaagaagttcccaaatggcggtaggattttcctctctcaggtaagctctggctcggcaattcctttagctgcgattttgcttatcggattacctgatgatccctccacggcctttagccacggtctggttcttgtcatcatgggattatgcatctcatggaacggtgcagctacaaacggtccaatatttgcagagatagttcctgagagagcacgaacgagcatctacgcgttagacagatcattcgagtcgattctagcttcttttgctcctcctatagtagggatgcttgctcagaacatctatggatataaaccaatcccggaaggatccacaagctcggtcaagattgatacagatagagcgaacgcagcatcgctcgctaaagcattatacacatcgattgggatcccgatggtgatctgttgcacaatctactcgttcctatattgcacatacccgagggaccgagacagagcaaaaatgcaagccttgatcgagtcagagatgcaacaactcaatgaagaggaagatgagatcgaagtgaagtgttttggagctgaagaacacgatgaggcttatttgcttaagcagcatcagaatgagagttaagaacagagtcaaatgatgatgatttgggttgttattgacaatagggttccatacttcaattataggaagatggggtcatagttataatttttgtaaaagaaaagtactgaagtgaaatataccggtagataacatttacaagaacagagtaaaaggaaaattactgatttttgtttttgtaaggaaaaatattaatgagtattgaatgattattcgctttctt

SEQ ID NO: 49573 - protein, 488 aa, Arabidopsis thaliana
  peptide (1)..(488): Ceres Seq. ID no. 12591233
  misc_feature (7)..(406): Pfam Name: Sugar (and other) transporter Pfam Description: Sugar (and other) transporter
  misc_feature (206)..(468): Homolog of NCBI NO: 7494336 NR Description: membrane transporter PFB0275w - malaria parasite
  misc_feature (7)..(201): Homolog of NCBI NO: 23593282 NR Description: hypothetical protein, conserved [Plasmodium
  misc_feature (206)..(468): Homolog of NCBI NO: 23593282 NR Description: hypothetical protein, conserved [Plasmodium
  misc_feature (154)..(455): Homolog of NCBI NO: 34393426 NR Description: membrane transporter PFB0275w-like protein
  misc_feature (16)..(455): Homolog of NCBI NO: 15224194 NR Description: hypothetical protein; protein id: At2g18590.1
  misc_feature (5)..(455): Homolog of NCBI NO: 15234530 NR Description: putative protein; protein id: At4g36790.1
  misc_feature (1)..(474): Homolog of NCBI NO: 15218229 NR Description: putative transporter; protein id: At1g78130.1
  misc_feature (1)..(96): Homolog of NCBI NO: 11358310 NR Description: hypothetical protein T31P16.180 - Arabidopsis
  misc_feature (84)..(488): Homolog of NCBI NO: 11358310 NR Description: hypothetical protein T31P16.180 - Arabidopsis
  misc_feature (1)..(488): Homolog of NCBI NO: 15238089 NR Description: putative protein
MKSETLTLVLVYLAGIMERADESLLPGVYKEVGDALHVDPTALGTLTLFRSIVQSSCYPLAAYLSSRHNRAHVIALGAFLWATATFLVAVSTTFFQVAVSRGLNGIGLAIVTPAIQSLVADSTDDYNRGMAFGWLGFTSNIGSILGYVCSILFASKSFNGVAGWRIAFLLVAVVSVIVGILVRLFATDPHYSDRKITKHVKDKPFWSDIRDLLKEAKMVIKIPSFQIFVAQGVSGSFPWSALAFAPLWLELIGFSHKTTAVLVTLFTISCSLGGLFGGYMGDTLAKKFPNGGRIFLSQVSSGSAIPLAAILLIGLPDDPSTAFSHGLVLVIMGLCISWNGAATNGPIFAEIVPERARTSIYALDRSFESILASFAPPIVGMLAQNIYGYKPIPEGSTSSVKIDTDRANAASLAKALYTSIGIPMVICCTIYSFLYCTYPRDRDRAKMQALIESEMQQLNEEEDEIEVKCFGAEEHDEAYLLKQHQNES

SEQ ID NO: 49574 - protein, 472 aa, Arabidopsis thaliana
  peptide (1)..(472): Ceres Seq. ID no. 12591234
  misc_feature (1)..(390): Pfam Name: Sugar (and other) transporter Pfam Description: Sugar (and other) transporter
  misc_feature (190)..(452): Homolog of NCBI NO: 7494336 NR Description: membrane transporter PFB0275w - malaria parasite
  misc_feature (1)..(185): Homolog of NCBI NO: 23593282 NR Description: hypothetical protein, conserved [Plasmodium
  misc_feature (190)..(452): Homolog of NCBI NO: 23593282 NR Description: hypothetical protein, conserved [Plasmodium
  misc_feature (138)..(439): Homolog of NCBI NO: 34393426 NR Description: membrane transporter PFB0275w-like protein
  misc_feature (1)..(439): Homolog of NCBI NO: 15224194 NR Description: hypothetical protein; protein id: At2g18590.1
  misc_feature (1)..(439): Homolog of NCBI NO: 15234530 NR Description: putative protein; protein id: At4g36790.1
  misc_feature (1)..(458): Homolog of NCBI NO: 15218229 NR Description: putative transporter; protein id: At1g78130.1
  misc_feature (1)..(80): Homolog of NCBI NO: 11358310 NR Description: hypothetical protein T31P16.180 - Arabidopsis
  misc_feature (68)..(472): Homolog of NCBI NO: 11358310 NR Description: hypothetical protein T31P16.180 - Arabidopsis
  misc_feature (1)..(472): Homolog of NCBI NO: 15238089 NR Description: putative protein
MERADESLLPGVYKEVGDALHVDPTALGTLTLFRSIVQSSCYPLAAYLSSRHNRAHVIALGAFLWATATFLVAVSTTFFQVAVSRGLNGIGLAIVTPAIQSLVADSTDDYNRGMAFGWLGFTSNIGSILGYVCSILFASKSFNGVAGWRIAFLLVAVVSVIVGILVRLFATDPHYSDRKITKHVKDKPFWSDIRDLLKEAKMVIKIPSFQIFVAQGVSGSFPWSALAFAPLWLELIGFSHKTTAVLVTLFTISCSLGGLFGGYMGDTLAKKFPNGGRIFLSQVSSGSAIPLAAILLIGLPDDPSTAFSHGLVLVIMGLCISWNGAATNGPIFAEIVPERARTSIYALDRSFESILASFAPPIVGMLAQNIYGYKPIPEGSTSSVKIDTDRANAASLAKALYTSIGIPMVICCTIYSFLYCTYPRDRDRAKMQALIESEMQQLNEEEDEIEVKCFGAEEHDEAYLLKQHQNES

SEQ ID NO: 49575 - protein, 359 aa, Arabidopsis thaliana
  peptide (1)..(359): Ceres Seq. ID no. 12591235
  misc_feature (1)..(277): Pfam Name: Sugar (and other) transporter Pfam Description: Sugar (and other) transporter
  misc_feature (1)..(72): Homolog of NCBI NO: 7494336 NR Description: membrane transporter PFB0275w - malaria parasite
  misc_feature (77)..(339): Homolog of NCBI NO: 7494336 NR Description: membrane transporter PFB0275w - malaria parasite
  misc_feature (1)..(72): Homolog of NCBI NO: 23593282 NR Description: hypothetical protein, conserved [Plasmodium
  misc_feature (77)..(339): Homolog of NCBI NO: 23593282 NR Description: hypothetical protein, conserved [Plasmodium
  misc_feature (25)..(326): Homolog of NCBI NO: 34393426 NR Description: membrane transporter PFB0275w-like protein
  misc_feature (1)..(326): Homolog of NCBI NO: 15224194 NR Description: hypothetical protein; protein id: At2g18590.1
  misc_feature (1)..(326): Homolog of NCBI NO: 15234530 NR Description: putative protein; protein id: At4g36790.1
  misc_feature (1)..(345): Homolog of NCBI NO: 15218229 NR Description: putative transporter; protein id: At1g78130.1
  misc_feature (1)..(359): Homolog of NCBI NO: 11358310 NR Description: hypothetical protein T31P16.180 - Arabidopsis
  misc_feature (1)..(359): Homolog of NCBI NO: 15238089 NR Description: putative protein
MAFGWLGFTSNIGSILGYVCSILFASKSFNGVAGWRIAFLLVAVVSVIVGILVRLFATDPHYSDRKITKHVKDKPFWSDIRDLLKEAKMVIKIPSFQIFVAQGVSGSFPWSALAFAPLWLELIGFSHKTTAVLVTLFTISCSLGGLFGGYMGDTLAKKFPNGGRIFLSQVSSGSAIPLAAILLIGLPDDPSTAFSHGLVLVIMGLCISWNGAATNGPIFAEIVPERARTSIYALDRSFESILASFAPPIVGMLAQNIYGYKPIPEGSTSSVKIDTDRANAASLAKALYTSIGIPMVICCTIYSFLYCTYPRDRDRAKMQALIESEMQQLNEEEDEIEVKCFGAEEHDEAYLLKQHQNES

SEQ ID NO: 49576 - DNA, 2122 bp, Arabidopsis thaliana
  misc_feature (1)..(2122): Ceres Seq. ID no. 13588667
  misc_feature: MA Experiment ID: 20001560 Result: Down-regulated in Transcription
  misc_feature: MA Experiment 20001560 PARAMETER Experiment Name: At_Drought_Soil_Dry_P Parameter: Age (day) Value: 28
  misc_feature: MA Experiment 20001560 PARAMETER Experiment Name: At_Drought_Soil_Dry_P Parameter: Organism Value: A. thaliana
  misc_feature: MA Experiment 20001560 PARAMETER Experiment Name: At_Drought_Soil_Dry_P Parameter: Plant Line Value: WS
  misc_feature: MA Experiment 20001560 PARAMETER Experiment Name: At_Drought_Soil_Dry_P Parameter: Post Timepoint (hr) Value: None
  misc_feature: MA Experiment 20001560 PARAMETER Experiment Name: At_Drought_Soil_Dry_P Parameter: Post-Treatment Value: None
  misc_feature: MA Experiment 20001560 PARAMETER Experiment Name: At_Drought_Soil_Dry_P Parameter: Timepoint (day) Value: 14
  misc_feature: MA Experiment 20001560 PARAMETER Experiment Name: At_Drought_Soil_Dry_P Parameter: Treatment Value: Drought vs. No Drought
gacacaaagtctcatttctcgttaatttccattttcgttatctctctctctcgccgatcaaaccctaggtgtatcaattcgttcagattcccggcggttggtctcactgtcatgtaggtttgattcatcttctcttctggatcttgagtgacgaagagagaagagatctgagtttttctgagagagagatttttctccctcgttgacccgatcagttttttttcgtcgctggggattttcaaattttttttgagggatcggttttgatttgttacgtagatggcggattcttcacccgattcgtgtttcaaaggaggcaaatttagtgctccagggtttcgatttcatccaactgatgaagagcttgtgatgtattatttgaagaggaagatttgtaggaagaggcttagagttaatgttatcggtgttgttgatgtttacaaaatggatcctgaggaattgcctggtcaatcaatgttgaagacgggagatagacagtggttctatttcactccaaggagtaggaagtatccaaacgcagctaggtctaatagaggaactgaaaatgggtattggaaggctacagggaaggatcgagtcattgagtataattctagatcggtgggacttaaaaagactcttgttttctatagaggccgggctcctagtggtgagcggactgattgggtgatgcatgagtatacgatggatgaagatgaactagggagatgtaagaaccctcaggagtactatgctctttataagttgttcaagaaaagtggggctggtcctaagaatggtgaacagtatggtgctccgtttcaagaagaggaatgggttgatgatgataatgaagatgtgaatgctattgctgtagctgtgccagagcaacctgtggttcgttatgaggatgctcgtcgtgtggatgagaggagactttttaatcctgttattcttcagttagaggatatcgatgagcttctcaatggaatccctaatgcacctggtgttcctcaaagatgtattcctcaggtgaatagtgaagaagagctgcagagtacgttggtgaataattctgctagagagttcttgccaaacggtcagcaatacaacaggccctcaagttttgactcattagagaccgctgaggtcacctcagctcctctggtgtttgagaaggaagatttcattgaaatggatgatcttcttctgatccctgaattcggagcttcttcaactgagaaagccgcacagttctcgaaccatggtgaattcgacgattttaatgagtttgaccaattgttccatgacgtttccatgtctttggatatggaacctattgatcagggaacttctgcaaatctgtcttctctgagtgattctgctaactacacatcagaccaaaaacagcaactcctttatcaacagttccaggaccagactcccgagaaccagctgaacaacatcatggatcctagtacaactctcaatcaaatcactagcgatatttggttcgaggatgatcaggccattctatttgatcaacaacaatccttttctggagcatttgcttcaccctcatcaggtgtgatgcctgattccaccaatcctactatgagtgtgaatgcccaaggccatgaaatccaaaatggtggtggaacaacaagccagttctcatcggctttgtgggcattaatggactcaataccttcaacgccagcctctgcgtgtgagggtccccttaaccgaacctttgtacgtatgtctagcttcagccgtatgaggttcaatggaaaggctaatggaacgccagtgagtactaccatagcaaagaagggtattagaaacagaggttttcttctattatcaatcgtgggtgctttgtgtgccatcttctgggtgttggtagccacagttcgagtctcaggtagaagtcttctcttgaaagactagtggtggttctcttgaactcttaactactggtaagttagaagaagaaaccatgatccacattagtgttcatgggattattgacctatctataatatatgaaactttgaatatgtacagagtttgaaagagtaaagtacaataattcgtgataaaggagtttcttttcctt

SEQ ID NO: 49577 - protein, 557 aa, Arabidopsis thaliana
  peptide (1)..(557): Ceres Seq. ID no. 13588668
  misc_feature (16)..(144): Pfam Name: No apical meristem (NAM) protein Pfam Description: No apical meristem (NAM) protein
  misc_feature (17)..(311): Homolog of NCBI NO: 25403164 NR Description: CDS protein F9L11.7 [imported] - Arabidopsis
  misc_feature (17)..(311): Homolog of NCBI NO: 18398627 NR Description: NAM protein -related [Arabidopsis thaliana]
  misc_feature (333)..(553): Homolog of NCBI NO: 21105740 NR Description: nam-like protein 6 [Petunia x hybrida]
  misc_feature (18)..(310): Homolog of NCBI NO: 21105740 NR Description: nam-like protein 6 [Petunia x hybrida]
  misc_feature (331)..(551): Homolog of NCBI NO: 21105742 NR Description: nam-like protein 7 [Petunia x hybrida]
  misc_feature (18)..(300): Homolog of NCBI NO: 21105742 NR Description: nam-like protein 7 [Petunia x hybrida]
  misc_feature (1)..(554): Homolog of NCBI NO: 25518168 NR Description: BTF3b factor protein F23M19.14 - Arabidopsis
  misc_feature (1)..(554): Homolog of NCBI NO: 18399166 NR Description: No apical meristem (NAM) protein family
  misc_feature (1)..(554): Homolog of NCBI NO: 21618244 NR Description: NAM-like protein [Arabidopsis thaliana]
  misc_feature (1)..(557): Homolog of NCBI NO: 18399168 NR Description: NAM(no apical meristem) protein -related
MADSSPDSCFKGGKFSAPGFRFHPTDEELVMYYLKRKICRKRLRVNVIGVVDVYKMDPEELPGQSMLKTGDRQWFYFTPRSRKYPNAARSNRGTENGYWKATGKDRVIEYNSRSVGLKKTLVFYRGRAPSGERTDWVMHEYTMDEDELGRCKNPQEYYALYKLFKKSGAGPKNGEQYGAPFQEEEWVDDDNEDVNAIAVAVPEQPVVRYEDARRVDERRLFNPVILQLEDIDELLNGIPNAPGVPQRCIPQVNSEEELQSTLVNNSAREFLPNGQQYNRPSSFDSLETAEVTSAPLVFEKEDFIEMDDLLLIPEFGASSTEKAAQFSNHGEFDDFNEFDQLFHDVSMSLDMEPIDQGTSANLSSLSDSANYTSDQKQQLLYQQFQDQTPENQLNNIMDPSTTLNQITSDIWFEDDQAILFDQQQSFSGAFASPSSGVMPDSTNPTMSVNAQGHEIQNGGGTTSQFSSALWALMDSIPSTPASACEGPLNRTFVRMSSFSRMRFNGKANGTPVSTTIAKKGIRNRGFLLLSIVGALCAIFWVLVATVRVSGRSLLLKD

SEQ ID NO: 49578 - protein, 527 aa, Arabidopsis thaliana
  peptide (1)..(527): Ceres Seq. ID no. 13588669
  misc_feature (1)..(114): Pfam Name: No apical meristem (NAM) protein Pfam Description: No apical meristem (NAM) protein
  misc_feature (1)..(281): Homolog of NCBI NO: 25403164 NR Description: CDS protein F9L11.7 [imported] - Arabidopsis
  misc_feature (1)..(281): Homolog of NCBI NO: 18398627 NR Description: NAM protein -related [Arabidopsis thaliana]
  misc_feature (303)..(523): Homolog of NCBI NO: 21105740 NR Description: nam-like protein 6 [Petunia x hybrida]
  misc_feature (1)..(280): Homolog of NCBI NO: 21105740 NR Description: nam-like protein 6 [Petunia x hybrida]
  misc_feature (301)..(521): Homolog of NCBI NO: 21105742 NR Description: nam-like protein 7 [Petunia x hybrida]
  misc_feature (1)..(270): Homolog of NCBI NO: 21105742 NR Description: nam-like protein 7 [Petunia x hybrida]
  misc_feature (1)..(524): Homolog of NCBI NO: 25518168 NR Description: BTF3b factor protein F23M19.14 - Arabidopsis
  misc_feature (1)..(524): Homolog of NCBI NO: 18399166 NR Description: No apical meristem (NAM) protein family
  misc_feature (1)..(524): Homolog of NCBI NO: 21618244 NR Description: NAM-like protein [Arabidopsis thaliana]
  misc_feature (1)..(527): Homolog of NCBI NO: 18399168 NR Description: NAM(no apical meristem) protein -related
MYYLKRKICRKRLRVNVIGVVDVYKMDPEELPGQSMLKTGDRQWFYFTPRSRKYPNAARSNRGTENGYWKATGKDRVIEYNSRSVGLKKTLVFYRGRAPSGERTDWVMHEYTMDEDELGRCKNPQEYYALYKLFKKSGAGPKNGEQYGAPFQEEEWVDDDNEDVNAIAVAVPEQPVVRYEDARRVDERRLFNPVILQLEDIDELLNGIPNAPGVPQRCIPQVNSEEELQSTLVNNSAREFLPNGQQYNRPSSFDSLETAEVTSAPLVFEKEDFIEMDDLLLIPEFGASSTEKAAQFSNHGEFDDFNEFDQLFHDVSMSLDMEPIDQGTSANLSSLSDSANYTSDQKQQLLYQQFQDQTPENQLNNIMDPSTTLNQITSDIWFEDDQAILFDQQQSFSGAFASPSSGVMPDSTNPTMSVNAQGHEIQNGGGTTSQFSSALWALMDSIPSTPASACEGPLNRTFVRMSSFSRMRFNGKANGTPVSTTIAKKGIRNRGFLLLSIVGALCAIFWVLVATVRVSGRSLLLKD

SEQ ID NO: 49579 - protein, 502 aa, Arabidopsis thaliana
  peptide (1)..(502): Ceres Seq. ID no. 13588670
  misc_feature (1)..(89): Pfam Name: No apical meristem (NAM) protein Pfam Description: No apical meristem (NAM) protein
  misc_feature (1)..(256): Homolog of NCBI NO: 25403164 NR Description: CDS protein F9L11.7 [imported] - Arabidopsis
  misc_feature (1)..(256): Homolog of NCBI NO: 18398627 NR Description: NAM protein -related [Arabidopsis thaliana]
  misc_feature (278)..(498): Homolog of NCBI NO: 21105740 NR Description: nam-like protein 6 [Petunia x hybrida]
  misc_feature (1)..(255): Homolog of NCBI NO: 21105740 NR Description: nam-like protein 6 [Petunia x hybrida]
  misc_feature (276)..(496): Homolog of NCBI NO: 21105742 NR Description: nam-like protein 7 [Petunia x hybrida]
  misc_feature (1)..(245): Homolog of NCBI NO: 21105742 NR Description: nam-like protein 7 [Petunia x hybrida]
  misc_feature (1)..(499): Homolog of NCBI NO: 25518168 NR Description: BTF3b factor protein F23M19.14 - Arabidopsis
  misc_feature (1)..(499): Homolog of NCBI NO: 18399166 NR Description: No apical meristem (NAM) protein family
  misc_feature (1)..(499): Homolog of NCBI NO: 21618244 NR Description: NAM-like protein [Arabidopsis thaliana]
  misc_feature (1)..(502): Homolog of NCBI NO: 18399168 NR Description: NAM(no apical meristem) protein -related
MDPEELPGQSMLKTGDRQWFYFTPRSRKYPNAARSNRGTENGYWKATGKDRVIEYNSRSVGLKKTLVFYRGRAPSGERTDWVMHEYTMDEDELGRCKNPQEYYALYKLFKKSGAGPKNGEQYGAPFQEEEWVDDDNEDVNAIAVAVPEQPVVRYEDARRVDERRLFNPVILQLEDIDELLNGIPNAPGVPQRCIPQVNSEEELQSTLVNNSAREFLPNGQQYNRPSSFDSLETAEVTSAPLVFEKEDFIEMDDLLLIPEFGASSTEKAAQFSNHGEFDDFNEFDQLFHDVSMSLDMEPIDQGTSANLSSLSDSANYTSDQKQQLLYQQFQDQTPENQLNNIMDPSTTLNQITSDIWFEDDQAILFDQQQSFSGAFASPSSGVMPDSTNPTMSVNAQGHEIQNGGGTTSQFSSALWALMDSIPSTPASACEGPLNRTFVRMSSFSRMRFNGKANGTPVSTTIAKKGIRNRGFLLLSIVGALCAIFWVLVATVRVSGRSLLLKD

SEQ ID NO: 49580 - DNA, 1795 bp, Arabidopsis thaliana
  misc_feature (1)..(1795): Ceres Seq. ID no. 12606328
  misc_feature: MA Experiment ID: 20000444 Result: Up-regulated in Transcription
  misc_feature: MA Experiment 20000444 PARAMETER Experiment Name: At_100uM_NAA__P Parameter: Age (day) Value: 14
  misc_feature: MA Experiment 20000444 PARAMETER Experiment Name: At_100uM_NAA__P Parameter: Organism Value: A. thaliana
  misc_feature: MA Experiment 20000444 PARAMETER Experiment Name: At_100uM_NAA__P Parameter: Plant Line Value: WS
  misc_feature: MA Experiment 20000444 PARAMETER Experiment Name: At_100uM_NAA__P Parameter: Timepoint (hr) Value: 1
  misc_feature: MA Experiment 20000444 PARAMETER Experiment Name: At_100uM_NAA__P Parameter: Tissue Value: Aerial
  misc_feature: MA Experiment 20000444 PARAMETER Experiment Name: At_100uM_NAA__P Parameter: Treatment Value: 100uM NAA vs. No Treatment
  misc_feature: MA Experiment ID: 20000495 Result: Up-regulated in Transcription
  misc_feature: MA Experiment 20000495 PARAMETER Experiment Name: At_Guard_Cells_P Parameter: Harvest Date Value: 8/2/2002
  misc_feature: MA Experiment 20000495 PARAMETER Experiment Name: At_Guard_Cells_P Parameter: Organism Value: A. thaliana
  misc_feature: MA Experiment 20000495 PARAMETER Experiment Name: At_Guard_Cells_P Parameter: Tissue Value: Guard Cells vs. Leaves
  misc_feature: MA Experiment ID: 20001911 Result: Down-regulated in Transcription
  misc_feature: MA Experiment 20001911 PARAMETER Experiment Name: At_Drought_Reproduction_P Parameter: Age (day) Value: 40
  misc_feature: MA Experiment 20001911 PARAMETER Experiment Name: At_Drought_Reproduction_P Parameter: Organism Value: A. thaliana
  misc_feature: MA Experiment 20001911 PARAMETER Experiment Name: At_Drought_Reproduction_P Parameter: Plant Line Value: WS
  misc_feature: MA Experiment 20001911 PARAMETER Experiment Name: At_Drought_Reproduction_P Parameter: Timepoint (day) Value: 10
  misc_feature: MA Experiment 20001911 PARAMETER Experiment Name: At_Drought_Reproduction_P Parameter: Tissue Value: Flowers
  misc_feature: MA Experiment 20001911 PARAMETER Experiment Name: At_Drought_Reproduction_P Parameter: Treatment Value: Drought vs. No Drought
acacaacactcttctctattttctttctttctatctatatatattcatatctcttctccattctctcttacttcaaaattcatcacaaagagagatagagagatggagaacggtgagaaagcagctgagactgtcgttgttgggaactatgttgagatggagaaggatggtaaagctttagacatcaaatctaagctatctgacatgttttggcatggtggctctgcttatgatgcttggttcagctgtgcttccaatcaggtggcacaagtgctgttgacactgccatactcgttctcacagctggggatgctctcagggattctgtttcagctcttttatggcatcttaggtagttggactgcttacctcatcagtattctctatgttgaatacagaaccagaaaggaaagagagaaagttaacttcagaaaccatgtcattcagtggtttgaggttcttgatggattgcttgggaagcattggaggaatgttggtttagcctttaactgcaccttccttctctttggatctgtcattcaactcatagcttgtgccagcaacatatattacataaatgataatctggacaagaggacatggacatacatatttggagcatgttgtgcaaccacagtctttattccttccttccacaactacaggatctggtcttttcttggactcttgatgaccacttacactgcttggtacctcaccattgcctctatcctccatggacaggtagaaggagtgaagcattcaggaccaagcaagctggttttatacttcacaggggccacaaacattctttacacattcggtggacatgctgttactgtagagataatgcatgctatgtggaaacctcagaagttcaagtccatatacctgtttgcaacactctacgtgctgacgctaacgctgccttctgcgtctgcggtttattgggcgtttggtgatttgcttctaaaccattcaaacgcatttgctcttctcccaaagaatctttaccgtgactttgcagttgtgcttatgctcatccatcagttcatcacctttggttttgcttgcacgccactctactttgtgtgggagaagctaatagggatgcatgagtgcagaagcatgtgtaaacgagccgctgcgaggctccctgtcgttatacccatttggtttcttgctatcatattcccgttctttggtcccattaactcaaccgtaggatctcttctcgtcagcttcactgtctacatcatcccagcactagctcacatcttcaccttccgctcatccgccgcacgtgaaaacgctgtggagcagccaccaaggtttctaggacgatggactggggcattcacgatcaatgccttcatagttgtgtgggtgttcattgttggattcgggttcggtggttgggctagtatgatcaattttgtacaccagattgacacctttggcctcttcaccaaatgctaccaatgcccaccaccggttatggtctcacctccaccaatcagccatcctcacttcaatcacactcatggcctttgaattttaagcatcaaatctttagtaccggcccaaaagtgtccctagctgccacgaaagttggcgtttttccacggatcagaaaaagacgagatttgggtttttcttagatctaccaagcccgtagtgtgtttgggtgtttgtttagcatctaaagttggttggtctgtttttattgtatttcatgtttgggaattaaagaaaaaaaaaacaaaactttaggagttaatgccatatctttcac

SEQ ID NO: 49581 - protein, 517 aa, Arabidopsis thaliana
  peptide (1)..(517): Ceres Seq. ID no. 12606329
  misc_feature (39)..(505): Homolog of NCBI NO: 6650716 NR Description: AUX1-like protein [Populus tremula x Populus
  misc_feature (39)..(513): Homolog of NCBI NO: 10800920 NR Description: putative AUX1-like permease [Medicago truncatula]
  misc_feature (46)..(513): Homolog of NCBI NO: 37651177 NR Description: AUX1-like auxin influx carrier protein [Pisum
  misc_feature (52)..(509): Homolog of NCBI NO: 6689614 NR Description: AUX1 protein [Zea mays]
  misc_feature (48)..(517): Homolog of NCBI NO: 37531048 NR Description: putative AUX1-like permease
  misc_feature (39)..(497): Homolog of NCBI NO: 10800922 NR Description: putative AUX1-like permease [Medicago truncatula]
  misc_feature (43)..(497): Homolog of NCBI NO: 15217443 NR Description: putative AUX1-like permease
  misc_feature (39)..(515): Homolog of NCBI NO: 14279184 NR Description: putative AUX1-like permease
  misc_feature (34)..(513): Homolog of NCBI NO: 21586474 NR Description: auxin influx carrier protein [Medicago truncatula]
  misc_feature (35)..(517): Homolog of NCBI NO: 15226450 NR Description: AUX1-like amino acid permease
  misc_feature (39)..(505): Homolog of NCBI NO: 6650716 NR Description: AUX1-like protein [Populus tremula x Populus
  misc_feature (39)..(513): Homolog of NCBI NO: 10800920 NR Description: putative AUX1-like permease [Medicago truncatula]
  misc_feature (46)..(513): Homolog of NCBI NO: 37651177 NR Description: AUX1-like auxin influx carrier protein [Pisum
  misc_feature (52)..(509): Homolog of NCBI NO: 6689614 NR Description: AUX1 protein [Zea mays]
  misc_feature (48)..(517): Homolog of NCBI NO: 37531048 NR Description: putative AUX1-like permease
  misc_feature (39)..(497): Homolog of NCBI NO: 10800922 NR Description: putative AUX1-like permease [Medicago truncatula]
  misc_feature (43)..(497): Homolog of NCBI NO: 15217443 NR Description: putative AUX1-like permease
  misc_feature (39)..(515): Homolog of NCBI NO: 14279184 NR Description: putative AUX1-like permease
  misc_feature (34)..(513): Homolog of NCBI NO: 21586474 NR Description: auxin influx carrier protein [Medicago truncatula]
  misc_feature (35)..(517): Homolog of NCBI NO: 15226450 NR Description: AUX1-like amino acid permease
TQHSSLFSFFLSIYIHISSPFSLTSKFITKRDREMENGEKAAETVVVGNYVEMEKDGKALDIKSKLSDMFWHGGSAYDAWFSCASNQVAQVLLTLPYSFSQLGMLSGILFQLFYGILGSWTAYLISILYVEYRTRKEREKVNFRNHVIQWFEVLDGLLGKHWRNVGLAFNCTFLLFGSVIQLIACASNIYYINDNLDKRTWTYIFGACCATTVFIPSFHNYRIWSFLGLLMTTYTAWYLTIASILHGQVEGVKHSGPSKLVLYFTGATNILYTFGGHAVTVEIMHAMWKPQKFKSIYLFATLYVLTLTLPSASAVYWAFGDLLLNHSNAFALLPKNLYRDFAVVLMLIHQFITFGFACTPLYFVWEKLIGMHECRSMCKRAAARLPVVIPIWFLAIIFPFFGPINSTVGSLLVSFTVYIIPALAHIFTFRSSAARENAVEQPPRFLGRWTGAFTINAFIVVWVFIVGFGFGGWASMINFVHQIDTFGLFTKCYQCPPPVMVSPPPISHPHFNHTHGL

SEQ ID NO: 49582 - protein, 483 aa, Arabidopsis thaliana
  peptide (1)..(483): Ceres Seq. ID no. 12606330
  misc_feature (5)..(471): Homolog of NCBI NO: 6650716 NR Description: AUX1-like protein [Populus tremula x Populus
  misc_feature (5)..(479): Homolog of NCBI NO: 10800920 NR Description: putative AUX1-like permease [Medicago truncatula]
  misc_feature (12)..(479): Homolog of NCBI NO: 37651177 NR Description: AUX1-like auxin influx carrier protein [Pisum
  misc_feature (18)..(475): Homolog of NCBI NO: 6689614 NR Description: AUX1 protein [Zea mays]
  misc_feature (14)..(483): Homolog of NCBI NO: 37531048 NR Description: putative AUX1-like permease
  misc_feature (5)..(463): Homolog of NCBI NO: 10800922 NR Description: putative AUX1-like permease [Medicago truncatula]
  misc_feature (9)..(463): Homolog of NCBI NO: 15217443 NR Description: putative AUX1-like permease
  misc_feature (5)..(481): Homolog of NCBI NO: 14279184 NR Description: putative AUX1-like permease
  misc_feature (1)..(479): Homolog of NCBI NO: 21586474 NR Description: auxin influx carrier protein [Medicago truncatula]
  misc_feature (1)..(483): Homolog of NCBI NO: 15226450 NR Description: AUX1-like amino acid permease
  misc_feature (5)..(471): Homolog of NCBI NO: 6650716 NR Description: AUX1-like protein [Populus tremula x Populus
  misc_feature (5)..(479): Homolog of NCBI NO: 10800920 NR Description: putative AUX1-like permease [Medicago truncatula]
  misc_feature (12)..(479): Homolog of NCBI NO: 37651177 NR Description: AUX1-like auxin influx carrier protein [Pisum
  misc_feature (18)..(475): Homolog of NCBI NO: 6689614 NR Description: AUX1 protein [Zea mays]
  misc_feature (14)..(483): Homolog of NCBI NO: 37531048 NR Description: putative AUX1-like permease
  misc_feature (5)..(463): Homolog of NCBI NO: 10800922 NR Description: putative AUX1-like permease [Medicago truncatula]
  misc_feature (9)..(463): Homolog of NCBI NO: 15217443 NR Description: putative AUX1-like permease
  misc_feature (5)..(481): Homolog of NCBI NO: 14279184 NR Description: putative AUX1-like permease
  misc_feature (1)..(479): Homolog of NCBI NO: 21586474 NR Description: auxin influx carrier protein [Medicago truncatula]
  misc_feature (1)..(483): Homolog of NCBI NO: 15226450 NR Description: AUX1-like amino acid permease
MENGEKAAETVVVGNYVEMEKDGKALDIKSKLSDMFWHGGSAYDAWFSCASNQVAQVLLTLPYSFSQLGMLSGILFQLFYGILGSWTAYLISILYVEYRTRKEREKVNFRNHVIQWFEVLDGLLGKHWRNVGLAFNCTFLLFGSVIQLIACASNIYYINDNLDKRTWTYIFGACCATTVFIPSFHNYRIWSFLGLLMTTYTAWYLTIASILHGQVEGVKHSGPSKLVLYFTGATNILYTFGGHAVTVEIMHAMWKPQKFKSIYLFATLYVLTLTLPSASAVYWAFGDLLLNHSNAFALLPKNLYRDFAVVLMLIHQFITFGFACTPLYFVWEKLIGMHECRSMCKRAAARLPVVIPIWFLAIIFPFFGPINSTVGSLLVSFTVYIIPALAHIFTFRSSAARENAVEQPPRFLGRWTGAFTINAFIVVWVFIVGFGFGGWASMINFVHQIDTFGLFTKCYQCPPPVMVSPPPISHPHFNHTHGL

SEQ ID NO: 49583 - protein, 465 aa, Arabidopsis thaliana
  peptide (1)..(465): Ceres Seq. ID no. 12606331
  misc_feature (1)..(453): Homolog of NCBI NO: 6650716 NR Description: AUX1-like protein [Populus tremula x Populus
  misc_feature (1)..(461): Homolog of NCBI NO: 10800920 NR Description: putative AUX1-like permease [Medicago truncatula]
  misc_feature (1)..(461): Homolog of NCBI NO: 37651177 NR Description: AUX1-like auxin influx carrier protein [Pisum
  misc_feature (1)..(457): Homolog of NCBI NO: 6689614 NR Description: AUX1 protein [Zea mays]
  misc_feature (1)..(465): Homolog of NCBI NO: 37531048 NR Description: putative AUX1-like permease
  misc_feature (1)..(445): Homolog of NCBI NO: 10800922 NR Description: putative AUX1-like permease [Medicago truncatula]
  misc_feature (1)..(445): Homolog of NCBI NO: 15217443 NR Description: putative AUX1-like permease
  misc_feature (1)..(463): Homolog of NCBI NO: 14279184 NR Description: putative AUX1-like permease
  misc_feature (1)..(461): Homolog of NCBI NO: 21586474 NR Description: auxin influx carrier protein [Medicago truncatula]
  misc_feature (1)..(465): Homolog of NCBI NO: 15226450 NR Description: AUX1-like amino acid permease
  misc_feature (1)..(453): Homolog of NCBI NO: 6650716 NR Description: AUX1-like protein [Populus tremula x Populus
  misc_feature (1)..(461): Homolog of NCBI NO: 10800920 NR Description: putative AUX1-like permease [Medicago truncatula]
  misc_feature (1)..(461): Homolog of NCBI NO: 37651177 NR Description: AUX1-like auxin influx carrier protein [Pisum
  misc_feature (1)..(457): Homolog of NCBI NO: 6689614 NR Description: AUX1 protein [Zea mays]
  misc_feature (1)..(465): Homolog of NCBI NO: 37531048 NR Description: putative AUX1-like permease
  misc_feature (1)..(445): Homolog of NCBI NO: 10800922 NR Description: putative AUX1-like permease [Medicago truncatula]
  misc_feature (1)..(445): Homolog of NCBI NO: 15217443 NR Description: putative AUX1-like permease
  misc_feature (1)..(463): Homolog of NCBI NO: 14279184 NR Description: putative AUX1-like permease
  misc_feature (1)..(461): Homolog of NCBI NO: 21586474 NR Description: auxin influx carrier protein [Medicago truncatula]
  misc_feature (1)..(465): Homolog of NCBI NO: 15226450 NR Description: AUX1-like amino acid permease
MEKDGKALDIKSKLSDMFWHGGSAYDAWFSCASNQVAQVLLTLPYSFSQLGMLSGILFQLFYGILGSWTAYLISILYVEYRTRKEREKVNFRNHVIQWFEVLDGLLGKHWRNVGLAFNCTFLLFGSVIQLIACASNIYYINDNLDKRTWTYIFGACCATTVFIPSFHNYRIWSFLGLLMTTYTAWYLTIASILHGQVEGVKHSGPSKLVLYFTGATNILYTFGGHAVTVEIMHAMWKPQKFKSIYLFATLYVLTLTLPSASAVYWAFGDLLLNHSNAFALLPKNLYRDFAVVLMLIHQFITFGFACTPLYFVWEKLIGMHECRSMCKRAAARLPVVIPIWFLAIIFPFFGPINSTVGSLLVSFTVYIIPALAHIFTFRSSAARENAVEQPPRFLGRWTGAFTINAFIVVWVFIVGFGFGGWASMINFVHQIDTFGLFTKCYQCPPPVMVSPPPISHPHFNHTHGL

SEQ ID NO: 49584 - DNA, 1707 bp, Arabidopsis thaliana
  misc_feature (1)..(1707): Ceres Seq. ID no. 13588671
  misc_feature: MA Experiment ID: 108434 Result: Up-regulated in Transcription
  misc_feature: MA Experiment 108434 PARAMETER Experiment Name: At_Root_Tips_cDNA_P Parameter: Tissue Value: Root Tips
  misc_feature: MA Experiment ID: 108577 Result: Down-regulated in Transcription
  misc_feature: MA Experiment 108577 PARAMETER Experiment Name: At_42deg_Heat_cDNA_P Parameter: Temperature (deg C) Value: 42 vs. 22
  misc_feature: MA Experiment 108577 PARAMETER Experiment Name: At_42deg_Heat_cDNA_P Parameter: Timepoint (hr) Value: 6
  misc_feature: MA Experiment 108577 PARAMETER Experiment Name: At_42deg_Heat_cDNA_P Parameter: Tissue Value: Aerial
  misc_feature: MA Experiment ID: 108585 Result: Down-regulated in Transcription
  misc_feature: MA Experiment 108585 PARAMETER Experiment Name: At_5mM_NaNP_cDNA_P Parameter: Timepoint (hr) Value: 6
  misc_feature: MA Experiment 108585 PARAMETER Experiment Name: At_5mM_NaNP_cDNA_P Parameter: Tissue Value: Aerial
  misc_feature: MA Experiment 108585 PARAMETER Experiment Name: At_5mM_NaNP_cDNA_P Parameter: Treatment Value: null
  misc_feature: MA Experiment ID: 20000069 Result: Up-regulated in Transcription
  misc_feature: MA Experiment 20000069 PARAMETER Experiment Name: At_100uM_ABA_Mutants_cDNA_P Parameter: Plant Line Value: CS23
  misc_feature: MA Experiment 20000069 PARAMETER Experiment Name: At_100uM_ABA_Mutants_cDNA_P Parameter: Timepoint (hr) Value: 6
  misc_feature: MA Experiment 20000069 PARAMETER Experiment Name: At_100uM_ABA_Mutants_cDNA_P Parameter: Tissue Value: Aerial
  misc_feature: MA Experiment 20000069 PARAMETER Experiment Name: At_100uM_ABA_Mutants_cDNA_P Parameter: Treatment Value: 100uM ABA vs. No Treatment
  misc_feature: MA Experiment ID: 20000070 Result: Up-regulated in Transcription
  misc_feature: MA Experiment 20000070 PARAMETER Experiment Name: At_100uM_ABA_Mutants_cDNA_P Parameter: Plant Line Value: CS24
  misc_feature: MA Experiment 20000070 PARAMETER Experiment Name: At_100uM_ABA_Mutants_cDNA_P Parameter: Timepoint (hr) Value: 6
  misc_feature: MA Experiment 20000070 PARAMETER Experiment Name: At_100uM_ABA_Mutants_cDNA_P Parameter: Tissue Value: Aerial
  misc_feature: MA Experiment 20000070 PARAMETER Experiment Name: At_100uM_ABA_Mutants_cDNA_P Parameter: Treatment Value: 100uM ABA vs. No Treatment
  misc_feature: MA Experiment ID: 20000086 Result: Up-regulated in Transcription
  misc_feature: MA Experiment 20000086 PARAMETER Experiment Name: At_100uM_ABA_Mutants_cDNA_P Parameter: Plant Line Value: CS22
  misc_feature: MA Experiment 20000086 PARAMETER Experiment Name: At_100uM_ABA_Mutants_cDNA_P Parameter: Timepoint (hr) Value: 6
  misc_feature: MA Experiment 20000086 PARAMETER Experiment Name: At_100uM_ABA_Mutants_cDNA_P Parameter: Tissue Value: Aerial
  misc_feature: MA Experiment 20000086 PARAMETER Experiment Name: At_100uM_ABA_Mutants_cDNA_P Parameter: Treatment Value: 100uM ABA vs. No Treatment
  misc_feature: MA Experiment ID: 20000089 Result: Up-regulated in Transcription
  misc_feature: MA Experiment ID: 20000111 Result: Down-regulated in Transcription
  misc_feature: MA Experiment 20000111 PARAMETER Experiment Name: At_42deg_Heat_cDNA_P Parameter: Temperature (deg C) Value: 42 vs. 22
  misc_feature: MA Experiment 20000111 PARAMETER Experiment Name: At_42deg_Heat_cDNA_P Parameter: Timepoint (hr) Value: 6
  misc_feature: MA Experiment 20000111 PARAMETER Experiment Name: At_42deg_Heat_cDNA_P Parameter: Tissue Value: Aerial
  misc_feature: MA Experiment ID: 20000113 Result: Down-regulated in Transcription
  misc_feature: MA Experiment 20000113 PARAMETER Experiment Name: At_42deg_Heat_cDNA_P Parameter: Temperature (deg C) Value: 42 vs. 22
  misc_feature: MA Experiment 20000113 PARAMETER Experiment Name: At_42deg_Heat_cDNA_P Parameter: Timepoint (hr) Value: 8
  misc_feature: MA Experiment 20000113 PARAMETER Experiment Name: At_42deg_Heat_cDNA_P Parameter: Tissue Value: Aerial
  misc_feature: MA Experiment ID: 20000171 Result: Down-regulated in Transcription
  misc_feature: MA Experiment 20000171 PARAMETER Experiment Name: At_42deg_Heat_P Parameter: Age (day) Value: 14
  misc_feature: MA Experiment 20000171 PARAMETER Experiment Name: At_42deg_Heat_P Parameter: Organism Value: A. thaliana
  misc_feature: MA Experiment 20000171 PARAMETER Experiment Name: At_42deg_Heat_P Parameter: Plant Line Value: WS
  misc_feature: MA Experiment 20000171 PARAMETER Experiment Name: At_42deg_Heat_P Parameter: Temperature (deg C) Value: 42 vs. 22
  misc_feature: MA Experiment 20000171 PARAMETER Experiment Name: At_42deg_Heat_P Parameter: Timepoint (hr) Value: 1
  misc_feature: MA Experiment 20000171 PARAMETER Experiment Name: At_42deg_Heat_P Parameter: Tissue Value: Aerial
  misc_feature: MA Experiment ID: 20000173 Result: Down-regulated in Transcription
  misc_feature: MA Experiment 20000173 PARAMETER Experiment Name: At_42deg_Heat_P Parameter: Age (day) Value: 14
  misc_feature: MA Experiment 20000173 PARAMETER Experiment Name: At_42deg_Heat_P Parameter: Organism Value: A. thaliana
  misc_feature: MA Experiment 20000173 PARAMETER Experiment Name: At_42deg_Heat_P Parameter: Plant Line Value: WS
  misc_feature: MA Experiment 20000173 PARAMETER Experiment Name: At_42deg_Heat_P Parameter: Temperature (deg C) Value: 42 vs. 22
  misc_feature: MA Experiment 20000173 PARAMETER Experiment Name: At_42deg_Heat_P Parameter: Timepoint (hr) Value: 6
  misc_feature: MA Experiment 20000173 PARAMETER Experiment Name: At_42deg_Heat_P Parameter: Tissue Value: Aerial
  misc_feature: MA Experiment ID: 20000184 Result: Down-regulated in Transcription
  misc_feature: MA Experiment 20000184 PARAMETER Experiment Name: At_Shoots__P Parameter: Age (day) Value: 7
  misc_feature: MA Experiment 20000184 PARAMETER Experiment Name: At_Shoots__P Parameter: Tissue Value: Shoots vs. Whole Plant
  misc_feature: MA Experiment ID: 20000185 Result: Up-regulated in Transcription
  misc_feature: MA Experiment 20000185 PARAMETER Experiment Name: At_Roots__P Parameter: Age (day) Value: 7 vs. 21
  misc_feature: MA Experiment 20000185 PARAMETER Experiment Name: At_Roots__P Parameter: Organism Value: A. thaliana
  misc_feature: MA Experiment 20000185 PARAMETER Experiment Name: At_Roots__P Parameter: Tissue Value: Roots vs. Whole Plant
  misc_feature: MA Experiment ID: 20000234 Result: Up-regulated in Transcription
  misc_feature: MA Experiment 20000234 PARAMETER Experiment Name: At_Siliques_P Parameter: Age (day) Value: 21
  misc_feature: MA Experiment 20000234 PARAMETER Experiment Name: At_Siliques_P Parameter: Organism Value: A. thaliana
  misc_feature: MA Experiment 20000234 PARAMETER Experiment Name: At_Siliques_P Parameter: Plant Line Value: WS
  misc_feature: MA Experiment 20000234 PARAMETER Experiment Name: At_Siliques_P Parameter: Tissue Value: Less Than 5mm Siliques vs. Whole Plant
  misc_feature: MA Experiment ID: 20000264 Result: Up-regulated in Transcription
  misc_feature: MA Experiment 20000264 PARAMETER Experiment Name: At_Open_Flower_P Parameter: Age (day) Value: 21
  misc_feature: MA Experiment 20000264 PARAMETER Experiment Name: At_Open_Flower_P Parameter: Plant Line Value: WS
  misc_feature: MA Experiment 20000264 PARAMETER Experiment Name: At_Open_Flower_P Parameter: Tissue Value: Open Flower vs. Whole Plant
  misc_feature: MA Experiment ID: 20000265 Result: Up-regulated in Transcription
  misc_feature: MA Experiment 20000265 PARAMETER Experiment Name: At_Open_Flower_P Parameter: Age (day) Value: 21
  misc_feature: MA Experiment 20000265 PARAMETER Experiment Name: At_Open_Flower_P Parameter: Plant Line Value: WS
  misc_feature: MA Experiment 20000265 PARAMETER Experiment Name: At_Open_Flower_P Parameter: Tissue Value: Closed Flower vs. Whole Plant
  misc_feature: MA Experiment ID: 20000439 Result: Up-regulated in Transcription
  misc_feature: MA Experiment 20000439 PARAMETER Experiment Name: At_Roots__P Parameter: Age (day) Value: 14 vs. 21
  misc_feature: MA Experiment 20000439 PARAMETER Experiment Name: At_Roots__P Parameter: Organism Value: A. thaliana
  misc_feature: MA Experiment 20000439 PARAMETER Experiment Name: At_Roots__P Parameter: Tissue Value: Roots vs. Whole Plant
  misc_feature: MA Experiment ID: 20000495 Result: Up-regulated in Transcription
  misc_feature: MA Experiment 20000495 PARAMETER Experiment Name: At_Guard_Cells_P Parameter: Harvest Date Value: 8/2/2002
  misc_feature: MA Experiment 20000495 PARAMETER Experiment Name: At_Guard_Cells_P Parameter: Organism Value: A. thaliana
  misc_feature: MA Experiment 20000495 PARAMETER Experiment Name: At_Guard_Cells_P Parameter: Tissue Value: Guard Cells vs. Leaves
accacttaccatctgggttttgcttcattaaccattacagtgactctgcaatctttcaagttttcagatatcttctctttaagtggcccagattgtgttcgtctgtttctgtgagagtgagtaaaactctatttttcgaaaagatacattcttgcatgtgcgtagatcagccttgtatagaactgagattttggtgaagctttggattggtttctttgttctctctgttcttgtgaagggaacaacacaaagacggtggctttgctcggtaaatagattatggaacatggtttaccgtctattaaatcatggaagtcacttgttaagagaagaaacaatgctcaagaagggggtaaatcgtcatggaaaatgaaaccagttgtggtgctaatgtgtacagtacttttgatcttttggtataagactacaaatattcagtatgaacaaacagagatagaagaaacagattatccatttgagatggcaaaggaatctgaaccggtcagtgaaaagttgaaaggcttaccttttggtatcatgcaacctaaatcagatttggagttaaagccactttggtcaagtagtagtttgaggtcaaagagcggcgaattgaccaaccgtaacttgttggcaatgccggtaggacttaagcaaaaggataatgttgatgctgttgtaaagaagtttcttcctgcgaatttcactgtcattctatttcattatgatggaaacatggatcaatggtgggatctagagtggagctcaaaagccatacacattgttgcacataaccaaacaaaatggtggtttgcgaaacgttttctccatcctgatattgtctccatttacgattatgtttttctttgggatgaagatcttggagtggagaatttcaaccctcaaaagtacctgaggatagttaaaacagcgggactggagatatctcaaccggccttgcacccaaactcaactgaagttcaccatagaattacagtccggtctagaacgaaaatatttcataggcgagtttacgatagtagaggcaatatgaaatgttcaaatgctagtgaagggcccccatgcacaggatttgttgaaggaatggctccagtgttttcgagatctgcatggttttgcacttggaatctaatacaaaatgatctggttcatggttggggaatggatatgaaacttggatactgtgctcagggtgaccgtagcaagaaagtaggcattgtcgacagtgaatatatcttccatcaaggcattcaaacactaggtggaagcggttatcccgataagaagaactcagctcgcagcggagtaaataggagacgcggttctgcgacttttgattcaagaacagagatacggagacaatcaacgtgggagctgcaagcttttaaagaacggtggaaccaagcggttgcagaagacaaatactgggtggagcggtcttcaccgagccggaaccgaataggcaataaccggagattaaaaagaagtagtatgattccaagtttattgcagaggaaagctgaagagactacaacataaacagatacagttttaatcagattaaatatagagaaatgtttttttggttggtctcattgttatatataagttaatagttaatcatttacctctctttgattagtgtagttttcatgatcttctttaatggttcagtctctctccattttg

SEQ ID NO: 49585 - protein, 425 aa, Arabidopsis thaliana
  peptide (1)..(425): Ceres Seq. ID no. 13588672
  misc_feature (67)..(393): Pfam Name: Protein of unknown function (DUF707) Pfam Description: Protein of unknown function (DUF707)
  misc_feature (113)..(391): Homolog of NCBI NO: 34903420 NR Description: hypothetical protein~similar to Oryza sativa
  misc_feature (46)..(376): Homolog of NCBI NO: 22331371 NR Description: expressed protein [Arabidopsis thaliana]
  misc_feature (82)..(391): Homolog of NCBI NO: 19386727 NR Description: P0678F11.16 [Oryza sativa (japonica
  misc_feature (176)..(425): Homolog of NCBI NO: 25402652 NR Description: hypothetical protein [imported] - Arabidopsis
  misc_feature (271)..(405): Homolog of NCBI NO: 34899756 NR Description: OJ1773_H01.1 [Oryza sativa (japonica
  misc_feature (93)..(250): Homolog of NCBI NO: 34899756 NR Description: OJ1773_H01.1 [Oryza sativa (japonica
  misc_feature (35)..(405): Homolog of NCBI NO: 33146749 NR Description: putative lysine ketoglutarate reductase
  misc_feature (1)..(425): Homolog of NCBI NO: 22329488 NR Description: expressed protein [Arabidopsis thaliana]
  misc_feature (68)..(425): Homolog of NCBI NO: 24636978 NR Description: lysine ketoglutarate reductase trans-splicing
  misc_feature (1)..(425): Homolog of NCBI NO: 15219892 NR Description: expressed protein [Arabidopsis thaliana]
MEHGLPSIKSWKSLVKRRNNAQEGGKSSWKMKPVVVLMCTVLLIFWYKTTNIQYEQTEIEETDYPFEMAKESEPVSEKLKGLPFGIMQPKSDLELKPLWSSSSLRSKSGELTNRNLLAMPVGLKQKDNVDAVVKKFLPANFTVILFHYDGNMDQWWDLEWSSKAIHIVAHNQTKWWFAKRFLHPDIVSIYDYVFLWDEDLGVENFNPQKYLRIVKTAGLEISQPALHPNSTEVHHRITVRSRTKIFHRRVYDSRGNMKCSNASEGPPCTGFVEGMAPVFSRSAWFCTWNLIQNDLVHGWGMDMKLGYCAQGDRSKKVGIVDSEYIFHQGIQTLGGSGYPDKKNSARSGVNRRRGSATFDSRTEIRRQSTWELQAFKERWNQAVAEDKYWVERSSPSRNRIGNNRRLKRSSMIPSLLQRKAEETTT

SEQ ID NO: 49586 - protein, 395 aa, Arabidopsis thaliana
  peptide (1)..(395): Ceres Seq. ID no. 13588673
  misc_feature (37)..(363): Pfam Name: Protein of unknown function (DUF707) Pfam Description: Protein of unknown function (DUF707)
  misc_feature (83)..(361): Homolog of NCBI NO: 34903420 NR Description: hypothetical protein~similar to Oryza sativa
  misc_feature (16)..(346): Homolog of NCBI NO: 22331371 NR Description: expressed protein [Arabidopsis thaliana]
  misc_feature (52)..(361): Homolog of NCBI NO: 19386727 NR Description: P0678F11.16 [Oryza sativa (japonica
  misc_feature (146)..(395): Homolog of NCBI NO: 25402652 NR Description: hypothetical protein [imported] - Arabidopsis
  misc_feature (241)..(375): Homolog of NCBI NO: 34899756 NR Description: OJ1773_H01.1 [Oryza sativa (japonica
  misc_feature (63)..(220): Homolog of NCBI NO: 34899756 NR Description: OJ1773_H01.1 [Oryza sativa (japonica
  misc_feature (5)..(375): Homolog of NCBI NO: 33146749 NR Description: putative lysine ketoglutarate reductase
  misc_feature (1)..(395): Homolog of NCBI NO: 22329488 NR Description: expressed protein [Arabidopsis thaliana]
  misc_feature (38)..(395): Homolog of NCBI NO: 24636978 NR Description: lysine ketoglutarate reductase trans-splicing
  misc_feature (1)..(395): Homolog of NCBI NO: 15219892 NR Description: expressed protein [Arabidopsis thaliana]
MKPVVVLMCTVLLIFWYKTTNIQYEQTEIEETDYPFEMAKESEPVSEKLKGLPFGIMQPKSDLELKPLWSSSSLRSKSGELTNRNLLAMPVGLKQKDNVDAVVKKFLPANFTVILFHYDGNMDQWWDLEWSSKAIHIVAHNQTKWWFAKRFLHPDIVSIYDYVFLWDEDLGVENFNPQKYLRIVKTAGLEISQPALHPNSTEVHHRITVRSRTKIFHRRVYDSRGNMKCSNASEGPPCTGFVEGMAPVFSRSAWFCTWNLIQNDLVHGWGMDMKLGYCAQGDRSKKVGIVDSEYIFHQGIQTLGGSGYPDKKNSARSGVNRRRGSATFDSRTEIRRQSTWELQAFKERWNQAVAEDKYWVERSSPSRNRIGNNRRLKRSSMIPSLLQRKAEETTT

SEQ ID NO: 49587 - protein, 388 aa, Arabidopsis thaliana
  peptide (1)..(388): Ceres Seq. ID no. 13588674
  misc_feature (30)..(356): Pfam Name: Protein of unknown function (DUF707) Pfam Description: Protein of unknown function (DUF707)
  misc_feature (76)..(354): Homolog of NCBI NO: 34903420 NR Description: hypothetical protein~similar to Oryza sativa
  misc_feature (9)..(339): Homolog of NCBI NO: 22331371 NR Description: expressed protein [Arabidopsis thaliana]
  misc_feature (45)..(354): Homolog of NCBI NO: 19386727 NR Description: P0678F11.16 [Oryza sativa (japonica
  misc_feature (139)..(388): Homolog of NCBI NO: 25402652 NR Description: hypothetical protein [imported] - Arabidopsis
  misc_feature (234)..(368): Homolog of NCBI NO: 34899756 NR Description: OJ1773_H01.1 [Oryza sativa (japonica
  misc_feature (56)..(213): Homolog of NCBI NO: 34899756 NR Description: OJ1773_H01.1 [Oryza sativa (japonica
  misc_feature (1)..(368): Homolog of NCBI NO: 33146749 NR Description: putative lysine ketoglutarate reductase
  misc_feature (1)..(388): Homolog of NCBI NO: 22329488 NR Description: expressed protein [Arabidopsis thaliana]
  misc_feature (31)..(388): Homolog of NCBI NO: 24636978 NR Description: lysine ketoglutarate reductase trans-splicing
  misc_feature (1)..(388): Homolog of NCBI NO: 15219892 NR Description: expressed protein [Arabidopsis thaliana]
MCTVLLIFWYKTTNIQYEQTEIEETDYPFEMAKESEPVSEKLKGLPFGIMQPKSDLELKPLWSSSSLRSKSGELTNRNLLAMPVGLKQKDNVDAVVKKFLPANFTVILFHYDGNMDQWWDLEWSSKAIHIVAHNQTKWWFAKRFLHPDIVSIYDYVFLWDEDLGVENFNPQKYLRIVKTAGLEISQPALHPNSTEVHHRITVRSRTKIFHRRVYDSRGNMKCSNASEGPPCTGFVEGMAPVFSRSAWFCTWNLIQNDLVHGWGMDMKLGYCAQGDRSKKVGIVDSEYIFHQGIQTLGGSGYPDKKNSARSGVNRRRGSATFDSRTEIRRQSTWELQAFKERWNQAVAEDKYWVERSSPSRNRIGNNRRLKRSSMIPSLLQRKAEETTT

SEQ ID NO: 49588 - DNA, 3561 bp, Arabidopsis thaliana; identical to SEQ ID NO: 44871
  misc_feature (1)..(3561): Ceres Seq. ID no. 12639063
  misc_feature: MA Experiment ID: 20000307 Result: Up-regulated in Transcription
  misc_feature: MA Experiment 20000307 PARAMETER Experiment Name: At_Germinating_Seeds_Sub_P Parameter: Age (hr) Value: 24 vs. 0
  misc_feature: MA Experiment 20000307 PARAMETER Experiment Name: At_Germinating_Seeds_Sub_P Parameter: Organism Value: A. thaliana
  misc_feature: MA Experiment 20000307 PARAMETER Experiment Name: At_Germinating_Seeds_Sub_P Parameter: Plant Line Value: WS
  misc_feature: MA Experiment 20000307 PARAMETER Experiment Name: At_Germinating_Seeds_Sub_P Parameter: Tissue Value: Germinating Seeds
  misc_feature: MA Experiment ID: 20000440 Result: Up-regulated in Transcription
  misc_feature: MA Experiment 20000440 PARAMETER Experiment Name: At_Closed-Flower__Sub_P Parameter: Tissue Value: Closed Flower vs. Whole Plant

SEQ ID NO: 49589 - protein, 1037 aa, Arabidopsis thaliana; identical to SEQ ID NO: 44872
  peptide (1)..(1037): Ceres Seq. ID no. 12639064
  misc_feature (16)..(431): Homolog of NCBI NO: 22329653 NR Description: kinesin heavy chain isolog, putative
  misc_feature (825)..(1036): Homolog of NCBI NO: 34914660 NR Description: putative kinesin [Oryza sativa (japonica
  misc_feature (16)..(427): Homolog of NCBI NO: 34914660 NR Description: putative kinesin [Oryza sativa (japonica
  misc_feature (886)..(1022): Homolog of NCBI NO: 15234898 NR Description: kinesin like protein; protein id: At4g38950.1
  misc_feature (12)..(424): Homolog of NCBI NO: 15234898 NR Description: kinesin like protein; protein id: At4g38950.1
  misc_feature (864)..(1024): Homolog of NCBI NO: 15208467 NR Description: kinesin heavy chain [Zea mays]
  misc_feature (25)..(562): Homolog of NCBI NO: 15208467 NR Description: kinesin heavy chain [Zea mays]
  misc_feature (6)..(673): Homolog of NCBI NO: 30693419 NR Description: expressed protein [Arabidopsis thaliana]
  misc_feature (1)..(425): Homolog of NCBI NO: 13937153 NR Description: AT5g66310/K1L20_9 [Arabidopsis thaliana]
  misc_feature (6)..(673): Homolog of NCBI NO: 11357626 NR Description: hypothetical protein F24M12.190 - Arabidopsis
  misc_feature (16)..(431): Homolog of NCBI NO: 22329653 NR Description: kinesin heavy chain isolog, putative
  misc_feature (825)..(1036): Homolog of NCBI NO: 34914660 NR Description: putative kinesin [Oryza sativa (japonica
  misc_feature (16)..(427): Homolog of NCBI NO: 34914660 NR Description: putative kinesin [Oryza sativa (japonica
  misc_feature (886)..(1022): Homolog of NCBI NO: 15234898 NR Description: kinesin like protein; protein id: At4g38950.1
  misc_feature (12)..(424): Homolog of NCBI NO: 15234898 NR Description: kinesin like protein; protein id: At4g38950.1
  misc_feature (864)..(1024): Homolog of NCBI NO: 15208467 NR Description: kinesin heavy chain [Zea mays]
  misc_feature (25)..(562): Homolog of NCBI NO: 15208467 NR Description: kinesin heavy chain [Zea mays]
  misc_feature (6)..(673): Homolog of NCBI NO: 30693419 NR Description: expressed protein [Arabidopsis thaliana]
  misc_feature (1)..(425): Homolog of NCBI NO: 13937153 NR Description: AT5g66310/K1L20_9 [Arabidopsis thaliana]
  misc_feature (6)..(673): Homolog of NCBI NO: 11357626 NR Description: hypothetical protein F24M12.190 - Arabidopsis

SEQ ID NO: 49590 - protein, 1029 aa, Arabidopsis thaliana; identical to SEQ ID NO: 44873
  peptide (1)..(1029): Ceres Seq. ID no. 12639065
  misc_feature (8)..(423): Homolog of NCBI NO: 22329653 NR Description: kinesin heavy chain isolog, putative
  misc_feature (817)..(1028): Homolog of NCBI NO: 34914660 NR Description: putative kinesin [Oryza sativa (japonica
  misc_feature (8)..(419): Homolog of NCBI NO: 34914660 NR Description: putative kinesin [Oryza sativa (japonica
  misc_feature (878)..(1014): Homolog of NCBI NO: 15234898 NR Description: kinesin like protein; protein id: At4g38950.1
  misc_feature (4)..(416): Homolog of NCBI NO: 15234898 NR Description: kinesin like protein; protein id: At4g38950.1
  misc_feature (856)..(1016): Homolog of NCBI NO: 15208467 NR Description: kinesin heavy chain [Zea mays]
  misc_feature (17)..(554): Homolog of NCBI NO: 15208467 NR Description: kinesin heavy chain [Zea mays]
  misc_feature (1)..(665): Homolog of NCBI NO: 30693419 NR Description: expressed protein [Arabidopsis thaliana]
  misc_feature (1)..(417): Homolog of NCBI NO: 13937153 NR Description: AT5g66310/K1L20_9 [Arabidopsis thaliana]
  misc_feature (1)..(665): Homolog of NCBI NO: 11357626 NR Description: hypothetical protein F24M12.190 - Arabidopsis
  misc_feature (8)..(423): Homolog of NCBI NO: 22329653 NR Description: kinesin heavy chain isolog, putative
  misc_feature (817)..(1028): Homolog of NCBI NO: 34914660 NR Description: putative kinesin [Oryza sativa (japonica
  misc_feature (8)..(419): Homolog of NCBI NO: 34914660 NR Description: putative kinesin [Oryza sativa (japonica
  misc_feature (878)..(1014): Homolog of NCBI NO: 15234898 NR Description: kinesin like protein; protein id: At4g38950.1
  misc_feature (4)..(416): Homolog of NCBI NO: 15234898 NR Description: kinesin like protein; protein id: At4g38950.1
  misc_feature (856)..(1016): Homolog of NCBI NO: 15208467 NR Description: kinesin heavy chain [Zea mays]
  misc_feature (17)..(554): Homolog of NCBI NO: 15208467 NR Description: kinesin heavy chain [Zea mays]
  misc_feature (1)..(665): Homolog of NCBI NO: 30693419 NR Description: expressed protein [Arabidopsis thaliana]
  misc_feature (1)..(417): Homolog of NCBI NO: 13937153 NR Description: AT5g66310/K1L20_9 [Arabidopsis thaliana]
  misc_feature (1)..(665): Homolog of NCBI NO: 11357626 NR Description: hypothetical protein F24M12.190 - Arabidopsis

SEQ ID NO: 49591 - protein, 1013 aa, Arabidopsis thaliana; identical to SEQ ID NO: 44874
  peptide (1)..(1013): Ceres Seq. ID no. 12639066
  misc_feature (1)..(407): Homolog of NCBI NO: 22329653 NR Description: kinesin heavy chain isolog, putative
  misc_feature (801)..(1012): Homolog of NCBI NO: 34914660 NR Description: putative kinesin [Oryza sativa (japonica
  misc_feature (1)..(403): Homolog of NCBI NO: 34914660 NR Description: putative kinesin [Oryza sativa (japonica
  misc_feature (862)..(998): Homolog of NCBI NO: 15234898 NR Description: kinesin like protein; protein id: At4g38950.1
  misc_feature (1)..(400): Homolog of NCBI NO: 15234898 NR Description: kinesin like protein; protein id: At4g38950.1
  misc_feature (840)..(1000): Homolog of NCBI NO: 15208467 NR Description: kinesin heavy chain [Zea mays]
  misc_feature (1)..(538): Homolog of NCBI NO: 15208467 NR Description: kinesin heavy chain [Zea mays]
  misc_feature (1)..(649): Homolog of NCBI NO: 30693419 NR Description: expressed protein [Arabidopsis thaliana]
  misc_feature (1)..(401): Homolog of NCBI NO: 13937153 NR Description: AT5g66310/K1L20_9 [Arabidopsis thaliana]
  misc_feature (1)..(649): Homolog of NCBI NO: 11357626 NR Description: hypothetical protein F24M12.190 - Arabidopsis
  misc_feature (1)..(407): Homolog of NCBI NO: 22329653 NR Description: kinesin heavy chain isolog, putative
  misc_feature (801)..(1012): Homolog of NCBI NO: 34914660 NR Description: putative kinesin [Oryza sativa (japonica
  misc_feature (1)..(403): Homolog of NCBI NO: 34914660 NR Description: putative kinesin [Oryza sativa (japonica
  misc_feature (862)..(998): Homolog of NCBI NO: 15234898 NR Description: kinesin like protein; protein id: At4g38950.1
  misc_feature (1)..(400): Homolog of NCBI NO: 15234898 NR Description: kinesin like protein; protein id: At4g38950.1
  misc_feature (840)..(1000): Homolog of NCBI NO: 15208467 NR Description: kinesin heavy chain [Zea mays]
  misc_feature (1)..(538): Homolog of NCBI NO: 15208467 NR Description: kinesin heavy chain [Zea mays]
  misc_feature (1)..(649): Homolog of NCBI NO: 30693419 NR Description: expressed protein [Arabidopsis thaliana]
  misc_feature (1)..(401): Homolog of NCBI NO: 13937153 NR Description: AT5g66310/K1L20_9 [Arabidopsis thaliana]
  misc_feature (1)..(649): Homolog of NCBI NO: 11357626 NR Description: hypothetical protein F24M12.190 - Arabidopsis

SEQ ID NO: 49592 - DNA, 2113 bp, Arabidopsis thaliana
  misc_feature (1)..(2113): Ceres Seq. ID no. 13588679
  misc_feature: MA Experiment ID: 20000173 Result: Down-regulated in Transcription
  misc_feature: MA Experiment 20000173 PARAMETER Experiment Name: At_42deg_Heat_P Parameter: Age (day) Value: 14
  misc_feature: MA Experiment 20000173 PARAMETER Experiment Name: At_42deg_Heat_P Parameter: Organism Value: A. thaliana
  misc_feature: MA Experiment 20000173 PARAMETER Experiment Name: At_42deg_Heat_P Parameter: Plant Line Value: WS
  misc_feature: MA Experiment 20000173 PARAMETER Experiment Name: At_42deg_Heat_P Parameter: Temperature (deg C) Value: 42 vs. 22
  misc_feature: MA Experiment 20000173 PARAMETER Experiment Name: At_42deg_Heat_P Parameter: Timepoint (hr) Value: 6
  misc_feature: MA Experiment 20000173 PARAMETER Experiment Name: At_42deg_Heat_P Parameter: Tissue Value: Aerial
  misc_feature: MA Experiment ID: 20000180 Result: Down-regulated in Transcription
  misc_feature: MA Experiment 20000180 PARAMETER Experiment Name: At_Germinating_Seeds_P Parameter: Age (hr) Value: 24 vs. 0
  misc_feature: MA Experiment 20000180 PARAMETER Experiment Name: At_Germinating_Seeds_P Parameter: Tissue Value: Germinating Seeds
  misc_feature: MA Experiment ID: 20000184 Result: Down-regulated in Transcription
  misc_feature: MA Experiment 20000184 PARAMETER Experiment Name: At_Shoots__P Parameter: Age (day) Value: 7
  misc_feature: MA Experiment 20000184 PARAMETER Experiment Name: At_Shoots__P Parameter: Tissue Value: Shoots vs. Whole Plant
ttttaagcttctcccgcaaaattcagcaaagctttcggaggaatctcctaacagtcaccaccaccaccaccgtctagggtttcgcgccgggatctaaaaaatcacaatcatgccggtgagtttgactccgaacgcaatcacggcgatacatgacggcgacgtgaatttgaagccgttgttacagattttagaaatcaaaatgataggaagaagtcaagagagaagccaggagaggtatcgtttcctcatttcagatggtgtttctgctcaacatgctatggtcgcggttcagcttaatgatcgagtcaagtcaggacaatttgagaaaggatctatcgttcagctgattgattacatttgtagcgacgttaaaggccgcaagcttattgtggtgctgaacatggagacgatagtacaacagtctgaaaccattgggaacccctacaatatttggagaaacagatacagaagcccagaagacattttcaggtacgggcaatataccgcctccgaacagggttgtttttaatgaaccaatggttcagcattctgttaatagagcacctcccaggggtgtaaacattcaaaatcaagccaacaatactccaagcttcaggccatctgttcaaccttcatatcaaccgcctgcaagttacagaaatcatggacccatcatgaagaacgaggctccagctcgagtcatccctattgctgctctcaatccataccaaggtcgatgggctattaaggctagagtaactgcgaaaggagatatcagacgatataacaatgcaaaaggagatggaaaggttttctcgtttgatctgcttgactatgatggaggggagattcgggttacgtgctttaatgctcttgttgaccgtttctatgatgttactgaggttggtaaggtatatttgatttcaaagggaagtttgaagcctgcacagaaaaatttcaaccacttaaagaatgaatgggaaattttcttggagtcaacatcgactgtggagctttgccctgatgaagatggctccataccaaagcagcaattctccttccgcccaataagtgacattgagaacgctgagaacaataccatactcgatgtcattggtgtggtgacttctgtgaacccctcggtgccaatcttgagaaagaacgggatggaaacccataggaggatcctgaatctaaaggatgaatcaggaaaggctgtagaggtaacactttggggagaattctgtaaccgagatggtcggcaactggaagagatggttgattcagcttttcacccggttttagcaataaaagctggaaaagtaagcgacttcagtgggaaatcagtagggacaatatcttcaacacagctcttcataaatccagatttccctgaagctcataaactacggacctggttcgattacgggggaaaagacactgcttccttctccatctccagggacactatgcctggaggagtttccaggaacgagataaggaaaaatgtttctcagatcaaagaggaaggtcttggaagatcagataagcctgactggatcactgtgaaagcaaccatatcattcatcaaaacagatagcttctgttatacagcttgtcctttgatgatcggggataaacaatgcaacaagaaggttacacggtctggaacaaacaggtggctctgtgaccggtgcaaccaagagtctgatgaatgcgactatagataccttcttcaggtacagattcaagaccacactgggttgacttggataaccgcgtttcaagaaacaggagaagaaataatgggatgtccggctaagaagctttacgcaatgaaatacgaattggagaaggaggaagagttcgcagagattgttagagacagactgtttcatcagtacatgttgaagctgaagatcaaagaggaatcgtatggggatgaacaaagagtgaagatgactgttgtgaaggttgataaggtgaattatacatccgagagtaaatacatgcttgatttgctcgtaaggtaagttcgttctaggtattacagtgaggtatttcaattaactcagaatatgcaagctcgagtttagtacactattatattacg

SEQ ID NO: 49593 - protein, 498 aa, Arabidopsis thaliana
  peptide (1)..(498): Ceres Seq. ID no. 13588680
  misc_feature (68)..(158): Pfam Name: OB-fold nucleic acid binding domain Pfam Description: OB-fold nucleic acid binding domain
  misc_feature (1)..(299): Homolog of NCBI NO: 33086646 NR Description: Cb1-727 [Rattus norvegicus]
  misc_feature (9)..(496): Homolog of NCBI NO: 19111884 NR Description: replication factor-a protein 1
  misc_feature (38)..(496): Homolog of NCBI NO: 40742813 NR Description: hypothetical protein AN7423.2 [Aspergillus
  misc_feature (42)..(493): Homolog of NCBI NO: 15241489 NR Description: replication protein, putative [Arabidopsis
  misc_feature (16)..(498): Homolog of NCBI NO: 7440032 NR Description: probable replication protein A1 - rice
  misc_feature (53)..(493): Homolog of NCBI NO: 18390321 NR Description: replication protein A1
  misc_feature (152)..(498): Homolog of NCBI NO: 18415246 NR Description: replication protein A, putative [Arabidopsis
  misc_feature (51)..(498): Homolog of NCBI NO: 7488291 NR Description: replication protein A1 homolog T18B16.100 -
  misc_feature (1)..(496): Homolog of NCBI NO: 15242405 NR Description: replication protein, putative [Arabidopsis
  misc_feature (1)..(496): Homolog of NCBI NO: 13536993 NR Description: replication protein A 70kDa
MVQHSVNRAPPRGVNIQNQANNTPSFRPSVQPSYQPPASYRNHGPIMKNEAPARVIPIAALNPYQGRWAIKARVTAKGDIRRYNNAKGDGKVFSFDLLDYDGGEIRVTCFNALVDRFYDVTEVGKVYLISKGSLKPAQKNFNHLKNEWEIFLESTSTVELCPDEDGSIPKQQFSFRPISDIENAENNTILDVIGVVTSVNPSVPILRKNGMETHRRILNLKDESGKAVEVTLWGEFCNRDGRQLEEMVDSAFHPVLAIKAGKVSDFSGKSVGTISSTQLFINPDFPEAHKLRTWFDYGGKDTASFSISRDTMPGGVSRNEIRKNVSQIKEEGLGRSDKPDWITVKATISFIKTDSFCYTACPLMIGDKQCNKKVTRSGTNRWLCDRCNQESDECDYRYLLQVQIQDHTGLTWITAFQETGEEIMGCPAKKLYAMKYELEKEEEFAEIVRDRLFHQYMLKLKIKEESYGDEQRVKMTVVKVDKVNYTSESKYMLDLLVR

SEQ ID NO: 49594 - protein, 452 aa, Arabidopsis thaliana
  peptide (1)..(452): Ceres Seq. ID no. 13588681
  misc_feature (22)..(112): Pfam Name: OB-fold nucleic acid binding domain Pfam Description: OB-fold nucleic acid binding domain
  misc_feature (1)..(253): Homolog of NCBI NO: 33086646 NR Description: Cb1-727 [Rattus norvegicus]
  misc_feature (1)..(450): Homolog of NCBI NO: 19111884 NR Description: replication factor-a protein 1
  misc_feature (1)..(450): Homolog of NCBI NO: 40742813 NR Description: hypothetical protein AN7423.2 [Aspergillus
  misc_feature (1)..(447): Homolog of NCBI NO: 15241489 NR Description: replication protein, putative [Arabidopsis
  misc_feature (1)..(452): Homolog of NCBI NO: 7440032 NR Description: probable replication protein A1 - rice
  misc_feature (7)..(447): Homolog of NCBI NO: 18390321 NR Description: replication protein A1
  misc_feature (106)..(452): Homolog of NCBI NO: 18415246 NR Description: replication protein A, putative [Arabidopsis
  misc_feature (5)..(452): Homolog of NCBI NO: 7488291 NR Description: replication protein A1 homolog T18B16.100 -
  misc_feature (1)..(450): Homolog of NCBI NO: 15242405 NR Description: replication protein, putative [Arabidopsis
  misc_feature (1)..(450): Homolog of NCBI NO: 13536993 NR Description: replication protein A 70kDa
MKNEAPARVIPIAALNPYQGRWAIKARVTAKGDIRRYNNAKGDGKVFSFDLLDYDGGEIRVTCFNALVDRFYDVTEVGKVYLISKGSLKPAQKNFNHLKNEWEIFLESTSTVELCPDEDGSIPKQQFSFRPISDIENAENNTILDVIGVVTSVNPSVPILRKNGMETHRRILNLKDESGKAVEVTLWGEFCNRDGRQLEEMVDSAFHPVLAIKAGKVSDFSGKSVGTISSTQLFINPDFPEAHKLRTWFDYGGKDTASFSISRDTMPGGVSRNEIRKNVSQIKEEGLGRSDKPDWITVKATISFIKTDSFCYTACPLMIGDKQCNKKVTRSGTNRWLCDRCNQESDECDYRYLLQVQIQDHTGLTWITAFQETGEEIMGCPAKKLYAMKYELEKEEEFAEIVRDRLFHQYMLKLKIKEESYGDEQRVKMTVVKVDKVNYTSESKYMLDLLVR

SEQ ID NO: 49595 - protein, 288 aa, Arabidopsis thaliana
  peptide (1)..(288): Ceres Seq. ID no. 13588682
  misc_feature (1)..(89): Homolog of NCBI NO: 33086646 NR Description: Cb1-727 [Rattus norvegicus]
  misc_feature (1)..(286): Homolog of NCBI NO: 19111884 NR Description: replication factor-a protein 1
  misc_feature (1)..(286): Homolog of NCBI NO: 40742813 NR Description: hypothetical protein AN7423.2 [Aspergillus
  misc_feature (1)..(283): Homolog of NCBI NO: 15241489 NR Description: replication protein, putative [Arabidopsis
  misc_feature (1)..(288): Homolog of NCBI NO: 7440032 NR Description: probable replication protein A1 - rice
  misc_feature (1)..(283): Homolog of NCBI NO: 18390321 NR Description: replication protein A1
  misc_feature (1)..(288): Homolog of NCBI NO: 18415246 NR Description: replication protein A, putative [Arabidopsis
  misc_feature (1)..(288): Homolog of NCBI NO: 7488291 NR Description: replication protein A1 homolog T18B16.100 -
  misc_feature (1)..(286): Homolog of NCBI NO: 15242405 NR Description: replication protein, putative [Arabidopsis
  misc_feature (1)..(286): Homolog of NCBI NO: 13536993 NR Description: replication protein A 70kDa
METHRRILNLKDESGKAVEVTLWGEFCNRDGRQLEEMVDSAFHPVLAIKAGKVSDFSGKSVGTISSTQLFINPDFPEAHKLRTWFDYGGKDTASFSISRDTMPGGVSRNEIRKNVSQIKEEGLGRSDKPDWITVKATISFIKTDSFCYTACPLMIGDKQCNKKVTRSGTNRWLCDRCNQESDECDYRYLLQVQIQDHTGLTWITAFQETGEEIMGCPAKKLYAMKYELEKEEEFAEIVRDRLFHQYMLKLKIKEESYGDEQRVKMTVVKVDKVNYTSESKYMLDLLVR

SEQ ID NO: 49596 - DNA, 1614 bp, Arabidopsis thaliana; identical to SEQ ID NO: 43163
  misc_feature (1)..(1614): Ceres Seq. ID no. 12602150
  misc_feature: MA Experiment ID: 20001247 Result: Up-regulated in Transcription
  misc_feature: MA Experiment 20001247 PARAMETER Experiment Name: At_Far-red-induction_P Parameter: Age (day) Value: 7
  misc_feature: MA Experiment 20001247 PARAMETER Experiment Name: At_Far-red-induction_P Parameter: Light Value: Far-red vs. White
  misc_feature: MA Experiment 20001247 PARAMETER Experiment Name: At_Far-red-induction_P Parameter: Organism Value: A. thaliana
  misc_feature: MA Experiment 20001247 PARAMETER Experiment Name: At_Far-red-induction_P Parameter: Plant Line Value: Columbia
  misc_feature: MA Experiment 20001247 PARAMETER Experiment Name: At_Far-red-induction_P Parameter: Timepoint (hr) Value: 1
  misc_feature: MA Experiment 20001247 PARAMETER Experiment Name: At_Far-red-induction_P Parameter: Tissue Value: Whole Plant
  misc_feature: MA Experiment ID: 20001248 Result: Up-regulated in Transcription
  misc_feature: MA Experiment 20001248 PARAMETER Experiment Name: At_Far-red-induction_P Parameter: Age (day) Value: 7
  misc_feature: MA Experiment 20001248 PARAMETER Experiment Name: At_Far-red-induction_P Parameter: Light Value: Far-red vs. White
  misc_feature: MA Experiment 20001248 PARAMETER Experiment Name: At_Far-red-induction_P Parameter: Organism Value: A. thaliana
  misc_feature: MA Experiment 20001248 PARAMETER Experiment Name: At_Far-red-induction_P Parameter: Plant Line Value: Columbia
  misc_feature: MA Experiment 20001248 PARAMETER Experiment Name: At_Far-red-induction_P Parameter: Timepoint (hr) Value: 4
  misc_feature: MA Experiment 20001248 PARAMETER Experiment Name: At_Far-red-induction_P Parameter: Tissue Value: Whole Plant
  misc_feature: MA Experiment ID: 20001450 Result: Up-regulated in Transcription
  misc_feature: MA Experiment 20001450 PARAMETER Experiment Name: At_Far-red-induction_P Parameter: Age (day) Value: 7
  misc_feature: MA Experiment 20001450 PARAMETER Experiment Name: At_Far-red-induction_P Parameter: Light Value: Far-red vs. White
  misc_feature: MA Experiment 20001450 PARAMETER Experiment Name: At_Far-red-induction_P Parameter: Organism Value: A. thaliana
  misc_feature: MA Experiment 20001450 PARAMETER Experiment Name: At_Far-red-induction_P Parameter: Plant Line Value: Columbia
  misc_feature: MA Experiment 20001450 PARAMETER Experiment Name: At_Far-red-induction_P Parameter: Timepoint (hr) Value: 8
  misc_feature: MA Experiment 20001450 PARAMETER Experiment Name: At_Far-red-induction_P Parameter: Tissue Value: Whole Plant

SEQ ID NO: 49597 - protein, 325 aa, Arabidopsis thaliana; identical to SEQ ID NO: 43164
  peptide (1)..(325): Ceres Seq. ID no. 12602151
  misc_feature (2)..(147): Pfam Name: Plant protein of unknown function (DUF822) Pfam Description: Plant protein of unknown function (DUF822)
  misc_feature (2)..(147): Pfam Name: Plant protein of unknown function (DUF822) Pfam Description: Plant protein of unknown function (DUF822)
  misc_feature (6)..(321): Homolog of NCBI NO: 21592457 NR Description: unknown [Arabidopsis thaliana]
  misc_feature (6)..(321): Homolog of NCBI NO: 6651069 NR Description: 107 protein [Arabidopsis thaliana]
  misc_feature (6)..(321): Homolog of NCBI NO: 18394728 NR Description: expressed protein
  misc_feature (6)..(325): Homolog of NCBI NO: 18410764 NR Description: expressed protein
  misc_feature (6)..(325): Homolog of NCBI NO: 18086461 NR Description: At1g75080/F9E10_7 [Arabidopsis thaliana]
  misc_feature (6)..(321): Homolog of NCBI NO: 21592457 NR Description: unknown [Arabidopsis thaliana]
  misc_feature (6)..(321): Homolog of NCBI NO: 18394728 NR Description: expressed protein
  misc_feature (6)..(325): Homolog of NCBI NO: 18086461 NR Description: At1g75080/F9E10_7 [Arabidopsis thaliana]
  misc_feature (1)..(325): Homolog of NCBI NO: 18412073 NR Description: expressed protein
  misc_feature (4)..(325): Homolog of NCBI NO: 34903720 NR Description: P0489A05.26 [Oryza sativa (japonica
  misc_feature (1)..(213): Homolog of NCBI NO: 15234055 NR Description: putative protein
  misc_feature (1)..(259): Homolog of NCBI NO: 33146833 NR Description: putative mature anther-specific protein LAT61
  misc_feature (4)..(235): Homolog of NCBI NO: 14626761 NR Description: mature anther-specific protein LAT61
  misc_feature (6)..(325): Homolog of NCBI NO: 18410764 NR Description: expressed protein
  misc_feature (6)..(321): Homolog of NCBI NO: 6651069 NR Description: 107 protein [Arabidopsis thaliana]
  misc_feature (4)..(235): Homolog of NCBI NO: 14626761 NR Description: mature anther-specific protein LAT61
  misc_feature (1)..(259): Homolog of NCBI NO: 33146833 NR Description: putative mature anther-specific protein LAT61
  misc_feature (1)..(213): Homolog of NCBI NO: 15234055 NR Description: putative protein
  misc_feature (4)..(325): Homolog of NCBI NO: 34903720 NR Description: P0489A05.26 [Oryza sativa (japonica
  misc_feature (1)..(325): Homolog of NCBI NO: 18412073 NR Description: expressed protein

SEQ ID NO: 49598 - protein, 319 aa, Arabidopsis thaliana; identical to SEQ ID NO: 43165
  peptide (1)..(319): Ceres Seq. ID no. 12602152
  misc_feature (1)..(141): Pfam Name: Plant protein of unknown function (DUF822) Pfam Description: Plant protein of unknown function (DUF822)
  misc_feature (1)..(141): Pfam Name: Plant protein of unknown function (DUF822) Pfam Description: Plant protein of unknown function (DUF822)
  misc_feature (1)..(315): Homolog of NCBI NO: 21592457 NR Description: unknown [Arabidopsis thaliana]
  misc_feature (1)..(315): Homolog of NCBI NO: 6651069 NR Description: 107 protein [Arabidopsis thaliana]
  misc_feature (1)..(315): Homolog of NCBI NO: 18394728 NR Description: expressed protein
  misc_feature (1)..(319): Homolog of NCBI NO: 18410764 NR Description: expressed protein
  misc_feature (1)..(319): Homolog of NCBI NO: 18086461 NR Description: At1g75080/F9E10_7 [Arabidopsis thaliana]
  misc_feature (1)..(315): Homolog of NCBI NO: 21592457 NR Description: unknown [Arabidopsis thaliana]
  misc_feature (1)..(315): Homolog of NCBI NO: 18394728 NR Description: expressed protein
  misc_feature (1)..(319): Homolog of NCBI NO: 18086461 NR Description: At1g75080/F9E10_7 [Arabidopsis thaliana]
  misc_feature (1)..(319): Homolog of NCBI NO: 18412073 NR Description: expressed protein
  misc_feature (1)..(319): Homolog of NCBI NO: 34903720 NR Description: P0489A05.26 [Oryza sativa (japonica
  misc_feature (1)..(207): Homolog of NCBI NO: 15234055 NR Description: putative protein
  misc_feature (1)..(253): Homolog of NCBI NO: 33146833 NR Description: putative mature anther-specific protein LAT61
  misc_feature (1)..(229): Homolog of NCBI NO: 14626761 NR Description: mature anther-specific protein LAT61
  misc_feature (1)..(319): Homolog of NCBI NO: 18410764 NR Description: expressed protein
  misc_feature (1)..(315): Homolog of NCBI NO: 6651069 NR Description: 107 protein [Arabidopsis thaliana]
  misc_feature (1)..(229): Homolog of NCBI NO: 14626761 NR Description: mature anther-specific protein LAT61
  misc_feature (1)..(253): Homolog of NCBI NO: 33146833 NR Description: putative mature anther-specific protein LAT61
  misc_feature (1)..(207): Homolog of NCBI NO: 15234055 NR Description: putative protein
  misc_feature (1)..(319): Homolog of NCBI NO: 34903720 NR Description: P0489A05.26 [Oryza sativa (japonica
  misc_feature (1)..(319): Homolog of NCBI NO: 18412073 NR Description: expressed protein

SEQ ID NO: 49599 - protein, 290 aa, Arabidopsis thaliana; identical to SEQ ID NO: 43166
  peptide (1)..(290): Ceres Seq. ID no. 12602153
  misc_feature (1)..(112): Pfam Name: Plant protein of unknown function (DUF822) Pfam Description: Plant protein of unknown function (DUF822)
  misc_feature (1)..(112): Pfam Name: Plant protein of unknown function (DUF822) Pfam Description: Plant protein of unknown function (DUF822)
  misc_feature (1)..(286): Homolog of NCBI NO: 21592457 NR Description: unknown [Arabidopsis thaliana]
  misc_feature (1)..(286): Homolog of NCBI NO: 6651069 NR Description: 107 protein [Arabidopsis thaliana]
  misc_feature (1)..(286): Homolog of NCBI NO: 18394728 NR Description: expressed protein
  misc_feature (1)..(290): Homolog of NCBI NO: 18410764 NR Description: expressed protein
  misc_feature (1)..(290): Homolog of NCBI NO: 18086461 NR Description: At1g75080/F9E10_7 [Arabidopsis thaliana]
  misc_feature (1)..(286): Homolog of NCBI NO: 21592457 NR Description: unknown [Arabidopsis thaliana]
  misc_feature (1)..(286): Homolog of NCBI NO: 18394728 NR Description: expressed protein
  misc_feature (1)..(290): Homolog of NCBI NO: 18086461 NR Description: At1g75080/F9E10_7 [Arabidopsis thaliana]
  misc_feature (1)..(290): Homolog of NCBI NO: 18412073 NR Description: expressed protein
  misc_feature (1)..(290): Homolog of NCBI NO: 34903720 NR Description: P0489A05.26 [Oryza sativa (japonica
  misc_feature (1)..(178): Homolog of NCBI NO: 15234055 NR Description: putative protein
  misc_feature (1)..(224): Homolog of NCBI NO: 33146833 NR Description: putative mature anther-specific protein LAT61
  misc_feature (1)..(200): Homolog of NCBI NO: 14626761 NR Description: mature anther-specific protein LAT61
  misc_feature (1)..(290): Homolog of NCBI NO: 18410764 NR Description: expressed protein
  misc_feature (1)..(286): Homolog of NCBI NO: 6651069 NR Description: 107 protein [Arabidopsis thaliana]
  misc_feature (1)..(200): Homolog of NCBI NO: 14626761 NR Description: mature anther-specific protein LAT61
  misc_feature (1)..(224): Homolog of NCBI NO: 33146833 NR Description: putative mature anther-specific protein LAT61
  misc_feature (1)..(178): Homolog of NCBI NO: 15234055 NR Description: putative protein
  misc_feature (1)..(290): Homolog of NCBI NO: 34903720 NR Description: P0489A05.26 [Oryza sativa (japonica
  misc_feature (1)..(290): Homolog of NCBI NO: 18412073 NR Description: expressed protein

SEQ ID NO: 49600 - DNA, 1538 bp, Arabidopsis thaliana
  misc_feature (1)..(1538): Ceres Seq. ID no. 13648394
  misc_feature: MA Experiment ID: 20000173 Result: Down-regulated in Transcription
  misc_feature: MA Experiment 20000173 PARAMETER Experiment Name: At_42deg_Heat_P Parameter: Age (day) Value: 14
  misc_feature: MA Experiment 20000173 PARAMETER Experiment Name: At_42deg_Heat_P Parameter: Organism Value: A. thaliana
  misc_feature: MA Experiment 20000173 PARAMETER Experiment Name: At_42deg_Heat_P Parameter: Plant Line Value: WS
  misc_feature: MA Experiment 20000173 PARAMETER Experiment Name: At_42deg_Heat_P Parameter: Temperature (deg C) Value: 42 vs. 22
  misc_feature: MA Experiment 20000173 PARAMETER Experiment Name: At_42deg_Heat_P Parameter: Timepoint (hr) Value: 6
  misc_feature: MA Experiment 20000173 PARAMETER Experiment Name: At_42deg_Heat_P Parameter: Tissue Value: Aerial
  misc_feature: MA Experiment ID: 20000180 Result: Up-regulated in Transcription
  misc_feature: MA Experiment 20000180 PARAMETER Experiment Name: At_Germinating_Seeds_P Parameter: Age (hr) Value: 24 vs. 0
  misc_feature: MA Experiment 20000180 PARAMETER Experiment Name: At_Germinating_Seeds_P Parameter: Tissue Value: Germinating Seeds
  misc_feature: MA Experiment ID: 20000182 Result: Up-regulated in Transcription
  misc_feature: MA Experiment 20000182 PARAMETER Experiment Name: At_2mM_SA_P Parameter: Age (day) Value: 14
  misc_feature: MA Experiment 20000182 PARAMETER Experiment Name: At_2mM_SA_P Parameter: Organism Value: A. thaliana
  misc_feature: MA Experiment 20000182 PARAMETER Experiment Name: At_2mM_SA_P Parameter: Plant Line Value: WS
  misc_feature: MA Experiment 20000182 PARAMETER Experiment Name: At_2mM_SA_P Parameter: Timepoint (hr) Value: 6
  misc_feature: MA Experiment 20000182 PARAMETER Experiment Name: At_2mM_SA_P Parameter: Tissue Value: Aerial
  misc_feature: MA Experiment 20000182 PARAMETER Experiment Name: At_2mM_SA_P Parameter: Treatment Value: 2mM SA vs. No Treatment
  misc_feature: MA Experiment ID: 20000184 Result: Down-regulated in Transcription
  misc_feature: MA Experiment 20000184 PARAMETER Experiment Name: At_Shoots__P Parameter: Age (day) Value: 7
  misc_feature: MA Experiment 20000184 PARAMETER Experiment Name: At_Shoots__P Parameter: Tissue Value: Shoots vs. Whole Plant
  misc_feature: MA Experiment ID: 20000437 Result: Up-regulated in Transcription
  misc_feature: MA Experiment 20000437 PARAMETER Experiment Name: At_Drought_P Parameter: Age (day) Value: 8
  misc_feature: MA Experiment 20000437 PARAMETER Experiment Name: At_Drought_P Parameter: Organism Value: A. thaliana
  misc_feature: MA Experiment 20000437 PARAMETER Experiment Name: At_Drought_P Parameter: Plant Line Value: WS
  misc_feature: MA Experiment 20000437 PARAMETER Experiment Name: At_Drought_P Parameter: Timepoint (hr) Value: 24
  misc_feature: MA Experiment 20000437 PARAMETER Experiment Name: At_Drought_P Parameter: Tissue Value: Whole Plant
  misc_feature: MA Experiment 20000437 PARAMETER Experiment Name: At_Drought_P Parameter: Treatment Value: Drought vs. No Drought
  misc_feature: MA Experiment ID: 20000495 Result: Down-regulated in Transcription
  misc_feature: MA Experiment 20000495 PARAMETER Experiment Name: At_Guard_Cells_P Parameter: Harvest Date Value: 8/2/2002
  misc_feature: MA Experiment 20000495 PARAMETER Experiment Name: At_Guard_Cells_P Parameter: Organism Value: A. thaliana
  misc_feature: MA Experiment 20000495 PARAMETER Experiment Name: At_Guard_Cells_P Parameter: Tissue Value: Guard Cells vs. Leaves
  misc_feature: MA Experiment ID: 20000496 Result: Down-regulated in Transcription
  misc_feature: MA Experiment 20000496 PARAMETER Experiment Name: At_Guard_Cells_P Parameter: Harvest Date Value: 7/19/2002
  misc_feature: MA Experiment 20000496 PARAMETER Experiment Name: At_Guard_Cells_P Parameter: Organism Value: Canola
  misc_feature: MA Experiment 20000496 PARAMETER Experiment Name: At_Guard_Cells_P Parameter: Tissue Value: Guard Cells vs. Leaves
  misc_feature: MA Experiment ID: 20001451 Result: Down-regulated in Transcription
  misc_feature: MA Experiment 20001451 PARAMETER Experiment Name: At_Far-red-induction_P Parameter: Age (day) Value: 7
  misc_feature: MA Experiment 20001451 PARAMETER Experiment Name: At_Far-red-induction_P Parameter: Light Value: Far-red vs. White
  misc_feature: MA Experiment 20001451 PARAMETER Experiment Name: At_Far-red-induction_P Parameter: Organism Value: A. thaliana
  misc_feature: MA Experiment 20001451 PARAMETER Experiment Name: At_Far-red-induction_P Parameter: Plant Line Value: Columbia
  misc_feature: MA Experiment 20001451 PARAMETER Experiment Name: At_Far-red-induction_P Parameter: Timepoint (hr) Value: 24
  misc_feature: MA Experiment 20001451 PARAMETER Experiment Name: At_Far-red-induction_P Parameter: Tissue Value: Whole Plant
ctagtcccccccccccccgaagactcatatagtaaaaatgttttgacaatcaaaaaccaaataagcaaagagatctctgactctctatctgaaatctcaaaacggagaacgcgagggaacaagagattaaagcatagtgagaccctaagagagagagctttaggtctagaggggatcttcacaattcacacaacaactacgagataggatcgtgcgcgtcaaaagaagctggtactgctgattccagccgaagattagtctccgcttctggttgttccggtggagactcgtcggaaatgagaggtcttttcaaatccaaaccgcggactcccgctgatattgttcgtcagactcgcgatctcctcctctacgccgatcgatccaactccttccctgaccttcgagagtccaaacgcgaggaaaagatggtggaactaagtaagagcatacgagatttgaagttgattctatatggaaacagtgaggctgagcctgttgctgaagcttgtgctcagttgactcaggagttctttaaggctgatactcttcgccgtttgctcacttctcttcctaatttgaacttggaggcgaggaaagatgctacacaagttgttgcaaatcttcagaggcaacaagtcaattcacgtcttattgctgctgattatcttgaatccaacattgatcttatggattttctagttgatgggtttgaaaacaccgatatggcgttacactatggtactatgtttagagagtgcatccgtcatcagattgttgcaaaatatgttttggactcggagcacgtgaagaagtttttttactacatacagcttcccaatttcgacattgctgctgatgctgctgcaacttttaaggaacttctgacaaggcacaagtctacagttgctgagtttctcattaagaatgaagactggttttttgcagactacaactcaaagcttcttgaatcaactaattatattacccgacggcaagctattaagttgttgggcgatatattattggataggtcaaattcggctgtgatgacgaagtatgtgagctcgatggataacttgaggattctgatgaatcttctcagagaatcaagcaagactattcagatagaagctttccatgttttcaagctgtttgtagcgaaccaaaacaagccttcagacatcgccaacattctggtggcaaacagaaacaagcttctgagattgttggctgatatcaagccggacaaagaggacgagaggtttgacgcagacaaagctcaggttgtgagagagattgcaaaccttaagctgcgagagcttgcttgagcatgcacatatacacagaagctcatgatttctgttaatctttgaaagacatttttggaccatcaaagattgttgttatttattaggtactgtttctttttctctctctcagcatctacgctgttgactactctggatttttttagatcatatgaattcacatgtacactcctttagtgttgatcaaataaaaatggcattataaatccc

SEQ ID NO: 49601 - protein, 343 aa, Arabidopsis thaliana
  peptide (1)..(343): Ceres Seq. ID no. 13648395
  misc_feature (39)..(339): Pfam Name: Mo25 protein family Pfam Description: Mo25 protein family
  misc_feature (5)..(338): Homolog of NCBI NO: 7706481 NR Description: MO25 protein [Homo sapiens]
  misc_feature (5)..(338): Homolog of NCBI NO: 18044843 NR Description: MO25 protein [Mus musculus]
  misc_feature (5)..(338): Homolog of NCBI NO: 34877516 NR Description: similar to MO25 protein [Rattus norvegicus]
  misc_feature (5)..(338): Homolog of NCBI NO: 31982582 NR Description: MO25 protein; calcium binding protein, 39 kDa
  misc_feature (1)..(342): Homolog of NCBI NO: 15227629 NR Description: MO25 protein family [Arabidopsis thaliana]
  misc_feature (1)..(337): Homolog of NCBI NO: 34901086 NR Description: putative MO25 protein (CGI-66)
  misc_feature (44)..(343): Homolog of NCBI NO: 7485184 NR Description: hypothetical protein - Arabidopsis thaliana
  misc_feature (1)..(343): Homolog of NCBI NO: 15238126 NR Description: MO25 protein family [Arabidopsis thaliana]
  misc_feature (1)..(343): Homolog of NCBI NO: 15214076 NR Description: Hypothetical MO25-like protein At5g47540
  misc_feature (1)..(343): Homolog of NCBI NO: 15236013 NR Description: MO25 protein family [Arabidopsis thaliana]
MRGLFKSKPRTPADIVRQTRDLLLYADRSNSFPDLRESKREEKMVELSKSIRDLKLILYGNSEAEPVAEACAQLTQEFFKADTLRRLLTSLPNLNLEARKDATQVVANLQRQQVNSRLIAADYLESNIDLMDFLVDGFENTDMALHYGTMFRECIRHQIVAKYVLDSEHVKKFFYYIQLPNFDIAADAAATFKELLTRHKSTVAEFLIKNEDWFFADYNSKLLESTNYITRRQAIKLLGDILLDRSNSAVMTKYVSSMDNLRILMNLLRESSKTIQIEAFHVFKLFVANQNKPSDIANILVANRNKLLRLLADIKPDKEDERFDADKAQVVREIANLKLRELA

SEQ ID NO: 49602 - protein, 300 aa, Arabidopsis thaliana
  peptide (1)..(300): Ceres Seq. ID no. 13648396
  misc_feature (1)..(296): Pfam Name: Mo25 protein family Pfam Description: Mo25 protein family
  misc_feature (1)..(295): Homolog of NCBI NO: 7706481 NR Description: MO25 protein [Homo sapiens]
  misc_feature (1)..(295): Homolog of NCBI NO: 18044843 NR Description: MO25 protein [Mus musculus]
  misc_feature (1)..(295): Homolog of NCBI NO: 34877516 NR Description: similar to MO25 protein [Rattus norvegicus]
  misc_feature (1)..(295): Homolog of NCBI NO: 31982582 NR Description: MO25 protein; calcium binding protein, 39 kDa
  misc_feature (1)..(299): Homolog of NCBI NO: 15227629 NR Description: MO25 protein family [Arabidopsis thaliana]
  misc_feature (1)..(294): Homolog of NCBI NO: 34901086 NR Description: putative MO25 protein (CGI-66)
  misc_feature (1)..(300): Homolog of NCBI NO: 7485184 NR Description: hypothetical protein - Arabidopsis thaliana
  misc_feature (1)..(300): Homolog of NCBI NO: 15238126 NR Description: MO25 protein family [Arabidopsis thaliana]
  misc_feature (1)..(300): Homolog of NCBI NO: 15214076 NR Description: Hypothetical MO25-like protein At5g47540
  misc_feature (1)..(300): Homolog of NCBI NO: 15236013 NR Description: MO25 protein family [Arabidopsis thaliana]
MVELSKSIRDLKLILYGNSEAEPVAEACAQLTQEFFKADTLRRLLTSLPNLNLEARKDATQVVANLQRQQVNSRLIAADYLESNIDLMDFLVDGFENTDMALHYGTMFRECIRHQIVAKYVLDSEHVKKFFYYIQLPNFDIAADAAATFKELLTRHKSTVAEFLIKNEDWFFADYNSKLLESTNYITRRQAIKLLGDILLDRSNSAVMTKYVSSMDNLRILMNLLRESSKTIQIEAFHVFKLFVANQNKPSDIANILVANRNKLLRLLADIKPDKEDERFDADKAQVVREIANLKLRELA

SEQ ID NO: 49603 - protein, 213 aa, Arabidopsis thaliana
  peptide (1)..(213): Ceres Seq. ID no. 13648397
  misc_feature (1)..(209): Pfam Name: Mo25 protein family Pfam Description: Mo25 protein family
  misc_feature (1)..(208): Homolog of NCBI NO: 7706481 NR Description: MO25 protein [Homo sapiens]
  misc_feature (1)..(208): Homolog of NCBI NO: 18044843 NR Description: MO25 protein [Mus musculus]
  misc_feature (1)..(208): Homolog of NCBI NO: 34877516 NR Description: similar to MO25 protein [Rattus norvegicus]
  misc_feature (1)..(208): Homolog of NCBI NO: 31982582 NR Description: MO25 protein; calcium binding protein, 39 kDa
  misc_feature (1)..(212): Homolog of NCBI NO: 15227629 NR Description: MO25 protein family [Arabidopsis thaliana]
  misc_feature (1)..(207): Homolog of NCBI NO: 34901086 NR Description: putative MO25 protein (CGI-66)
  misc_feature (1)..(213): Homolog of NCBI NO: 7485184 NR Description: hypothetical protein - Arabidopsis thaliana
  misc_feature (1)..(213): Homolog of NCBI NO: 15238126 NR Description: MO25 protein family [Arabidopsis thaliana]
  misc_feature (1)..(213): Homolog of NCBI NO: 15214076 NR Description: Hypothetical MO25-like protein At5g47540
  misc_feature (1)..(213): Homolog of NCBI NO: 15236013 NR Description: MO25 protein family [Arabidopsis thaliana]
MDFLVDGFENTDMALHYGTMFRECIRHQIVAKYVLDSEHVKKFFYYIQLPNFDIAADAAATFKELLTRHKSTVAEFLIKNEDWFFADYNSKLLESTNYITRRQAIKLLGDILLDRSNSAVMTKYVSSMDNLRILMNLLRESSKTIQIEAFHVFKLFVANQNKPSDIANILVANRNKLLRLLADIKPDKEDERFDADKAQVVREIANLKLRELA

SEQ ID NO: 49604 - DNA, 944 bp, Arabidopsis thaliana
  misc_feature (1)..(944): Ceres Seq. ID no. 14304292
  misc_feature: MA Experiment ID: 20001451 Result: Down-regulated in Transcription
  misc_feature: MA Experiment 20001451 PARAMETER Experiment Name: At_Far-red-induction_P Parameter: Age (day) Value: 7
  misc_feature: MA Experiment 20001451 PARAMETER Experiment Name: At_Far-red-induction_P Parameter: Light Value: Far-red vs. White
  misc_feature: MA Experiment 20001451 PARAMETER Experiment Name: At_Far-red-induction_P Parameter: Organism Value: A. thaliana
  misc_feature: MA Experiment 20001451 PARAMETER Experiment Name: At_Far-red-induction_P Parameter: Plant Line Value: Columbia
  misc_feature: MA Experiment 20001451 PARAMETER Experiment Name: At_Far-red-induction_P Parameter: Timepoint (hr) Value: 24
  misc_feature: MA Experiment 20001451 PARAMETER Experiment Name: At_Far-red-induction_P Parameter: Tissue Value: Whole Plant
aaaaaaaacgaaaaggattattccgccgtagaatccatattctctccctcatcactttgataaacaagagtctcatttttcgcttttccaaagggaacaacttcttcggattattatctatggcagagaagcttgagccggtgaaggttttgtactgcggagtttgctctcttccagcggaatactgcgaattcggtcccgatttcgctagatgtaagccctggctcgtcgaaaacgccccagatctctatcctgatctcctcaaagaagcaaatgagaaggcagcagataatgtttctgacaaactccagtcggtgggaatctcttcaggtggtgctgatggggcaccatcttcagctcagactggagggacatccaagaaggaggaagtgaagcgcctacctggggggaaagttaaaaagaaagatcgacaggaagttatcattgaaaaggttgtacgcaacaaacgcaagtgtatcaccattgtgaaaggactagaactgtttgggataaaactcagtgatgcctctaaaaagcttggtaagaagtttgccactggagcatcagttgtcaagggaccaactgaaaaggagcaaattgatgttcaaggggatataatctatgatatcgttgaattcattacagacacttggcccgacgtacctgaaagatccattttcttcatcgaagatgggaagaaggttcaggctggttgatgatcacctttgtcctcgttttttggcatggcgggttcatgtagacgagctagttcctgagttttcctatgtgtttggaggaaatcgcatcatgattataactttcaacgtaacgtatagttggatttatcatactattttcttattcgggttgcgatagttccagacatgtttctccaaacatttctctttttgggggtcttaatatttaaaatgtgtcttgaaatg

SEQ ID NO: 49605 - protein, 237 aa, Arabidopsis thaliana
  peptide (1)..(237): Ceres Seq. ID no. 14304293
  misc_feature (48)..(213): Homolog of NCBI NO: 6322474 NR Description: Hypothetical ORF; Yjr014wp [Saccharomyces
  misc_feature (46)..(233): Homolog of NCBI NO: 31216194 NR Description: ENSANGP00000017070 [Anopheles gambiae]
  misc_feature (29)..(233): Homolog of NCBI NO: 13386092 NR Description: density-regulated protein [Mus musculus]
  misc_feature (46)..(233): Homolog of NCBI NO: 4755083 NR Description: density regulated protein drp1 [Homo sapiens]
  misc_feature (49)..(233): Homolog of NCBI NO: 32419455 NR Description: hypothetical protein ( hypothetical protein
  misc_feature (40)..(232): Homolog of NCBI NO: 19113595 NR Description: hypothetical protein [Schizosaccharomyces pombe]
  misc_feature (41)..(220): Homolog of NCBI NO: 34903554 NR Description: P0001B06.29 [Oryza sativa (japonica
  misc_feature (40)..(121): Homolog of NCBI NO: 11357422 NR Description: hypothetical protein F14F18.70 - Arabidopsis
  misc_feature (122)..(237): Homolog of NCBI NO: 11357422 NR Description: hypothetical protein F14F18.70 - Arabidopsis
  misc_feature (40)..(237): Homolog of NCBI NO: 22326739 NR Description: expressed protein [Arabidopsis thaliana]
KKRKGLFRRRIHILSLITLINKSLIFRFSKGNNFFGLLSMAEKLEPVKVLYCGVCSLPAEYCEFGPDFARCKPWLVENAPDLYPDLLKEANEKAADNVSDKLQSVGISSGGADGAPSSAQTGGTSKKEEVKRLPGGKVKKKDRQEVIIEKVVRNKRKCITIVKGLELFGIKLSDASKKLGKKFATGASVVKGPTEKEQIDVQGDIIYDIVEFITDTWPDVPERSIFFIEDGKKVQAG

SEQ ID NO: 49606 - protein, 198 aa, Arabidopsis thaliana
  peptide (1)..(198): Ceres Seq. ID no. 14304294
  misc_feature (9)..(174): Homolog of NCBI NO: 6322474 NR Description: Hypothetical ORF; Yjr014wp [Saccharomyces
  misc_feature (7)..(194): Homolog of NCBI NO: 31216194 NR Description: ENSANGP00000017070 [Anopheles gambiae]
  misc_feature (1)..(194): Homolog of NCBI NO: 13386092 NR Description: density-regulated protein [Mus musculus]
  misc_feature (7)..(194): Homolog of NCBI NO: 4755083 NR Description: density regulated protein drp1 [Homo sapiens]
  misc_feature (10)..(194): Homolog of NCBI NO: 32419455 NR Description: hypothetical protein ( hypothetical protein
  misc_feature (1)..(193): Homolog of NCBI NO: 19113595 NR Description: hypothetical protein [Schizosaccharomyces pombe]
  misc_feature (2)..(181): Homolog of NCBI NO: 34903554 NR Description: P0001B06.29 [Oryza sativa (japonica
  misc_feature (1)..(82): Homolog of NCBI NO: 11357422 NR Description: hypothetical protein F14F18.70 - Arabidopsis
  misc_feature (83)..(198): Homolog of NCBI NO: 11357422 NR Description: hypothetical protein F14F18.70 - Arabidopsis
  misc_feature (1)..(198): Homolog of NCBI NO: 22326739 NR Description: expressed protein [Arabidopsis thaliana]
MAEKLEPVKVLYCGVCSLPAEYCEFGPDFARCKPWLVENAPDLYPDLLKEANEKAADNVSDKLQSVGISSGGADGAPSSAQTGGTSKKEEVKRLPGGKVKKKDRQEVIIEKVVRNKRKCITIVKGLELFGIKLSDASKKLGKKFATGASVVKGPTEKEQIDVQGDIIYDIVEFITDTWPDVPERSIFFIEDGKKVQAG

SEQ ID NO: 49607 - DNA, 1220 bp, Arabidopsis thaliana
  misc_feature (1)..(1220): Ceres Seq. ID no. 13647668
  misc_feature: MA Experiment ID: 20000182 Result: Up-regulated in Transcription
  misc_feature: MA Experiment 20000182 PARAMETER Experiment Name: At_2mM_SA_P Parameter: Age (day) Value: 14
  misc_feature: MA Experiment 20000182 PARAMETER Experiment Name: At_2mM_SA_P Parameter: Organism Value: A. thaliana
  misc_feature: MA Experiment 20000182 PARAMETER Experiment Name: At_2mM_SA_P Parameter: Plant Line Value: WS
  misc_feature: MA Experiment 20000182 PARAMETER Experiment Name: At_2mM_SA_P Parameter: Timepoint (hr) Value: 6
  misc_feature: MA Experiment 20000182 PARAMETER Experiment Name: At_2mM_SA_P Parameter: Tissue Value: Aerial
  misc_feature: MA Experiment 20000182 PARAMETER Experiment Name: At_2mM_SA_P Parameter: Treatment Value: 2mM SA vs. No Treatment
  misc_feature: MA Experiment ID: 20000184 Result: Down-regulated in Transcription
  misc_feature: MA Experiment 20000184 PARAMETER Experiment Name: At_Shoots__P Parameter: Age (day) Value: 7
  misc_feature: MA Experiment 20000184 PARAMETER Experiment Name: At_Shoots__P Parameter: Tissue Value: Shoots vs. Whole Plant
  misc_feature: MA Experiment ID: 20000214 Result: Down-regulated in Transcription
  misc_feature: MA Experiment 20000214 PARAMETER Experiment Name: At_4deg_Cold_P Parameter: Timepoint (hr) Value: 6
  misc_feature: MA Experiment ID: 20000264 Result: Down-regulated in Transcription
  misc_feature: MA Experiment 20000264 PARAMETER Experiment Name: At_Open_Flower_P Parameter: Age (day) Value: 21
  misc_feature: MA Experiment 20000264 PARAMETER Experiment Name: At_Open_Flower_P Parameter: Plant Line Value: WS
  misc_feature: MA Experiment 20000264 PARAMETER Experiment Name: At_Open_Flower_P Parameter: Tissue Value: Open Flower vs. Whole Plant
  misc_feature: MA Experiment ID: 20000286 Result: Down-regulated in Transcription
  misc_feature: MA Experiment 20000286 PARAMETER Experiment Name: At_Open_Flower_P Parameter: Age (day) Value: 21
  misc_feature: MA Experiment 20000286 PARAMETER Experiment Name: At_Open_Flower_P Parameter: Plant Line Value: WS
  misc_feature: MA Experiment 20000286 PARAMETER Experiment Name: At_Open_Flower_P Parameter: Tissue Value: Half Open vs. Whole Plant
  misc_feature: MA Experiment ID: 20000438 Result: Down-regulated in Transcription
  misc_feature: MA Experiment 20000438 PARAMETER Experiment Name: At_Shoots__P Parameter: Age (day) Value: 14
  misc_feature: MA Experiment 20000438 PARAMETER Experiment Name: At_Shoots__P Parameter: Tissue Value: Shoots vs. Whole Plant
aatcacagttcgggaaagacttaacatttaagatttacgggtttgtttgatcgattagtctcatctgggtttttctccaagttaaattctttgtttctgagatggatcaagcttcgtcttcttcgactatggaggaagacaagaagtcttccactgatcctgtgaatgtcgatgataacgaggagagagaagctatagagattgctctgttccaagtgcctgaatgctatgtttatttgatacctccaaggaaaaccgcagcttcgtacagagcagatgagtgggacgtgaacaaatgggcatgggaaggagctttgaaagtggtgagcaaaggagaagaatgcattataaaactagtagataaaaccacaggggaactttacgctcaggcatttctaagagagggggaacttcatcctgtagaagcagtaatcgacagtagcagatattttgttctccgtgttgaagaaaagatagatggtcgtgttcgacatgcttttatcggactcggattccgggaaagaacagaagcatatgatttccaagcagcactacatgaccatatgaagtatttgaacaagaagaaaacagcagaagaaatggaacaacactatcagaacacttcatccgttgattacagcttaaaggaaggagaaaccattgttctccaactcaaaaatagaagcgataaagacagcaagtcaaaaacggtagagaagagtctgggcaatctctcgttggaggataaaggcaagtcaatagaaaccaccattccttcaatcatcctgccacctccacctccgggaccgctttcccctgtcacaactgctcagaagtccccgtcaagtctgccgccaagcctcagcctccaaagatcgtctgaacaacaagatttagatacaaagcgagaagaagaagaagaagagaagaaagaagacctaaaagccaaagatggaggggttgaagatgcaccagatgatgactttggagatttccaagctgcgggttgatttaaacttataatcttttttaccatacacaaagatcgttttataagtaatgtgactgatcaaagtttggattgtttgctactgagagcttatcttctgtacaattccaaaatacaagcctatttctctgaacttgtgattagatagacaaaactccaaaaaaaaaaaaaaaaaaactcgagggggggcccggtacccaattcgccctat

SEQ ID NO: 49608 - protein, 302 aa, Arabidopsis thaliana; identical to SEQ ID NO: 25622
  peptide (1)..(302): Ceres Seq. ID no. 13647669
  misc_feature (27)..(225): Homolog of NCBI NO: 13384758 NR Description: RIKEN cDNA 1110005F07 [Mus musculus]
  misc_feature (28)..(253): Homolog of NCBI NO: 8922416 NR Description: hypothetical protein FLJ10420 [Homo sapiens]
  misc_feature (21)..(238): Homolog of NCBI NO: 18379172 NR Description: expressed protein [Arabidopsis thaliana]
  misc_feature (21)..(238): Homolog of NCBI NO: 14596175 NR Description: Unknown protein [Arabidopsis thaliana]
  misc_feature (28)..(263): Homolog of NCBI NO: 10435511 NR Description: unnamed protein product [Homo sapiens]
  misc_feature (27)..(270): Homolog of NCBI NO: 37535352 NR Description: unknown protein [Oryza sativa (japonica
  misc_feature (16)..(117): Homolog of NCBI NO: 34912642 NR Description: P0410E01.25 [Oryza sativa (japonica
  misc_feature (1)..(302): Homolog of NCBI NO: 11280689 NR Description: hypothetical protein F14P22.190 - Arabidopsis
  misc_feature (10)..(302): Homolog of NCBI NO: 21555074 NR Description: unknown [Arabidopsis thaliana]
  misc_feature (1)..(302): Homolog of NCBI NO: 18410992 NR Description: expressed protein [Arabidopsis thaliana]

SEQ ID NO: 49609 - protein, 293 aa, Arabidopsis thaliana; identical to SEQ ID NO: 25623
  peptide (1)..(293): Ceres Seq. ID no. 13647670
  misc_feature (18)..(216): Homolog of NCBI NO: 13384758 NR Description: RIKEN cDNA 1110005F07 [Mus musculus]
  misc_feature (19)..(244): Homolog of NCBI NO: 8922416 NR Description: hypothetical protein FLJ10420 [Homo sapiens]
  misc_feature (12)..(229): Homolog of NCBI NO: 18379172 NR Description: expressed protein [Arabidopsis thaliana]
  misc_feature (12)..(229): Homolog of NCBI NO: 14596175 NR Description: Unknown protein [Arabidopsis thaliana]
  misc_feature (19)..(254): Homolog of NCBI NO: 10435511 NR Description: unnamed protein product [Homo sapiens]
  misc_feature (18)..(261): Homolog of NCBI NO: 37535352 NR Description: unknown protein [Oryza sativa (japonica
  misc_feature (7)..(108): Homolog of NCBI NO: 34912642 NR Description: P0410E01.25 [Oryza sativa (japonica
  misc_feature (1)..(293): Homolog of NCBI NO: 11280689 NR Description: hypothetical protein F14P22.190 - Arabidopsis
  misc_feature (1)..(293): Homolog of NCBI NO: 21555074 NR Description: unknown [Arabidopsis thaliana]
  misc_feature (1)..(293): Homolog of NCBI NO: 18410992 NR Description: expressed protein [Arabidopsis thaliana]

SEQ ID NO: 49610 - DNA, 1825 bp, Arabidopsis thaliana
  misc_feature (1)..(1825): Ceres Seq. ID no. 12592214
  misc_feature: MA Experiment ID: 20000180 Result: Up-regulated in Transcription
  misc_feature: MA Experiment 20000180 PARAMETER Experiment Name: At_Germinating_Seeds_P Parameter: Age (hr) Value: 24 vs. 0
  misc_feature: MA Experiment 20000180 PARAMETER Experiment Name: At_Germinating_Seeds_P Parameter: Tissue Value: Germinating Seeds
  misc_feature: MA Experiment ID: 20000185 Result: Down-regulated in Transcription
  misc_feature: MA Experiment 20000185 PARAMETER Experiment Name: At_Roots__P Parameter: Age (day) Value: 7 vs. 21
  misc_feature: MA Experiment 20000185 PARAMETER Experiment Name: At_Roots__P Parameter: Organism Value: A. thaliana
  misc_feature: MA Experiment 20000185 PARAMETER Experiment Name: At_Roots__P Parameter: Tissue Value: Roots vs. Whole Plant
  misc_feature: MA Experiment ID: 20000264 Result: Down-regulated in Transcription
  misc_feature: MA Experiment 20000264 PARAMETER Experiment Name: At_Open_Flower_P Parameter: Age (day) Value: 21
  misc_feature: MA Experiment 20000264 PARAMETER Experiment Name: At_Open_Flower_P Parameter: Plant Line Value: WS
  misc_feature: MA Experiment 20000264 PARAMETER Experiment Name: At_Open_Flower_P Parameter: Tissue Value: Open Flower vs. Whole Plant
  misc_feature: MA Experiment ID: 20000265 Result: Down-regulated in Transcription
  misc_feature: MA Experiment 20000265 PARAMETER Experiment Name: At_Open_Flower_P Parameter: Age (day) Value: 21
  misc_feature: MA Experiment 20000265 PARAMETER Experiment Name: At_Open_Flower_P Parameter: Plant Line Value: WS
  misc_feature: MA Experiment 20000265 PARAMETER Experiment Name: At_Open_Flower_P Parameter: Tissue Value: Closed Flower vs. Whole Plant
  misc_feature: MA Experiment ID: 20000439 Result: Down-regulated in Transcription
  misc_feature: MA Experiment 20000439 PARAMETER Experiment Name: At_Roots__P Parameter: Age (day) Value: 14 vs. 21
  misc_feature: MA Experiment 20000439 PARAMETER Experiment Name: At_Roots__P Parameter: Organism Value: A. thaliana
  misc_feature: MA Experiment 20000439 PARAMETER Experiment Name: At_Roots__P Parameter: Tissue Value: Roots vs. Whole Plant
  misc_feature: MA Experiment ID: 20000573 Result: Down-regulated in Transcription
  misc_feature: MA Experiment 20000573 PARAMETER Experiment Name: At_100uM_ABA_Mutants__P Parameter: Organism Value: A. thaliana
  misc_feature: MA Experiment 20000573 PARAMETER Experiment Name: At_100uM_ABA_Mutants__P Parameter: Plant Line Value: CS22 vs. Ler wt
  misc_feature: MA Experiment 20000573 PARAMETER Experiment Name: At_100uM_ABA_Mutants__P Parameter: Timepoint (hr) Value: N/A
  misc_feature: MA Experiment 20000573 PARAMETER Experiment Name: At_100uM_ABA_Mutants__P Parameter: Tissue Value: Whole Plant
  misc_feature: MA Experiment 20000573 PARAMETER Experiment Name: At_100uM_ABA_Mutants__P Parameter: Treatment Value: None
  misc_feature: MA Experiment ID: 20000574 Result: Down-regulated in Transcription
  misc_feature: MA Experiment 20000574 PARAMETER Experiment Name: At_100uM_ABA_Mutants__P Parameter: Organism Value: A. thaliana
  misc_feature: MA Experiment 20000574 PARAMETER Experiment Name: At_100uM_ABA_Mutants__P Parameter: Plant Line Value: CS23 vs. Ler wt
  misc_feature: MA Experiment 20000574 PARAMETER Experiment Name: At_100uM_ABA_Mutants__P Parameter: Timepoint (hr) Value: N/A
  misc_feature: MA Experiment 20000574 PARAMETER Experiment Name: At_100uM_ABA_Mutants__P Parameter: Tissue Value: Whole Plant
  misc_feature: MA Experiment 20000574 PARAMETER Experiment Name: At_100uM_ABA_Mutants__P Parameter: Treatment Value: None
  misc_feature: MA Experiment ID: 20001451 Result: Down-regulated in Transcription
  misc_feature: MA Experiment 20001451 PARAMETER Experiment Name: At_Far-red-induction_P Parameter: Age (day) Value: 7
  misc_feature: MA Experiment 20001451 PARAMETER Experiment Name: At_Far-red-induction_P Parameter: Light Value: Far-red vs. White
  misc_feature: MA Experiment 20001451 PARAMETER Experiment Name: At_Far-red-induction_P Parameter: Organism Value: A. thaliana
  misc_feature: MA Experiment 20001451 PARAMETER Experiment Name: At_Far-red-induction_P Parameter: Plant Line Value: Columbia
  misc_feature: MA Experiment 20001451 PARAMETER Experiment Name: At_Far-red-induction_P Parameter: Timepoint (hr) Value: 24
  misc_feature: MA Experiment 20001451 PARAMETER Experiment Name: At_Far-red-induction_P Parameter: Tissue Value: Whole Plant
  misc_feature: MA Experiment ID: 20001557 Result: Down-regulated in Transcription
  misc_feature: MA Experiment 20001557 PARAMETER Experiment Name: At_Drought_Soil_Dry_P Parameter: Age (day) Value: 27
  misc_feature: MA Experiment 20001557 PARAMETER Experiment Name: At_Drought_Soil_Dry_P Parameter: Organism Value: A. thaliana
  misc_feature: MA Experiment 20001557 PARAMETER Experiment Name: At_Drought_Soil_Dry_P Parameter: Plant Line Value: WS
  misc_feature: MA Experiment 20001557 PARAMETER Experiment Name: At_Drought_Soil_Dry_P Parameter: Post Timepoint (hr) Value: 3
  misc_feature: MA Experiment 20001557 PARAMETER Experiment Name: At_Drought_Soil_Dry_P Parameter: Post-Treatment Value: Re-Water vs. No Drought
  misc_feature: MA Experiment 20001557 PARAMETER Experiment Name: At_Drought_Soil_Dry_P Parameter: Timepoint (day) Value: 13
  misc_feature: MA Experiment 20001557 PARAMETER Experiment Name: At_Drought_Soil_Dry_P Parameter: Treatment Value: Drought vs. No Drought
  misc_feature: MA Experiment ID: 20001560 Result: Down-regulated in Transcription
  misc_feature: MA Experiment 20001560 PARAMETER Experiment Name: At_Drought_Soil_Dry_P Parameter: Age (day) Value: 28
  misc_feature: MA Experiment 20001560 PARAMETER Experiment Name: At_Drought_Soil_Dry_P Parameter: Organism Value: A. thaliana
  misc_feature: MA Experiment 20001560 PARAMETER Experiment Name: At_Drought_Soil_Dry_P Parameter: Plant Line Value: WS
  misc_feature: MA Experiment 20001560 PARAMETER Experiment Name: At_Drought_Soil_Dry_P Parameter: Post Timepoint (hr) Value: None
  misc_feature: MA Experiment 20001560 PARAMETER Experiment Name: At_Drought_Soil_Dry_P Parameter: Post-Treatment Value: None
  misc_feature: MA Experiment 20001560 PARAMETER Experiment Name: At_Drought_Soil_Dry_P Parameter: Timepoint (day) Value: 14
  misc_feature: MA Experiment 20001560 PARAMETER Experiment Name: At_Drought_Soil_Dry_P Parameter: Treatment Value: Drought vs. No Drought
  misc_feature: MA Experiment ID: 20001757 Result: Up-regulated in Transcription
  misc_feature: MA Experiment 20001757 PARAMETER Experiment Name: At_50mM_NH4NO3_L-to-H_P Parameter: Timepoint (hr) Value: 6
  misc_feature: MA Experiment 20001757 PARAMETER Experiment Name: At_50mM_NH4NO3_L-to-H_P Parameter: Tissue Value: Leaf
  misc_feature: MA Experiment 20001757 PARAMETER Experiment Name: At_50mM_NH4NO3_L-to-H_P Parameter: Treatment Value: 50mM NH4NO3 vs 100mM Mannitol
  misc_feature: MA Experiment ID: 20001904 Result: Down-regulated in Transcription
  misc_feature: MA Experiment 20001904 PARAMETER Experiment Name: At_Drought_Reproduction_P Parameter: Age (day) Value: 37
  misc_feature: MA Experiment 20001904 PARAMETER Experiment Name: At_Drought_Reproduction_P Parameter: Organism Value: A. thaliana
  misc_feature: MA Experiment 20001904 PARAMETER Experiment Name: At_Drought_Reproduction_P Parameter: Plant Line Value: WS
  misc_feature: MA Experiment 20001904 PARAMETER Experiment Name: At_Drought_Reproduction_P Parameter: Timepoint (day) Value: 7
  misc_feature: MA Experiment 20001904 PARAMETER Experiment Name: At_Drought_Reproduction_P Parameter: Tissue Value: Rosettes
  misc_feature: MA Experiment 20001904 PARAMETER Experiment Name: At_Drought_Reproduction_P Parameter: Treatment Value: Drought vs. No Drought
  misc_feature: MA Experiment ID: 20001906 Result: Down-regulated in Transcription
  misc_feature: MA Experiment 20001906 PARAMETER Experiment Name: At_Drought_Reproduction_P Parameter: Age (day) Value: 35
  misc_feature: MA Experiment 20001906 PARAMETER Experiment Name: At_Drought_Reproduction_P Parameter: Organism Value: A. thaliana
  misc_feature: MA Experiment 20001906 PARAMETER Experiment Name: At_Drought_Reproduction_P Parameter: Plant Line Value: WS
  misc_feature: MA Experiment 20001906 PARAMETER Experiment Name: At_Drought_Reproduction_P Parameter: Timepoint (day) Value: 5
  misc_feature: MA Experiment 20001906 PARAMETER Experiment Name: At_Drought_Reproduction_P Parameter: Tissue Value: Siliques
  misc_feature: MA Experiment 20001906 PARAMETER Experiment Name: At_Drought_Reproduction_P Parameter: Treatment Value: Drought vs. No Drought
atgcaacacaacacatacatctacatattaaccatgaagcttcttgggttcgccttagctattctattagttgtggcgacttgcaaacctgaagaagagattacttgcgaagagaacgttccattcacatgtagccaaacagatcgtttcaacaaacaagatttcgaaagcgacttcatcttcggtgttgcatcttctgcttaccagatcgaaggcggcagaggtcgtggacttaacgtttgggatggcttcactcaccgatacccagagaaaggtggagccgatttgggcaatggagacactacttgtgactcataccggacttggcagaaagatctagacgtgatggaagagcttggagttaaaggctacagattctcctttgcgtggtcaagaatccttccaaaaggaaagaggagtaggggaatcaacgaagatggtattaactactacagcggtctcatagatggcctgatcgcaaggaacataacgcctttcgttacactctttcactgggaccttcctcaatcattgcaagatgaatatgaaggtttcttggacagaacgatcatagacgatttcaaagattacgcggatctatgtttcgagagatttggtgatagagtaaagcactggatcaccatcaaccagcttttcacagtgcctacgagaggctatgcattgggaacagatgcacccggtcgatgttcccaatgggtggataaaagatgttacggtggagattcttccaccgaaccctatatcgttgcgcataaccagcttcttgctcatgccacggtcgttgatctatacaggacgagatataagtaccaaggagggaagattggacctgtgatgataactagatggtttctaccatatgatgacactctagagagcaaacaagcaacttggagggccaaagaattcttcttgggatggttcatggagccgctaacaaagggtaaatacccatacatcatgaggaaacttgttggtaatcggcttccaaagttcaacagcacagaagctcgccttttaaagggttcatatgattttcttggtctcaactattacgtcactcaatacgcccacgcccttgacccaagtcctccggaaaaactcactgccatgacggactcactcgcaaaccttacatctcttgatgcaaatggtcaaccccctggtccaccgttctctaaaggcagttattaccacccaagagggatgttaaacgtaatggagcacttcaaaaccaaatacggtgaccctttaatctatgtcaccgagaacggattcagtacctccggtggccccatacccttcaccgaagcatttcacgattacaaccggattgattatctctgcagtcatctatgttttctccgcaaggccatcaaggagaagcgtgtcaacgtgaaaggatactttgtttggtctcttggggataattacgaattctgcaacggctacaccgtcagattcggacttagttacgttgatttcaataatgtcactgctgatagagacctcaaagcttctggcttatggtaccagtcgttcttgagagataccaccaagaaccaagatatcctccgctcaagtctgccctttaagaacggggataggaagagcctcacatgaaagaccaaaaccactttatgcccatcgagatcatcttcatgtctcttctttctacttgctccatagataaaaggagcttctacctactgtattaaataaaagatgatcaaacttaataaatattttgtatactacattatgccatgggatggggaaaaatccgatgaaaccaaaattgaac

SEQ ID NO: 49611 - protein, 547 aa, Arabidopsis thaliana
  peptide (1)..(547): Ceres Seq. ID no. 12592215
  misc_feature (12)..(543): Homolog of NCBI NO: 11034736 NR Description: myrosinase [Raphanus sativus]
  misc_feature (12)..(536): Homolog of NCBI NO: 127733 NR Description: Myrosinase precursor (Sinigrinase)
  misc_feature (12)..(546): Homolog of NCBI NO: 15809938 NR Description: AT5g26000/T1N24_7 [Arabidopsis thaliana]
  misc_feature (12)..(546): Homolog of NCBI NO: 30690085 NR Description: glycosyl hydrolase family 1, myrosinase precursor
  misc_feature (12)..(546): Homolog of NCBI NO: 16648811 NR Description: AT5g26000/T1N24_7 [Arabidopsis thaliana]
  misc_feature (1)..(467): Homolog of NCBI NO: 30690075 NR Description: glycosyl hydrolase family 1 [Arabidopsis thaliana]
  misc_feature (13)..(547): Homolog of NCBI NO: 27261134 NR Description: carboxypeptidase Y/myrosinase fusion protein
  misc_feature (12)..(547): Homolog of NCBI NO: 13605680 NR Description: AT5g25980/T1N24_18 [Arabidopsis thaliana]
  misc_feature (12)..(547): Homolog of NCBI NO: 1362007 NR Description: thioglucosidase (EC 3.2.1.147) 2 - Arabidopsis
  misc_feature (1)..(547): Homolog of NCBI NO: 18420974 NR Description: glycosyl hydrolase family 1
MQHNTYIYILTMKLLGFALAILLVVATCKPEEEITCEENVPFTCSQTDRFNKQDFESDFIFGVASSAYQIEGGRGRGLNVWDGFTHRYPEKGGADLGNGDTTCDSYRTWQKDLDVMEELGVKGYRFSFAWSRILPKGKRSRGINEDGINYYSGLIDGLIARNITPFVTLFHWDLPQSLQDEYEGFLDRTIIDDFKDYADLCFERFGDRVKHWITINQLFTVPTRGYALGTDAPGRCSQWVDKRCYGGDSSTEPYIVAHNQLLAHATVVDLYRTRYKYQGGKIGPVMITRWFLPYDDTLESKQATWRAKEFFLGWFMEPLTKGKYPYIMRKLVGNRLPKFNSTEARLLKGSYDFLGLNYYVTQYAHALDPSPPEKLTAMTDSLANLTSLDANGQPPGPPFSKGSYYHPRGMLNVMEHFKTKYGDPLIYVTENGFSTSGGPIPFTEAFHDYNRIDYLCSHLCFLRKAIKEKRVNVKGYFVWSLGDNYEFCNGYTVRFGLSYVDFNNVTADRDLKASGLWYQSFLRDTTKNQDILRSSLPFKNGDRKSLT

SEQ ID NO: 49612 - protein, 536 aa, Arabidopsis thaliana
  peptide (1)..(536): Ceres Seq. ID no. 12592216
  misc_feature (1)..(532): Homolog of NCBI NO: 11034736 NR Description: myrosinase [Raphanus sativus]
  misc_feature (1)..(525): Homolog of NCBI NO: 127733 NR Description: Myrosinase precursor (Sinigrinase)
  misc_feature (1)..(535): Homolog of NCBI NO: 15809938 NR Description: AT5g26000/T1N24_7 [Arabidopsis thaliana]
  misc_feature (1)..(535): Homolog of NCBI NO: 30690085 NR Description: glycosyl hydrolase family 1, myrosinase precursor
  misc_feature (1)..(535): Homolog of NCBI NO: 16648811 NR Description: AT5g26000/T1N24_7 [Arabidopsis thaliana]
  misc_feature (1)..(456): Homolog of NCBI NO: 30690075 NR Description: glycosyl hydrolase family 1 [Arabidopsis thaliana]
  misc_feature (2)..(536): Homolog of NCBI NO: 27261134 NR Description: carboxypeptidase Y/myrosinase fusion protein
  misc_feature (1)..(536): Homolog of NCBI NO: 13605680 NR Description: AT5g25980/T1N24_18 [Arabidopsis thaliana]
  misc_feature (1)..(536): Homolog of NCBI NO: 1362007 NR Description: thioglucosidase (EC 3.2.1.147) 2 - Arabidopsis
  misc_feature (1)..(536): Homolog of NCBI NO: 18420974 NR Description: glycosyl hydrolase family 1
MKLLGFALAILLVVATCKPEEEITCEENVPFTCSQTDRFNKQDFESDFIFGVASSAYQIEGGRGRGLNVWDGFTHRYPEKGGADLGNGDTTCDSYRTWQKDLDVMEELGVKGYRFSFAWSRILPKGKRSRGINEDGINYYSGLIDGLIARNITPFVTLFHWDLPQSLQDEYEGFLDRTIIDDFKDYADLCFERFGDRVKHWITINQLFTVPTRGYALGTDAPGRCSQWVDKRCYGGDSSTEPYIVAHNQLLAHATVVDLYRTRYKYQGGKIGPVMITRWFLPYDDTLESKQATWRAKEFFLGWFMEPLTKGKYPYIMRKLVGNRLPKFNSTEARLLKGSYDFLGLNYYVTQYAHALDPSPPEKLTAMTDSLANLTSLDANGQPPGPPFSKGSYYHPRGMLNVMEHFKTKYGDPLIYVTENGFSTSGGPIPFTEAFHDYNRIDYLCSHLCFLRKAIKEKRVNVKGYFVWSLGDNYEFCNGYTVRFGLSYVDFNNVTADRDLKASGLWYQSFLRDTTKNQDILRSSLPFKNGDRKSLT

SEQ ID NO: 49613 - protein, 432 aa, Arabidopsis thaliana
  peptide (1)..(432): Ceres Seq. ID no. 12592217
  misc_feature (1)..(428): Homolog of NCBI NO: 11034736 NR Description: myrosinase [Raphanus sativus]
  misc_feature (1)..(421): Homolog of NCBI NO: 127733 NR Description: Myrosinase precursor (Sinigrinase)
  misc_feature (1)..(431): Homolog of NCBI NO: 15809938 NR Description: AT5g26000/T1N24_7 [Arabidopsis thaliana]
  misc_feature (1)..(431): Homolog of NCBI NO: 30690085 NR Description: glycosyl hydrolase family 1, myrosinase precursor
  misc_feature (1)..(431): Homolog of NCBI NO: 16648811 NR Description: AT5g26000/T1N24_7 [Arabidopsis thaliana]
  misc_feature (1)..(352): Homolog of NCBI NO: 30690075 NR Description: glycosyl hydrolase family 1 [Arabidopsis thaliana]
  misc_feature (1)..(432): Homolog of NCBI NO: 27261134 NR Description: carboxypeptidase Y/myrosinase fusion protein
  misc_feature (1)..(432): Homolog of NCBI NO: 13605680 NR Description: AT5g25980/T1N24_18 [Arabidopsis thaliana]
  misc_feature (1)..(432): Homolog of NCBI NO: 1362007 NR Description: thioglucosidase (EC 3.2.1.147) 2 - Arabidopsis
  misc_feature (1)..(432): Homolog of NCBI NO: 18420974 NR Description: glycosyl hydrolase family 1
MEELGVKGYRFSFAWSRILPKGKRSRGINEDGINYYSGLIDGLIARNITPFVTLFHWDLPQSLQDEYEGFLDRTIIDDFKDYADLCFERFGDRVKHWITINQLFTVPTRGYALGTDAPGRCSQWVDKRCYGGDSSTEPYIVAHNQLLAHATVVDLYRTRYKYQGGKIGPVMITRWFLPYDDTLESKQATWRAKEFFLGWFMEPLTKGKYPYIMRKLVGNRLPKFNSTEARLLKGSYDFLGLNYYVTQYAHALDPSPPEKLTAMTDSLANLTSLDANGQPPGPPFSKGSYYHPRGMLNVMEHFKTKYGDPLIYVTENGFSTSGGPIPFTEAFHDYNRIDYLCSHLCFLRKAIKEKRVNVKGYFVWSLGDNYEFCNGYTVRFGLSYVDFNNVTADRDLKASGLWYQSFLRDTTKNQDILRSSLPFKNGDRKSLT

SEQ ID NO: 49614 - DNA, 1412 bp, Arabidopsis thaliana
  misc_feature (1)..(1412): Ceres Seq. ID no. 14304356
  misc_feature: MA Experiment ID: 20000438 Result: Down-regulated in Transcription
  misc_feature: MA Experiment 20000438 PARAMETER Experiment Name: At_Shoots__P Parameter: Age (day) Value: 14
  misc_feature: MA Experiment 20000438 PARAMETER Experiment Name: At_Shoots__P Parameter: Tissue Value: Shoots vs. Whole Plant
gaaggaaagagcgagagagagagagagagagagagaaaaaagaagaagaagaatttgaggcgattgggtaagcgatgcacatcgtcttctctgtcgatgatttgaccgaatccttctggcctgttcccgctccggcgccgtcgccgggatcgtcatcgactccgtcaccgacgcagaacgtggcggatgggatgactcgaagtcaatcggagtgggcgttccacaggcttatcaatgagttgtctggttccgattcgagccctacgactaacacaatcgagagatcacctccaccggttcagtctctttcgagattagaagaaaccgttgacgaaaccgaagatgttgttgagattcagaaaccgcagaatcatcgacggctccctgttgatgatcaagggaagaatcggaatcgtgctccgtcgtctgatccggttgattcttcagctcctgttgttgttgatcctaatcagtatcatgcgattcttaagagcaagctcgagcttgcttgcgctgctgttgctcgtcgtgtgggaactgtgaaaccggaagattcgagtgcttcagctagcaatcaaaaacaagctcaaggctccattgtggcacaaacctcacctggtgcttcatctgttagattttctcccacaacaagcacgcaaaagaaacctgatgttccagccagacaaactactagtatttcatcacgagatgattctgatgacgatgatcttgatggagacgcagataatggagatcctactgatgtgaagcgtgctaggaggatgctctcaaaccgagaatccgctaggcgctctaggagaagaaagcaagaacaaatgaatgaatttgatacacaggtaggccaattaagagccgagcattcaactttaattaatcgtcttagtgacatgaatcataagtatgatgcagctgctgttgacaacagaattctaagagctgatatcgaaactttgagaacaaaggttaagatggcagaggaaactgtgaaaagagtgacaggagtgaaccctttgcattggtcaagaccaaacatgggcataccattcagcaacacaccgagtgcttcctctagtattccgccaaactctaaccacattttgaaaccagcaaattcaagtaccaacaccagtgctggtttagcacaaaatcagagagtggagacggcaaatttcttgccggaacaggtgaaccgtgaaggcatgcagaatccatttgctcctgattctaatctgtacgaaaccctaccccattggaatcacaagcattaaccagaaaaagagtcattggttttgtgattttgattgaggtaactattgtctgtatttttatttactgtatgactcagcgacggtaaactcttaatattatatatatgattggacatgaaaaag

SEQ ID NO: 49615 - protein, 404 aa, Arabidopsis thaliana
  peptide (1)..(404): Ceres Seq. ID no. 14304357
  misc_feature (228)..(292): Pfam Name: bZIP transcription factor Pfam Description: bZIP transcription factor
  misc_feature (113)..(340): Homolog of NCBI NO: 2130145 NR Description: seed storage protein opaque-2 - maize
  misc_feature (1)..(340): Homolog of NCBI NO: 542188 NR Description: OHP2 protein - maize
  misc_feature (114)..(340): Homolog of NCBI NO: 542187 NR Description: OHP1 protein - maize
  misc_feature (1)..(386): Homolog of NCBI NO: 16797791 NR Description: bZIP transcription factor [Nicotiana tabacum]
  misc_feature (8)..(404): Homolog of NCBI NO: 19423919 NR Description: unknown protein [Arabidopsis thaliana]
  misc_feature (1)..(404): Homolog of NCBI NO: 15235433 NR Description: bZIP protein [Arabidopsis thaliana]
  misc_feature (1)..(404): Homolog of NCBI NO: 30679226 NR Description: bZIP protein [Arabidopsis thaliana]
  misc_feature (1)..(261): Homolog of NCBI NO: 15451130 NR Description: bZIP transcription factor-like protein
  misc_feature (1)..(404): Homolog of NCBI NO: 30694089 NR Description: bZIP transcription factor-related protein
MHIVFSVDDLTESFWPVPAPAPSPGSSSTPSPTQNVADGMTRSQSEWAFHRLINELSGSDSSPTTNTIERSPPPVQSLSRLEETVDETEDVVEIQKPQNHRRLPVDDQGKNRNRAPSSDPVDSSAPVVVDPNQYHAILKSKLELACAAVARRVGTVKPEDSSASASNQKQAQGSIVAQTSPGASSVRFSPTTSTQKKPDVPARQTTSISSRDDSDDDDLDGDADNGDPTDVKRARRMLSNRESARRSRRRKQEQMNEFDTQVGQLRAEHSTLINRLSDMNHKYDAAAVDNRILRADIETLRTKVKMAEETVKRVTGVNPLHWSRPNMGIPFSNTPSASSSIPPNSNHILKPANSSTNTSAGLAQNQRVETANFLPEQVNREGMQNPFAPDSNLYETLPHWNHKH

SEQ ID NO: 49616 - protein, 365 aa, Arabidopsis thaliana
  peptide (1)..(365): Ceres Seq. ID no. 14304358
  misc_feature (189)..(253): Pfam Name: bZIP transcription factor Pfam Description: bZIP transcription factor
  misc_feature (74)..(301): Homolog of NCBI NO: 2130145 NR Description: seed storage protein opaque-2 - maize
  misc_feature (1)..(301): Homolog of NCBI NO: 542188 NR Description: OHP2 protein - maize
  misc_feature (75)..(301): Homolog of NCBI NO: 542187 NR Description: OHP1 protein - maize
  misc_feature (1)..(347): Homolog of NCBI NO: 16797791 NR Description: bZIP transcription factor [Nicotiana tabacum]
  misc_feature (1)..(365): Homolog of NCBI NO: 19423919 NR Description: unknown protein [Arabidopsis thaliana]
  misc_feature (1)..(365): Homolog of NCBI NO: 15235433 NR Description: bZIP protein [Arabidopsis thaliana]
  misc_feature (1)..(365): Homolog of NCBI NO: 30679226 NR Description: bZIP protein [Arabidopsis thaliana]
  misc_feature (1)..(222): Homolog of NCBI NO: 15451130 NR Description: bZIP transcription factor-like protein
  misc_feature (1)..(365): Homolog of NCBI NO: 30694089 NR Description: bZIP transcription factor-related protein
MTRSQSEWAFHRLINELSGSDSSPTTNTIERSPPPVQSLSRLEETVDETEDVVEIQKPQNHRRLPVDDQGKNRNRAPSSDPVDSSAPVVVDPNQYHAILKSKLELACAAVARRVGTVKPEDSSASASNQKQAQGSIVAQTSPGASSVRFSPTTSTQKKPDVPARQTTSISSRDDSDDDDLDGDADNGDPTDVKRARRMLSNRESARRSRRRKQEQMNEFDTQVGQLRAEHSTLINRLSDMNHKYDAAAVDNRILRADIETLRTKVKMAEETVKRVTGVNPLHWSRPNMGIPFSNTPSASSSIPPNSNHILKPANSSTNTSAGLAQNQRVETANFLPEQVNREGMQNPFAPDSNLYETLPHWNHKH

SEQ ID NO: 49617 - DNA, 983 bp, Arabidopsis thaliana
  misc_feature (1)..(983): Ceres Seq. ID no. 12591240
  misc_feature: MA Experiment ID: 20000179 Result: Up-regulated in Transcription
  misc_feature: MA Experiment 20000179 PARAMETER Experiment Name: At_Germinating_Seeds_P Parameter: Age (hr) Value: 6 vs. 0
  misc_feature: MA Experiment 20000179 PARAMETER Experiment Name: At_Germinating_Seeds_P Parameter: Tissue Value: Germinating Seeds
  misc_feature: MA Experiment ID: 20000180 Result: Up-regulated in Transcription
  misc_feature: MA Experiment 20000180 PARAMETER Experiment Name: At_Germinating_Seeds_P Parameter: Age (hr) Value: 24 vs. 0
  misc_feature: MA Experiment 20000180 PARAMETER Experiment Name: At_Germinating_Seeds_P Parameter: Tissue Value: Germinating Seeds
actccaatcacatcactgctaagactcattgaattcaaatcgttatgtctacacattcatcaatctcgcaaccgccgcttcctctcgccggaagagtcgccattgtcaccggctcttcccgtggtattggccgagcgatagcgatccacttagctgaactcggtgcgaggattgttatcaactacacctctaaagccgcagacgccgagcgtgtcgcgtcggagatcaatgattttccagttagggaagaaatcactggaaagggaccaagagctattgtggttcaggccaatgtctctgagccaagccaggttaaatcaatgtttgatgcggcggagagtgcctttgaagcgccggttcacattctggttaactctgctgggattctcgatccaaagtaccctacgatcgcagacacatcagtcgaagatttcgatcatacgttcagtgtcaacacaaaaggagcgttcctgtgtagcaaggaagctgccaataggctaaaacaaggaggtggtggtcggatcatacttctgacatcttcccagactcgatctttaaagccagggtttggtgcctatgccgcatcaaaggcagctgtggaaactatggtcaagattcttgcaaaagagctcaaaggaacaggaatcactgcaaactgtgttgctccaggacccatcgccactgagatgttctttgatggaaagaccccagagttggtggaaaagatagccgcagagtctccctttgggagggtcggcgaagccaaagacgtggtgcctcttgttggattcttggctggtgacggtggtgaatgggtcaatggtcaaatcattcctgttaatggtggatatgtataaaagagttcgtcttgagaggagcctcttcctgataccttgagaagcaaatgtaggggttaacttgttagaaataaaacattgggttcaattggaataataataataataaacactgaggttgaaaat

SEQ ID NO: 49618 - protein, 270 aa, Arabidopsis thaliana
  peptide (1)..(270): Ceres Seq. ID no. 12591241
  misc_feature (8)..(270): Homolog of NCBI NO: 34395019 NR Description: putative short-chain dehydrogenase/reductase
  misc_feature (123)..(270): Homolog of NCBI NO: 14326547 NR Description: AT3g03980/T11I18_9 [Arabidopsis thaliana]
  misc_feature (5)..(270): Homolog of NCBI NO: 34393370 NR Description: putative short-chain dehydrogenase/reductase
  misc_feature (11)..(270): Homolog of NCBI NO: 1711355 NR Description: SHORT-CHAIN TYPE DEHYDROGENASE/REDUCTASE
  misc_feature (28)..(268): Homolog of NCBI NO: 21954081 NR Description: putative short-chain type dehydrogenase/reductase
  misc_feature (8)..(270): Homolog of NCBI NO: 15235621 NR Description: short-chain alcohol dehydrogenase like protein
  misc_feature (14)..(255): Homolog of NCBI NO: 30686710 NR Description: short-chain dehydrogenase/reductase family
  misc_feature (1)..(268): Homolog of NCBI NO: 30679011 NR Description: short-chain type dehydrogenase/reductase -related
  misc_feature (14)..(270): Homolog of NCBI NO: 9758903 NR Description: Brn1-like protein [Arabidopsis thaliana]
  misc_feature (1)..(270): Homolog of NCBI NO: 15229203 NR Description: putative short-chain type dehydrogenase/reductase
MSTHSSISQPPLPLAGRVAIVTGSSRGIGRAIAIHLAELGARIVINYTSKAADAERVASEINDFPVREEITGKGPRAIVVQANVSEPSQVKSMFDAAESAFEAPVHILVNSAGILDPKYPTIADTSVEDFDHTFSVNTKGAFLCSKEAANRLKQGGGGRIILLTSSQTRSLKPGFGAYAASKAAVETMVKILAKELKGTGITANCVAPGPIATEMFFDGKTPELVEKIAAESPFGRVGEAKDVVPLVGFLAGDGGEWVNGQIIPVNGGYV

SEQ ID NO: 49619 - protein, 178 aa, Arabidopsis thaliana
  peptide (1)..(178): Ceres Seq. ID no. 12591242
  misc_feature (1)..(178): Homolog of NCBI NO: 34395019 NR Description: putative short-chain dehydrogenase/reductase
  misc_feature (31)..(178): Homolog of NCBI NO: 14326547 NR Description: AT3g03980/T11I18_9 [Arabidopsis thaliana]
  misc_feature (1)..(178): Homolog of NCBI NO: 34393370 NR Description: putative short-chain dehydrogenase/reductase
  misc_feature (1)..(178): Homolog of NCBI NO: 1711355 NR Description: SHORT-CHAIN TYPE DEHYDROGENASE/REDUCTASE
  misc_feature (1)..(176): Homolog of NCBI NO: 21954081 NR Description: putative short-chain type dehydrogenase/reductase
  misc_feature (1)..(178): Homolog of NCBI NO: 15235621 NR Description: short-chain alcohol dehydrogenase like protein
  misc_feature (1)..(163): Homolog of NCBI NO: 30686710 NR Description: short-chain dehydrogenase/reductase family
  misc_feature (1)..(176): Homolog of NCBI NO: 30679011 NR Description: short-chain type dehydrogenase/reductase -related
  misc_feature (1)..(178): Homolog of NCBI NO: 9758903 NR Description: Brn1-like protein [Arabidopsis thaliana]
  misc_feature (1)..(178): Homolog of NCBI NO: 15229203 NR Description: putative short-chain type dehydrogenase/reductase
MFDAAESAFEAPVHILVNSAGILDPKYPTIADTSVEDFDHTFSVNTKGAFLCSKEAANRLKQGGGGRIILLTSSQTRSLKPGFGAYAASKAAVETMVKILAKELKGTGITANCVAPGPIATEMFFDGKTPELVEKIAAESPFGRVGEAKDVVPLVGFLAGDGGEWVNGQIIPVNGGYV

SEQ ID NO: 49620 - DNA, 933 bp, Arabidopsis thaliana; identical to SEQ ID NO: 37998
  misc_feature (1)..(933): Ceres Seq. ID no. 12601209
  misc_feature: MA Experiment ID: 108435 Result: Down-regulated in Transcription
  misc_feature: MA Experiment 108435 PARAMETER Experiment Name: At_stm_Mutants_cDNA_P Parameter: Plant Line Value: wt Landsburg vs stm
  misc_feature: MA Experiment 108435 PARAMETER Experiment Name: At_stm_Mutants_cDNA_P Parameter: Tissue Value: Shoot Apical Meristem Region
  misc_feature: MA Experiment ID: 108461 Result: Up-regulated in Transcription
  misc_feature: MA Experiment 108461 PARAMETER Experiment Name: At_Germinating_Seeds_cDNA_P Parameter: Age (day) Value: 1 vs. 0
  misc_feature: MA Experiment 108461 PARAMETER Experiment Name: At_Germinating_Seeds_cDNA_P Parameter: Tissue Value: Germinating Seeds
  misc_feature: MA Experiment ID: 108462 Result: Up-regulated in Transcription
  misc_feature: MA Experiment 108462 PARAMETER Experiment Name: At_Germinating_Seeds_cDNA_P Parameter: Age (day) Value: 2 vs. 0
  misc_feature: MA Experiment 108462 PARAMETER Experiment Name: At_Germinating_Seeds_cDNA_P Parameter: Tissue Value: Germinating Seeds
  misc_feature: MA Experiment ID: 108463 Result: Up-regulated in Transcription
  misc_feature: MA Experiment 108463 PARAMETER Experiment Name: At_Germinating_Seeds_cDNA_P Parameter: Age (day) Value: 3 vs. 0
  misc_feature: MA Experiment 108463 PARAMETER Experiment Name: At_Germinating_Seeds_cDNA_P Parameter: Tissue Value: Germinating Seeds
  misc_feature: MA Experiment ID: 108464 Result: Up-regulated in Transcription
  misc_feature: MA Experiment 108464 PARAMETER Experiment Name: At_Germinating_Seeds_cDNA_P Parameter: Age (day) Value: 4 vs. 0
  misc_feature: MA Experiment 108464 PARAMETER Experiment Name: At_Germinating_Seeds_cDNA_P Parameter: Tissue Value: Germinating Seeds
  misc_feature: MA Experiment ID: 108488 Result: Up-regulated in Transcription
  misc_feature: MA Experiment ID: 108595 Result: Down-regulated in Transcription
  misc_feature: MA Experiment 108595 PARAMETER Experiment Name: At_Ler-pi_Ovule_cDNA_P Parameter: Plant Line Value: null
  misc_feature: MA Experiment ID: 20000071 Result: Down-regulated in Transcription
  misc_feature: MA Experiment 20000071 PARAMETER Experiment Name: At_100uM_ABA_Mutants_cDNA_P Parameter: Plant Line Value: CS8104
  misc_feature: MA Experiment 20000071 PARAMETER Experiment Name: At_100uM_ABA_Mutants_cDNA_P Parameter: Timepoint (hr) Value: 6
  misc_feature: MA Experiment 20000071 PARAMETER Experiment Name: At_100uM_ABA_Mutants_cDNA_P Parameter: Tissue Value: Aerial
  misc_feature: MA Experiment 20000071 PARAMETER Experiment Name: At_100uM_ABA_Mutants_cDNA_P Parameter: Treatment Value: 100uM ABA vs. No Treatment
  misc_feature: MA Experiment ID: 20000086 Result: Down-regulated in Transcription
  misc_feature: MA Experiment 20000086 PARAMETER Experiment Name: At_100uM_ABA_Mutants_cDNA_P Parameter: Plant Line Value: CS22
  misc_feature: MA Experiment 20000086 PARAMETER Experiment Name: At_100uM_ABA_Mutants_cDNA_P Parameter: Timepoint (hr) Value: 6
  misc_feature: MA Experiment 20000086 PARAMETER Experiment Name: At_100uM_ABA_Mutants_cDNA_P Parameter: Tissue Value: Aerial
  misc_feature: MA Experiment 20000086 PARAMETER Experiment Name: At_100uM_ABA_Mutants_cDNA_P Parameter: Treatment Value: 100uM ABA vs. No Treatment
  misc_feature: MA Experiment ID: 20000087 Result: Down-regulated in Transcription
  misc_feature: MA Experiment 20000087 PARAMETER Experiment Name: At_100uM_ABA_Mutants_cDNA_P Parameter: Plant Line Value: WS
  misc_feature: MA Experiment 20000087 PARAMETER Experiment Name: At_100uM_ABA_Mutants_cDNA_P Parameter: Timepoint (hr) Value: 6
  misc_feature: MA Experiment 20000087 PARAMETER Experiment Name: At_100uM_ABA_Mutants_cDNA_P Parameter: Tissue Value: Aerial
  misc_feature: MA Experiment 20000087 PARAMETER Experiment Name: At_100uM_ABA_Mutants_cDNA_P Parameter: Treatment Value: 100uM ABA vs. No Treatment
  misc_feature: MA Experiment ID: 20000088 Result: Down-regulated in Transcription
  misc_feature: MA Experiment 20000088 PARAMETER Experiment Name: At_100uM_ABA_Mutants_cDNA_P Parameter: Plant Line Value: Landsberg
  misc_feature: MA Experiment 20000088 PARAMETER Experiment Name: At_100uM_ABA_Mutants_cDNA_P Parameter: Timepoint (hr) Value: 6
  misc_feature: MA Experiment 20000088 PARAMETER Experiment Name: At_100uM_ABA_Mutants_cDNA_P Parameter: Tissue Value: Aerial
  misc_feature: MA Experiment 20000088 PARAMETER Experiment Name: At_100uM_ABA_Mutants_cDNA_P Parameter: Treatment Value: 100uM ABA vs. No Treatment
  misc_feature: MA Experiment ID: 20000117 Result: Down-regulated in Transcription
  misc_feature: MA Experiment 20000117 PARAMETER Experiment Name: At_100uM_ABA_Mutants_cDNA_P Parameter: Plant Line Value: Columbia
  misc_feature: MA Experiment 20000117 PARAMETER Experiment Name: At_100uM_ABA_Mutants_cDNA_P Parameter: Timepoint (hr) Value: 6
  misc_feature: MA Experiment 20000117 PARAMETER Experiment Name: At_100uM_ABA_Mutants_cDNA_P Parameter: Tissue Value: Aerial
  misc_feature: MA Experiment 20000117 PARAMETER Experiment Name: At_100uM_ABA_Mutants_cDNA_P Parameter: Treatment Value: 100uM ABA vs. No Treatment
  misc_feature: MA Experiment ID: 20000180 Result: Up-regulated in Transcription
  misc_feature: MA Experiment 20000180 PARAMETER Experiment Name: At_Germinating_Seeds_P Parameter: Age (hr) Value: 24 vs. 0
  misc_feature: MA Experiment 20000180 PARAMETER Experiment Name: At_Germinating_Seeds_P Parameter: Tissue Value: Germinating Seeds
  misc_feature: MA Experiment ID: 20000185 Result: Down-regulated in Transcription
  misc_feature: MA Experiment 20000185 PARAMETER Experiment Name: At_Roots__P Parameter: Age (day) Value: 7 vs. 21
  misc_feature: MA Experiment 20000185 PARAMETER Experiment Name: At_Roots__P Parameter: Organism Value: A. thaliana
  misc_feature: MA Experiment 20000185 PARAMETER Experiment Name: At_Roots__P Parameter: Tissue Value: Roots vs. Whole Plant
  misc_feature: MA Experiment ID: 20000438 Result: Up-regulated in Transcription
  misc_feature: MA Experiment 20000438 PARAMETER Experiment Name: At_Shoots__P Parameter: Age (day) Value: 14
  misc_feature: MA Experiment 20000438 PARAMETER Experiment Name: At_Shoots__P Parameter: Tissue Value: Shoots vs. Whole Plant
  misc_feature: MA Experiment ID: 20000439 Result: Down-regulated in Transcription
  misc_feature: MA Experiment 20000439 PARAMETER Experiment Name: At_Roots__P Parameter: Age (day) Value: 14 vs. 21
  misc_feature: MA Experiment 20000439 PARAMETER Experiment Name: At_Roots__P Parameter: Organism Value: A. thaliana
  misc_feature: MA Experiment 20000439 PARAMETER Experiment Name: At_Roots__P Parameter: Tissue Value: Roots vs. Whole Plant
  misc_feature: MA Experiment ID: 20000495 Result: Down-regulated in Transcription
  misc_feature: MA Experiment 20000495 PARAMETER Experiment Name: At_Guard_Cells_P Parameter: Harvest Date Value: 8/2/2002
  misc_feature: MA Experiment 20000495 PARAMETER Experiment Name: At_Guard_Cells_P Parameter: Organism Value: A. thaliana
  misc_feature: MA Experiment 20000495 PARAMETER Experiment Name: At_Guard_Cells_P Parameter: Tissue Value: Guard Cells vs. Leaves
  misc_feature: MA Experiment ID: 20000496 Result: Down-regulated in Transcription
  misc_feature: MA Experiment 20000496 PARAMETER Experiment Name: At_Guard_Cells_P Parameter: Harvest Date Value: 7/19/2002
  misc_feature: MA Experiment 20000496 PARAMETER Experiment Name: At_Guard_Cells_P Parameter: Organism Value: Canola
  misc_feature: MA Experiment 20000496 PARAMETER Experiment Name: At_Guard_Cells_P Parameter: Tissue Value: Guard Cells vs. Leaves
  misc_feature: MA Experiment ID: 20000794 Result: Down-regulated in Transcription
  misc_feature: MA Experiment 20000794 PARAMETER Experiment Name: At_Petals_P Parameter: Age (day) Value: 23-25 days
  misc_feature: MA Experiment 20000794 PARAMETER Experiment Name: At_Petals_P Parameter: Plant Line Value: WS
  misc_feature: MA Experiment 20000794 PARAMETER Experiment Name: At_Petals_P Parameter: Tissue Value: Petals vs. Whole plant
  misc_feature: MA Experiment ID: 20001451 Result: Down-regulated in Transcription
  misc_feature: MA Experiment 20001451 PARAMETER Experiment Name: At_Far-red-induction_P Parameter: Age (day) Value: 7
  misc_feature: MA Experiment 20001451 PARAMETER Experiment Name: At_Far-red-induction_P Parameter: Light Value: Far-red vs. White
  misc_feature: MA Experiment 20001451 PARAMETER Experiment Name: At_Far-red-induction_P Parameter: Organism Value: A. thaliana
  misc_feature: MA Experiment 20001451 PARAMETER Experiment Name: At_Far-red-induction_P Parameter: Plant Line Value: Columbia
  misc_feature: MA Experiment 20001451 PARAMETER Experiment Name: At_Far-red-induction_P Parameter: Timepoint (hr) Value: 24
  misc_feature: MA Experiment 20001451 PARAMETER Experiment Name: At_Far-red-induction_P Parameter: Tissue Value: Whole Plant
  misc_feature: MA Experiment ID: 20001557 Result: Down-regulated in Transcription
  misc_feature: MA Experiment 20001557 PARAMETER Experiment Name: At_Drought_Soil_Dry_P Parameter: Age (day) Value: 27
  misc_feature: MA Experiment 20001557 PARAMETER Experiment Name: At_Drought_Soil_Dry_P Parameter: Organism Value: A. thaliana
  misc_feature: MA Experiment 20001557 PARAMETER Experiment Name: At_Drought_Soil_Dry_P Parameter: Plant Line Value: WS
  misc_feature: MA Experiment 20001557 PARAMETER Experiment Name: At_Drought_Soil_Dry_P Parameter: Post Timepoint (hr) Value: 3
  misc_feature: MA Experiment 20001557 PARAMETER Experiment Name: At_Drought_Soil_Dry_P Parameter: Post-Treatment Value: Re-Water vs. No Drought
  misc_feature: MA Experiment 20001557 PARAMETER Experiment Name: At_Drought_Soil_Dry_P Parameter: Timepoint (day) Value: 13
  misc_feature: MA Experiment 20001557 PARAMETER Experiment Name: At_Drought_Soil_Dry_P Parameter: Treatment Value: Drought vs. No Drought
  misc_feature: MA Experiment ID: 20001757 Result: Up-regulated in Transcription
  misc_feature: MA Experiment 20001757 PARAMETER Experiment Name: At_50mM_NH4NO3_L-to-H_P Parameter: Timepoint (hr) Value: 6
  misc_feature: MA Experiment 20001757 PARAMETER Experiment Name: At_50mM_NH4NO3_L-to-H_P Parameter: Tissue Value: Leaf
  misc_feature: MA Experiment 20001757 PARAMETER Experiment Name: At_50mM_NH4NO3_L-to-H_P Parameter: Treatment Value: 50mM NH4NO3 vs 100mM Mannitol
  misc_feature: MA Experiment ID: 20001905 Result: Down-regulated in Transcription
  misc_feature: MA Experiment 20001905 PARAMETER Experiment Name: At_Drought_Reproduction_P Parameter: Age (day) Value: 40
  misc_feature: MA Experiment 20001905 PARAMETER Experiment Name: At_Drought_Reproduction_P Parameter: Organism Value: A. thaliana
  misc_feature: MA Experiment 20001905 PARAMETER Experiment Name: At_Drought_Reproduction_P Parameter: Plant Line Value: WS
  misc_feature: MA Experiment 20001905 PARAMETER Experiment Name: At_Drought_Reproduction_P Parameter: Timepoint (day) Value: 10
  misc_feature: MA Experiment 20001905 PARAMETER Experiment Name: At_Drought_Reproduction_P Parameter: Tissue Value: Rosettes
  misc_feature: MA Experiment 20001905 PARAMETER Experiment Name: At_Drought_Reproduction_P Parameter: Treatment Value: Drought vs. No Drought

SEQ ID NO: 49621 - protein, 229 aa, Arabidopsis thaliana; identical to SEQ ID NO: 37999
  peptide (1)..(229): Ceres Seq. ID no. 12601210
  misc_feature (113)..(205): Pfam Name: Rieske [2Fe-2S] domain Pfam Description: Rieske [2Fe-2S] domain
  misc_feature (113)..(205): Pfam Name: Rieske [2Fe-2S] domain Pfam Description: Rieske [2Fe-2S] domain
  misc_feature (113)..(205): Pfam Name: Rieske [2Fe-2S] domain Pfam Description: Rieske [2Fe-2S] domain
  misc_feature (1)..(229): Homolog of NCBI NO: 3885886 NR Description: Rieske Fe-S precursor protein [Oryza sativa]
  misc_feature (1)..(229): Homolog of NCBI NO: 2921504 NR Description: cytochrome B6-F complex iron-sulfur subunit
  misc_feature (1)..(229): Homolog of NCBI NO: 136707 NR Description: Cytochrome B6-F complex iron-sulfur subunit,
  misc_feature (1)..(229): Homolog of NCBI NO: 136712 NR Description: Cytochrome B6-F complex iron-sulfur subunit,
  misc_feature (1)..(229): Homolog of NCBI NO: 19999 NR Description: Rieske Fe/S protein of cytochrome b6/f complex
  misc_feature (1)..(229): Homolog of NCBI NO: 3885886 NR Description: Rieske Fe-S precursor protein [Oryza sativa]
  misc_feature (1)..(229): Homolog of NCBI NO: 136707 NR Description: Cytochrome B6-F complex iron-sulfur subunit,
  misc_feature (1)..(229): Homolog of NCBI NO: 19999 NR Description: Rieske Fe/S protein of cytochrome b6/f complex
  misc_feature (1)..(229): Homolog of NCBI NO: 136712 NR Description: Cytochrome B6-F complex iron-sulfur subunit,
  misc_feature (1)..(229): Homolog of NCBI NO: 136707 NR Description: Cytochrome B6-F complex iron-sulfur subunit,
  misc_feature (1)..(229): Homolog of NCBI NO: 2921504 NR Description: cytochrome B6-F complex iron-sulfur subunit
  misc_feature (1)..(229): Homolog of NCBI NO: 3885886 NR Description: Rieske Fe-S precursor protein [Oryza sativa]
  misc_feature (1)..(229): Homolog of NCBI NO: 15236275 NR Description: putative component of cytochrome B6-F complex
  misc_feature (1)..(229): Homolog of NCBI NO: 9843639 NR Description: Rieske FeS protein [Arabidopsis thaliana]
  misc_feature (20)..(229): Homolog of NCBI NO: 30679426 NR Description: Rieske FeS protein (component of cytochrome B6-F
  misc_feature (1)..(229): Homolog of NCBI NO: 401249 NR Description: Cytochrome B6-F complex iron-sulfur subunit 2,
  misc_feature (1)..(229): Homolog of NCBI NO: 401247 NR Description: Cytochrome B6-F complex iron-sulfur subunit 1,
  misc_feature (1)..(229): Homolog of NCBI NO: 15236275 NR Description: putative component of cytochrome B6-F complex
  misc_feature (1)..(229): Homolog of NCBI NO: 9843639 NR Description: Rieske FeS protein [Arabidopsis thaliana]
  misc_feature (20)..(229): Homolog of NCBI NO: 30679426 NR Description: Rieske FeS protein (component of cytochrome B6-F
  misc_feature (1)..(229): Homolog of NCBI NO: 401249 NR Description: Cytochrome B6-F complex iron-sulfur subunit 2,
  misc_feature (1)..(229): Homolog of NCBI NO: 401247 NR Description: Cytochrome B6-F complex iron-sulfur subunit 1,
  misc_feature (1)..(229): Homolog of NCBI NO: 19999 NR Description: Rieske Fe/S protein of cytochrome b6/f complex
  misc_feature (1)..(229): Homolog of NCBI NO: 136712 NR Description: Cytochrome B6-F complex iron-sulfur subunit,
  misc_feature (1)..(229): Homolog of NCBI NO: 2921504 NR Description: cytochrome B6-F complex iron-sulfur subunit
  misc_feature (1)..(229): Homolog of NCBI NO: 401247 NR Description: Cytochrome B6-F complex iron-sulfur subunit 1,
  misc_feature (1)..(229): Homolog of NCBI NO: 401249 NR Description: Cytochrome B6-F complex iron-sulfur subunit 2,
  misc_feature (20)..(229): Homolog of NCBI NO: 30679426 NR Description: Rieske FeS protein (component of cytochrome B6-F
  misc_feature (1)..(229): Homolog of NCBI NO: 9843639 NR Description: Rieske FeS protein [Arabidopsis thaliana]
  misc_feature (1)..(229): Homolog of NCBI NO: 15236275 NR Description: putative component of cytochrome B6-F complex

SEQ ID NO: 49622 - protein, 210 aa, Arabidopsis thaliana; identical to SEQ ID NO: 38000
  peptide (1)..(210): Ceres Seq. ID no. 12601211
  misc_feature (94)..(186): Pfam Name: Rieske [2Fe-2S] domain Pfam Description: Rieske [2Fe-2S] domain
  misc_feature (94)..(186): Pfam Name: Rieske [2Fe-2S] domain Pfam Description: Rieske [2Fe-2S] domain
  misc_feature (94)..(186): Pfam Name: Rieske [2Fe-2S] domain Pfam Description: Rieske [2Fe-2S] domain
  misc_feature (1)..(210): Homolog of NCBI NO: 3885886 NR Description: Rieske Fe-S precursor protein [Oryza sativa]
  misc_feature (1)..(210): Homolog of NCBI NO: 2921504 NR Description: cytochrome B6-F complex iron-sulfur subunit
  misc_feature (1)..(210): Homolog of NCBI NO: 136707 NR Description: Cytochrome B6-F complex iron-sulfur subunit,
  misc_feature (1)..(210): Homolog of NCBI NO: 136712 NR Description: Cytochrome B6-F complex iron-sulfur subunit,
  misc_feature (1)..(210): Homolog of NCBI NO: 19999 NR Description: Rieske Fe/S protein of cytochrome b6/f complex
  misc_feature (1)..(210): Homolog of NCBI NO: 3885886 NR Description: Rieske Fe-S precursor protein [Oryza sativa]
  misc_feature (1)..(210): Homolog of NCBI NO: 136707 NR Description: Cytochrome B6-F complex iron-sulfur subunit,
  misc_feature (1)..(210): Homolog of NCBI NO: 19999 NR Description: Rieske Fe/S protein of cytochrome b6/f complex
  misc_feature (1)..(210): Homolog of NCBI NO: 136712 NR Description: Cytochrome B6-F complex iron-sulfur subunit,
  misc_feature (1)..(210): Homolog of NCBI NO: 136707 NR Description: Cytochrome B6-F complex iron-sulfur subunit,
  misc_feature (1)..(210): Homolog of NCBI NO: 2921504 NR Description: cytochrome B6-F complex iron-sulfur subunit
  misc_feature (1)..(210): Homolog of NCBI NO: 3885886 NR Description: Rieske Fe-S precursor protein [Oryza sativa]
  misc_feature (1)..(210): Homolog of NCBI NO: 15236275 NR Description: putative component of cytochrome B6-F complex
  misc_feature (1)..(210): Homolog of NCBI NO: 9843639 NR Description: Rieske FeS protein [Arabidopsis thaliana]
  misc_feature (1)..(210): Homolog of NCBI NO: 30679426 NR Description: Rieske FeS protein (component of cytochrome B6-F
  misc_feature (1)..(210): Homolog of NCBI NO: 401249 NR Description: Cytochrome B6-F complex iron-sulfur subunit 2,
  misc_feature (1)..(210): Homolog of NCBI NO: 401247 NR Description: Cytochrome B6-F complex iron-sulfur subunit 1,
  misc_feature (1)..(210): Homolog of NCBI NO: 15236275 NR Description: putative component of cytochrome B6-F complex
  misc_feature (1)..(210): Homolog of NCBI NO: 9843639 NR Description: Rieske FeS protein [Arabidopsis thaliana]
  misc_feature (1)..(210): Homolog of NCBI NO: 30679426 NR Description: Rieske FeS protein (component of cytochrome B6-F
  misc_feature (1)..(210): Homolog of NCBI NO: 401249 NR Description: Cytochrome B6-F complex iron-sulfur subunit 2,
  misc_feature (1)..(210): Homolog of NCBI NO: 401247 NR Description: Cytochrome B6-F complex iron-sulfur subunit 1,
  misc_feature (1)..(210): Homolog of NCBI NO: 19999 NR Description: Rieske Fe/S protein of cytochrome b6/f complex
  misc_feature (1)..(210): Homolog of NCBI NO: 136712 NR Description: Cytochrome B6-F complex iron-sulfur subunit,
  misc_feature (1)..(210): Homolog of NCBI NO: 2921504 NR Description: cytochrome B6-F complex iron-sulfur subunit
  misc_feature (1)..(210): Homolog of NCBI NO: 401247 NR Description: Cytochrome B6-F complex iron-sulfur subunit 1,
  misc_feature (1)..(210): Homolog of NCBI NO: 401249 NR Description: Cytochrome B6-F complex iron-sulfur subunit 2,
  misc_feature (1)..(210): Homolog of NCBI NO: 30679426 NR Description: Rieske FeS protein (component of cytochrome B6-F
  misc_feature (1)..(210): Homolog of NCBI NO: 9843639 NR Description: Rieske FeS protein [Arabidopsis thaliana]
  misc_feature (1)..(210): Homolog of NCBI NO: 15236275 NR Description: putative component of cytochrome B6-F complex

SEQ ID NO: 49623 - protein, 208 aa, Arabidopsis thaliana; identical to SEQ ID NO: 38001
  peptide (1)..(208): Ceres Seq. ID no. 12601212
  misc_feature (92)..(184): Pfam Name: Rieske [2Fe-2S] domain Pfam Description: Rieske [2Fe-2S] domain
  misc_feature (92)..(184): Pfam Name: Rieske [2Fe-2S] domain Pfam Description: Rieske [2Fe-2S] domain
  misc_feature (92)..(184): Pfam Name: Rieske [2Fe-2S] domain Pfam Description: Rieske [2Fe-2S] domain
  misc_feature (1)..(208): Homolog of NCBI NO: 3885886 NR Description: Rieske Fe-S precursor protein [Oryza sativa]
  misc_feature (1)..(208): Homolog of NCBI NO: 2921504 NR Description: cytochrome B6-F complex iron-sulfur subunit
  misc_feature (1)..(208): Homolog of NCBI NO: 136707 NR Description: Cytochrome B6-F complex iron-sulfur subunit,
  misc_feature (1)..(208): Homolog of NCBI NO: 136712 NR Description: Cytochrome B6-F complex iron-sulfur subunit,
  misc_feature (1)..(208): Homolog of NCBI NO: 19999 NR Description: Rieske Fe/S protein of cytochrome b6/f complex
  misc_feature (1)..(208): Homolog of NCBI NO: 3885886 NR Description: Rieske Fe-S precursor protein [Oryza sativa]
  misc_feature (1)..(208): Homolog of NCBI NO: 136707 NR Description: Cytochrome B6-F complex iron-sulfur subunit,
  misc_feature (1)..(208): Homolog of NCBI NO: 19999 NR Description: Rieske Fe/S protein of cytochrome b6/f complex
  misc_feature (1)..(208): Homolog of NCBI NO: 136712 NR Description: Cytochrome B6-F complex iron-sulfur subunit,
  misc_feature (1)..(208): Homolog of NCBI NO: 136707 NR Description: Cytochrome B6-F complex iron-sulfur subunit,
  misc_feature (1)..(208): Homolog of NCBI NO: 2921504 NR Description: cytochrome B6-F complex iron-sulfur subunit
  misc_feature (1)..(208): Homolog of NCBI NO: 3885886 NR Description: Rieske Fe-S precursor protein [Oryza sativa]
  misc_feature (1)..(208): Homolog of NCBI NO: 15236275 NR Description: putative component of cytochrome B6-F complex
  misc_feature (1)..(208): Homolog of NCBI NO: 9843639 NR Description: Rieske FeS protein [Arabidopsis thaliana]
  misc_feature (1)..(208): Homolog of NCBI NO: 30679426 NR Description: Rieske FeS protein (component of cytochrome B6-F
  misc_feature (1)..(208): Homolog of NCBI NO: 401249 NR Description: Cytochrome B6-F complex iron-sulfur subunit 2,
  misc_feature (1)..(208): Homolog of NCBI NO: 401247 NR Description: Cytochrome B6-F complex iron-sulfur subunit 1,
  misc_feature (1)..(208): Homolog of NCBI NO: 15236275 NR Description: putative component of cytochrome B6-F complex
  misc_feature (1)..(208): Homolog of NCBI NO: 9843639 NR Description: Rieske FeS protein [Arabidopsis thaliana]
  misc_feature (1)..(208): Homolog of NCBI NO: 30679426 NR Description: Rieske FeS protein (component of cytochrome B6-F
  misc_feature (1)..(208): Homolog of NCBI NO: 401249 NR Description: Cytochrome B6-F complex iron-sulfur subunit 2,
  misc_feature (1)..(208): Homolog of NCBI NO: 401247 NR Description: Cytochrome B6-F complex iron-sulfur subunit 1,
  misc_feature (1)..(208): Homolog of NCBI NO: 19999 NR Description: Rieske Fe/S protein of cytochrome b6/f complex
  misc_feature (1)..(208): Homolog of NCBI NO: 136712 NR Description: Cytochrome B6-F complex iron-sulfur subunit,
  misc_feature (1)..(208): Homolog of NCBI NO: 2921504 NR Description: cytochrome B6-F complex iron-sulfur subunit
  misc_feature (1)..(208): Homolog of NCBI NO: 401247 NR Description: Cytochrome B6-F complex iron-sulfur subunit 1,
  misc_feature (1)..(208): Homolog of NCBI NO: 401249 NR Description: Cytochrome B6-F complex iron-sulfur subunit 2,
  misc_feature (1)..(208): Homolog of NCBI NO: 30679426 NR Description: Rieske FeS protein (component of cytochrome B6-F
  misc_feature (1)..(208): Homolog of NCBI NO: 9843639 NR Description: Rieske FeS protein [Arabidopsis thaliana]
  misc_feature (1)..(208): Homolog of NCBI NO: 15236275 NR Description: putative component of cytochrome B6-F complex

SEQ ID NO: 49624 - DNA, 1425 bp, Arabidopsis thaliana
  misc_feature (1)..(1425): Ceres Seq. ID no. 12602340
  misc_feature: MA Experiment ID: 20000171 Result: Up-regulated in Transcription
  misc_feature: MA Experiment 20000171 PARAMETER Experiment Name: At_42deg_Heat_P Parameter: Age (day) Value: 14
  misc_feature: MA Experiment 20000171 PARAMETER Experiment Name: At_42deg_Heat_P Parameter: Organism Value: A. thaliana
  misc_feature: MA Experiment 20000171 PARAMETER Experiment Name: At_42deg_Heat_P Parameter: Plant Line Value: WS
  misc_feature: MA Experiment 20000171 PARAMETER Experiment Name: At_42deg_Heat_P Parameter: Temperature (deg C) Value: 42 vs. 22
  misc_feature: MA Experiment 20000171 PARAMETER Experiment Name: At_42deg_Heat_P Parameter: Timepoint (hr) Value: 1
  misc_feature: MA Experiment 20000171 PARAMETER Experiment Name: At_42deg_Heat_P Parameter: Tissue Value: Aerial
  misc_feature: MA Experiment ID: 20000173 Result: Up-regulated in Transcription
  misc_feature: MA Experiment 20000173 PARAMETER Experiment Name: At_42deg_Heat_P Parameter: Age (day) Value: 14
  misc_feature: MA Experiment 20000173 PARAMETER Experiment Name: At_42deg_Heat_P Parameter: Organism Value: A. thaliana
  misc_feature: MA Experiment 20000173 PARAMETER Experiment Name: At_42deg_Heat_P Parameter: Plant Line Value: WS
  misc_feature: MA Experiment 20000173 PARAMETER Experiment Name: At_42deg_Heat_P Parameter: Temperature (deg C) Value: 42 vs. 22
  misc_feature: MA Experiment 20000173 PARAMETER Experiment Name: At_42deg_Heat_P Parameter: Timepoint (hr) Value: 6
  misc_feature: MA Experiment 20000173 PARAMETER Experiment Name: At_42deg_Heat_P Parameter: Tissue Value: Aerial
  misc_feature: MA Experiment ID: 20000182 Result: Up-regulated in Transcription
  misc_feature: MA Experiment 20000182 PARAMETER Experiment Name: At_2mM_SA_P Parameter: Age (day) Value: 14
  misc_feature: MA Experiment 20000182 PARAMETER Experiment Name: At_2mM_SA_P Parameter: Organism Value: A. thaliana
  misc_feature: MA Experiment 20000182 PARAMETER Experiment Name: At_2mM_SA_P Parameter: Plant Line Value: WS
  misc_feature: MA Experiment 20000182 PARAMETER Experiment Name: At_2mM_SA_P Parameter: Timepoint (hr) Value: 6
  misc_feature: MA Experiment 20000182 PARAMETER Experiment Name: At_2mM_SA_P Parameter: Tissue Value: Aerial
  misc_feature: MA Experiment 20000182 PARAMETER Experiment Name: At_2mM_SA_P Parameter: Treatment Value: 2mM SA vs. No Treatment
  misc_feature: MA Experiment ID: 20000495 Result: Down-regulated in Transcription
  misc_feature: MA Experiment 20000495 PARAMETER Experiment Name: At_Guard_Cells_P Parameter: Harvest Date Value: 8/2/2002
  misc_feature: MA Experiment 20000495 PARAMETER Experiment Name: At_Guard_Cells_P Parameter: Organism Value: A. thaliana
  misc_feature: MA Experiment 20000495 PARAMETER Experiment Name: At_Guard_Cells_P Parameter: Tissue Value: Guard Cells vs. Leaves
agggaagaggcaagatggcaaagctgtgatttaaaacaccgtcacctccccgtcaacggagacaaacaaagatcgtgttttctcgaaccttccacgagatatactaagccaaagaagaagaagagacctgagacgaacaagaaatccagaaattaccaattccttttttttgtttaatcgaattcaggaaaagtgaagaaacgaaagagagaagacaaagaagaagaaggtgagatgggagttgattattacaaggttttacaggttgatagaagcgctaacgacgatgaccttaagaaagcttatagaaaactcgctatgaaatggcatcctgataagaaccctaacaacaaaaaagacgctgaggctaagttcaagcagatctctgaggcctacgatgttcttagcgatcctcaaaagagagctgtatatgatcaatacggtgaggaagggttaaaagggaatgtgccacctcccaatgctgctactagtggagcatcctacttctcaacaggagatggatcttcgtctttcagattcaacccgagaagtgcagatgatatattcgctgagtttttcgggttctcgaccccgtttggtggcggtggtggtggcactggagggcagagattcgctagccgcatgtttggtgatgatatgtatgcctcgtttggtgaaggagcaggtggaggaggagctatgcatcatcatcaccatcatcatcatcacgctgcagctaggaaagtggctcctatcgagaacaagttgccttgtagccttgaagatctctacaaaggaaccaccaagaagatgaagatctccagggagattgtagatgtcagcggtaaggcaatgcaagtggaagagattctaacgattggagtgaaacccgggtggaagaaaggcacaaagatcacattcccagagaaaggcaatgagcatccaggtgtgattccagcggatctagtcttcatcattgacgagaaaccccatccagtgtttacccgtgagggcaacgacctgattgtcacacagaaagtctcactagctgatgccttaacaggctacaccgcaaacatagcgacccttgatggccgtacacttacaatcccgatcacaaatgtgatccatccagagtatgaagaggtggttcctaaagagggaatgccactccagaaagatcagacaaagaaagggaacttaaggatcaagttcaatatcaagtttccagcgagattaactgcggaacagaaagctgggtttaagaagcttattgggtgatgattaaagcatctctgtcttgtgatgtgtggagattgggataaatttggtaatatacaatttatagggaattatctccctcttcattaaatttcgtgttgttaaacaagtcttctttttaaagaatagttttttcaagatttg

SEQ ID NO: 49625 - protein, 348 aa, Arabidopsis thaliana
  peptide (1)..(348): Ceres Seq. ID no. 12602341
  misc_feature (225)..(347): Pfam Name: DnaJ C terminal region Pfam Description: DnaJ C terminal region
  misc_feature (132)..(348): Homolog of NCBI NO: 15218901 NR Description: chaperone, putative; protein id: At1g59725.1
  misc_feature (1)..(348): Homolog of NCBI NO: 21593202 NR Description: putative heat-shock protein [Arabidopsis thaliana]
  misc_feature (1)..(348): Homolog of NCBI NO: 15218515 NR Description: putative heat-shock protein
  misc_feature (1)..(347): Homolog of NCBI NO: 15239455 NR Description: heat-shock protein - like; protein id:
  misc_feature (1)..(348): Homolog of NCBI NO: 34904486 NR Description: putative heat shock protein 40
  misc_feature (1)..(347): Homolog of NCBI NO: 15240968 NR Description: heat shock protein 40-like
  misc_feature (1)..(348): Homolog of NCBI NO: 11863723 NR Description: DnaJ like protein [Lycopersicon esculentum]
  misc_feature (1)..(348): Homolog of NCBI NO: 6179940 NR Description: DnaJ-like protein [Nicotiana tabacum]
  misc_feature (1)..(348): Homolog of NCBI NO: 15225377 NR Description: putative heat shock protein
  misc_feature (1)..(348): Homolog of NCBI NO: 15235310 NR Description: heat-shock protein
MGVDYYKVLQVDRSANDDDLKKAYRKLAMKWHPDKNPNNKKDAEAKFKQISEAYDVLSDPQKRAVYDQYGEEGLKGNVPPPNAATSGASYFSTGDGSSSFRFNPRSADDIFAEFFGFSTPFGGGGGGTGGQRFASRMFGDDMYASFGEGAGGGGAMHHHHHHHHHAAARKVAPIENKLPCSLEDLYKGTTKKMKISREIVDVSGKAMQVEEILTIGVKPGWKKGTKITFPEKGNEHPGVIPADLVFIIDEKPHPVFTREGNDLIVTQKVSLADALTGYTANIATLDGRTLTIPITNVIHPEYEEVVPKEGMPLQKDQTKKGNLRIKFNIKFPARLTAEQKAGFKKLIG

SEQ ID NO: 49626 - protein, 320 aa, Arabidopsis thaliana
  peptide (1)..(320): Ceres Seq. ID no. 12602342
  misc_feature (197)..(319): Pfam Name: DnaJ C terminal region Pfam Description: DnaJ C terminal region
  misc_feature (104)..(320): Homolog of NCBI NO: 15218901 NR Description: chaperone, putative; protein id: At1g59725.1
  misc_feature (1)..(320): Homolog of NCBI NO: 21593202 NR Description: putative heat-shock protein [Arabidopsis thaliana]
  misc_feature (1)..(320): Homolog of NCBI NO: 15218515 NR Description: putative heat-shock protein
  misc_feature (1)..(319): Homolog of NCBI NO: 15239455 NR Description: heat-shock protein - like; protein id:
  misc_feature (1)..(320): Homolog of NCBI NO: 34904486 NR Description: putative heat shock protein 40
  misc_feature (1)..(319): Homolog of NCBI NO: 15240968 NR Description: heat shock protein 40-like
  misc_feature (1)..(320): Homolog of NCBI NO: 11863723 NR Description: DnaJ like protein [Lycopersicon esculentum]
  misc_feature (1)..(320): Homolog of NCBI NO: 6179940 NR Description: DnaJ-like protein [Nicotiana tabacum]
  misc_feature (1)..(320): Homolog of NCBI NO: 15225377 NR Description: putative heat shock protein
  misc_feature (1)..(320): Homolog of NCBI NO: 15235310 NR Description: heat-shock protein
MKWHPDKNPNNKKDAEAKFKQISEAYDVLSDPQKRAVYDQYGEEGLKGNVPPPNAATSGASYFSTGDGSSSFRFNPRSADDIFAEFFGFSTPFGGGGGGTGGQRFASRMFGDDMYASFGEGAGGGGAMHHHHHHHHHAAARKVAPIENKLPCSLEDLYKGTTKKMKISREIVDVSGKAMQVEEILTIGVKPGWKKGTKITFPEKGNEHPGVIPADLVFIIDEKPHPVFTREGNDLIVTQKVSLADALTGYTANIATLDGRTLTIPITNVIHPEYEEVVPKEGMPLQKDQTKKGNLRIKFNIKFPARLTAEQKAGFKKLIG

SEQ ID NO: 49627 - protein, 212 aa, Arabidopsis thaliana
  peptide (1)..(212): Ceres Seq. ID no. 12602343
  misc_feature (89)..(211): Pfam Name: DnaJ C terminal region Pfam Description: DnaJ C terminal region
  misc_feature (1)..(212): Homolog of NCBI NO: 15218901 NR Description: chaperone, putative; protein id: At1g59725.1
  misc_feature (1)..(212): Homolog of NCBI NO: 21593202 NR Description: putative heat-shock protein [Arabidopsis thaliana]
  misc_feature (1)..(212): Homolog of NCBI NO: 15218515 NR Description: putative heat-shock protein
  misc_feature (1)..(211): Homolog of NCBI NO: 15239455 NR Description: heat-shock protein - like; protein id:
  misc_feature (1)..(212): Homolog of NCBI NO: 34904486 NR Description: putative heat shock protein 40
  misc_feature (1)..(211): Homolog of NCBI NO: 15240968 NR Description: heat shock protein 40-like
  misc_feature (1)..(212): Homolog of NCBI NO: 11863723 NR Description: DnaJ like protein [Lycopersicon esculentum]
  misc_feature (1)..(212): Homolog of NCBI NO: 6179940 NR Description: DnaJ-like protein [Nicotiana tabacum]
  misc_feature (1)..(212): Homolog of NCBI NO: 15225377 NR Description: putative heat shock protein
  misc_feature (1)..(212): Homolog of NCBI NO: 15235310 NR Description: heat-shock protein
MFGDDMYASFGEGAGGGGAMHHHHHHHHHAAARKVAPIENKLPCSLEDLYKGTTKKMKISREIVDVSGKAMQVEEILTIGVKPGWKKGTKITFPEKGNEHPGVIPADLVFIIDEKPHPVFTREGNDLIVTQKVSLADALTGYTANIATLDGRTLTIPITNVIHPEYEEVVPKEGMPLQKDQTKKGNLRIKFNIKFPARLTAEQKAGFKKLIG

SEQ ID NO: 49628 - DNA, 2425 bp, Arabidopsis thaliana; identical to SEQ ID NO: 42027
  misc_feature (1)..(2425): Ceres Seq. ID no. 13488766
  misc_feature: MA Experiment ID: 108501 Result: Up-regulated in Transcription
  misc_feature: MA Experiment 108501 PARAMETER Experiment Name: At_ap2_floral_buds_cDNA_P Parameter: Plant Line Value: ap2 (Ler.)
  misc_feature: MA Experiment 108501 PARAMETER Experiment Name: At_ap2_floral_buds_cDNA_P Parameter: Tissue Value: Closed Flower
  misc_feature: MA Experiment ID: 108595 Result: Up-regulated in Transcription
  misc_feature: MA Experiment 108595 PARAMETER Experiment Name: At_Ler-pi_Ovule_cDNA_P Parameter: Plant Line Value: null
  misc_feature: MA Experiment ID: 20000184 Result: Down-regulated in Transcription
  misc_feature: MA Experiment 20000184 PARAMETER Experiment Name: At_Shoots__P Parameter: Age (day) Value: 7
  misc_feature: MA Experiment 20000184 PARAMETER Experiment Name: At_Shoots__P Parameter: Tissue Value: Shoots vs. Whole Plant
  misc_feature: MA Experiment ID: 20000185 Result: Down-regulated in Transcription
  misc_feature: MA Experiment 20000185 PARAMETER Experiment Name: At_Roots__P Parameter: Age (day) Value: 7 vs. 21
  misc_feature: MA Experiment 20000185 PARAMETER Experiment Name: At_Roots__P Parameter: Organism Value: A. thaliana
  misc_feature: MA Experiment 20000185 PARAMETER Experiment Name: At_Roots__P Parameter: Tissue Value: Roots vs. Whole Plant
  misc_feature: MA Experiment ID: 20000234 Result: Up-regulated in Transcription
  misc_feature: MA Experiment 20000234 PARAMETER Experiment Name: At_Siliques_P Parameter: Age (day) Value: 21
  misc_feature: MA Experiment 20000234 PARAMETER Experiment Name: At_Siliques_P Parameter: Organism Value: A. thaliana
  misc_feature: MA Experiment 20000234 PARAMETER Experiment Name: At_Siliques_P Parameter: Plant Line Value: WS
  misc_feature: MA Experiment 20000234 PARAMETER Experiment Name: At_Siliques_P Parameter: Tissue Value: Less Than 5mm Siliques vs. Whole Plant
  misc_feature: MA Experiment ID: 20000264 Result: Up-regulated in Transcription
  misc_feature: MA Experiment 20000264 PARAMETER Experiment Name: At_Open_Flower_P Parameter: Age (day) Value: 21
  misc_feature: MA Experiment 20000264 PARAMETER Experiment Name: At_Open_Flower_P Parameter: Plant Line Value: WS
  misc_feature: MA Experiment 20000264 PARAMETER Experiment Name: At_Open_Flower_P Parameter: Tissue Value: Open Flower vs. Whole Plant
  misc_feature: MA Experiment ID: 20000265 Result: Up-regulated in Transcription
  misc_feature: MA Experiment 20000265 PARAMETER Experiment Name: At_Open_Flower_P Parameter: Age (day) Value: 21
  misc_feature: MA Experiment 20000265 PARAMETER Experiment Name: At_Open_Flower_P Parameter: Plant Line Value: WS
  misc_feature: MA Experiment 20000265 PARAMETER Experiment Name: At_Open_Flower_P Parameter: Tissue Value: Closed Flower vs. Whole Plant
  misc_feature: MA Experiment ID: 20000286 Result: Up-regulated in Transcription
  misc_feature: MA Experiment 20000286 PARAMETER Experiment Name: At_Open_Flower_P Parameter: Age (day) Value: 21
  misc_feature: MA Experiment 20000286 PARAMETER Experiment Name: At_Open_Flower_P Parameter: Plant Line Value: WS
  misc_feature: MA Experiment 20000286 PARAMETER Experiment Name: At_Open_Flower_P Parameter: Tissue Value: Half Open vs. Whole Plant
  misc_feature: MA Experiment ID: 20000438 Result: Down-regulated in Transcription
  misc_feature: MA Experiment 20000438 PARAMETER Experiment Name: At_Shoots__P Parameter: Age (day) Value: 14
  misc_feature: MA Experiment 20000438 PARAMETER Experiment Name: At_Shoots__P Parameter: Tissue Value: Shoots vs. Whole Plant
  misc_feature: MA Experiment ID: 20000495 Result: Up-regulated in Transcription
  misc_feature: MA Experiment 20000495 PARAMETER Experiment Name: At_Guard_Cells_P Parameter: Harvest Date Value: 8/2/2002
  misc_feature: MA Experiment 20000495 PARAMETER Experiment Name: At_Guard_Cells_P Parameter: Organism Value: A. thaliana
  misc_feature: MA Experiment 20000495 PARAMETER Experiment Name: At_Guard_Cells_P Parameter: Tissue Value: Guard Cells vs. Leaves

SEQ ID NO: 49629 - protein, 785 aa, Arabidopsis thaliana; identical to SEQ ID NO: 42028
  peptide (1)..(785): Ceres Seq. ID no. 13488767
  misc_feature (416)..(646): Pfam Name: Glycosyl hydrolase family 3 C terminal domain Pfam Description: Glycosyl hydrolase family 3 C terminal domain
  misc_feature (416)..(646): Pfam Name: Glycosyl hydrolase family 3 C terminal domain Pfam Description: Glycosyl hydrolase family 3 C terminal domain
  misc_feature (13)..(782): Homolog of NCBI NO: 18025342 NR Description: beta-D-xylosidase [Hordeum vulgare]
  misc_feature (17)..(211): Homolog of NCBI NO: 15238197 NR Description: glycosyl hydrolase family 3 [Arabidopsis
  misc_feature (213)..(783): Homolog of NCBI NO: 15238197 NR Description: glycosyl hydrolase family 3 [Arabidopsis
  misc_feature (28)..(783): Homolog of NCBI NO: 25518461 NR Description: hypothetical protein T14P4.8 - Arabidopsis
  misc_feature (28)..(783): Homolog of NCBI NO: 18378991 NR Description: glycosyl hydrolase family 3 [Arabidopsis
  misc_feature (13)..(782): Homolog of NCBI NO: 18025342 NR Description: beta-D-xylosidase [Hordeum vulgare]
  misc_feature (213)..(783): Homolog of NCBI NO: 15238197 NR Description: glycosyl hydrolase family 3 [Arabidopsis
  misc_feature (28)..(783): Homolog of NCBI NO: 18378991 NR Description: glycosyl hydrolase family 3 [Arabidopsis
  misc_feature (43)..(785): Homolog of NCBI NO: 18025340 NR Description: alpha-L-arabinofuranosidase/beta-D-xylosidase
  misc_feature (27)..(785): Homolog of NCBI NO: 32481073 NR Description: auxin-induced beta-glucosidase [Chenopodium
  misc_feature (13)..(781): Homolog of NCBI NO: 15239867 NR Description: glycosyl hydrolase family 3 [Arabidopsis
  misc_feature (26)..(783): Homolog of NCBI NO: 15230897 NR Description: glycosyl hydrolase family 3 [Arabidopsis thaliana]
  misc_feature (26)..(783): Homolog of NCBI NO: 25453520 NR Description: beta-1,4-xylosidase [imported] - Arabidopsis
  misc_feature (28)..(783): Homolog of NCBI NO: 25518461 NR Description: hypothetical protein T14P4.8 - Arabidopsis
  misc_feature (17)..(211): Homolog of NCBI NO: 15238197 NR Description: glycosyl hydrolase family 3 [Arabidopsis
  misc_feature (26)..(783): Homolog of NCBI NO: 25453520 NR Description: beta-1,4-xylosidase [imported] - Arabidopsis
  misc_feature (26)..(783): Homolog of NCBI NO: 15230897 NR Description: glycosyl hydrolase family 3 [Arabidopsis thaliana]
  misc_feature (13)..(781): Homolog of NCBI NO: 15239867 NR Description: glycosyl hydrolase family 3 [Arabidopsis
  misc_feature (27)..(785): Homolog of NCBI NO: 32481073 NR Description: auxin-induced beta-glucosidase [Chenopodium
  misc_feature (43)..(785): Homolog of NCBI NO: 18025340 NR Description: alpha-L-arabinofuranosidase/beta-D-xylosidase

SEQ ID NO: 49630 - protein, 773 aa, Arabidopsis thaliana; identical to SEQ ID NO: 42029
  peptide (1)..(773): Ceres Seq. ID no. 13488768
  misc_feature (404)..(634): Pfam Name: Glycosyl hydrolase family 3 C terminal domain Pfam Description: Glycosyl hydrolase family 3 C terminal domain
  misc_feature (404)..(634): Pfam Name: Glycosyl hydrolase family 3 C terminal domain Pfam Description: Glycosyl hydrolase family 3 C terminal domain
  misc_feature (1)..(770): Homolog of NCBI NO: 18025342 NR Description: beta-D-xylosidase [Hordeum vulgare]
  misc_feature (5)..(199): Homolog of NCBI NO: 15238197 NR Description: glycosyl hydrolase family 3 [Arabidopsis
  misc_feature (201)..(771): Homolog of NCBI NO: 15238197 NR Description: glycosyl hydrolase family 3 [Arabidopsis
  misc_feature (16)..(771): Homolog of NCBI NO: 25518461 NR Description: hypothetical protein T14P4.8 - Arabidopsis
  misc_feature (16)..(771): Homolog of NCBI NO: 18378991 NR Description: glycosyl hydrolase family 3 [Arabidopsis
  misc_feature (1)..(770): Homolog of NCBI NO: 18025342 NR Description: beta-D-xylosidase [Hordeum vulgare]
  misc_feature (201)..(771): Homolog of NCBI NO: 15238197 NR Description: glycosyl hydrolase family 3 [Arabidopsis
  misc_feature (16)..(771): Homolog of NCBI NO: 18378991 NR Description: glycosyl hydrolase family 3 [Arabidopsis
  misc_feature (31)..(773): Homolog of NCBI NO: 18025340 NR Description: alpha-L-arabinofuranosidase/beta-D-xylosidase
  misc_feature (15)..(773): Homolog of NCBI NO: 32481073 NR Description: auxin-induced beta-glucosidase [Chenopodium
  misc_feature (1)..(769): Homolog of NCBI NO: 15239867 NR Description: glycosyl hydrolase family 3 [Arabidopsis
  misc_feature (14)..(771): Homolog of NCBI NO: 15230897 NR Description: glycosyl hydrolase family 3 [Arabidopsis thaliana]
  misc_feature (14)..(771): Homolog of NCBI NO: 25453520 NR Description: beta-1,4-xylosidase [imported] - Arabidopsis
  misc_feature (16)..(771): Homolog of NCBI NO: 25518461 NR Description: hypothetical protein T14P4.8 - Arabidopsis
  misc_feature (5)..(199): Homolog of NCBI NO: 15238197 NR Description: glycosyl hydrolase family 3 [Arabidopsis
  misc_feature (14)..(771): Homolog of NCBI NO: 25453520 NR Description: beta-1,4-xylosidase [imported] - Arabidopsis
  misc_feature (14)..(771): Homolog of NCBI NO: 15230897 NR Description: glycosyl hydrolase family 3 [Arabidopsis thaliana]
  misc_feature (1)..(769): Homolog of NCBI NO: 15239867 NR Description: glycosyl hydrolase family 3 [Arabidopsis
  misc_feature (15)..(773): Homolog of NCBI NO: 32481073 NR Description: auxin-induced beta-glucosidase [Chenopodium
  misc_feature (31)..(773): Homolog of NCBI NO: 18025340 NR Description: alpha-L-arabinofuranosidase/beta-D-xylosidase

SEQ ID NO: 49631 - protein, 625 aa, Arabidopsis thaliana; identical to SEQ ID NO: 42030
  peptide (1)..(625): Ceres Seq. ID no. 13488769
  misc_feature (256)..(486): Pfam Name: Glycosyl hydrolase family 3 C terminal domain Pfam Description: Glycosyl hydrolase family 3 C terminal domain
  misc_feature (256)..(486): Pfam Name: Glycosyl hydrolase family 3 C terminal domain Pfam Description: Glycosyl hydrolase family 3 C terminal domain
  misc_feature (1)..(622): Homolog of NCBI NO: 18025342 NR Description: beta-D-xylosidase [Hordeum vulgare]
  misc_feature (1)..(51): Homolog of NCBI NO: 15238197 NR Description: glycosyl hydrolase family 3 [Arabidopsis
  misc_feature (53)..(623): Homolog of NCBI NO: 15238197 NR Description: glycosyl hydrolase family 3 [Arabidopsis
  misc_feature (1)..(623): Homolog of NCBI NO: 25518461 NR Description: hypothetical protein T14P4.8 - Arabidopsis
  misc_feature (1)..(623): Homolog of NCBI NO: 18378991 NR Description: glycosyl hydrolase family 3 [Arabidopsis
  misc_feature (1)..(622): Homolog of NCBI NO: 18025342 NR Description: beta-D-xylosidase [Hordeum vulgare]
  misc_feature (53)..(623): Homolog of NCBI NO: 15238197 NR Description: glycosyl hydrolase family 3 [Arabidopsis
  misc_feature (1)..(623): Homolog of NCBI NO: 18378991 NR Description: glycosyl hydrolase family 3 [Arabidopsis
  misc_feature (1)..(625): Homolog of NCBI NO: 18025340 NR Description: alpha-L-arabinofuranosidase/beta-D-xylosidase
  misc_feature (1)..(625): Homolog of NCBI NO: 32481073 NR Description: auxin-induced beta-glucosidase [Chenopodium
  misc_feature (1)..(621): Homolog of NCBI NO: 15239867 NR Description: glycosyl hydrolase family 3 [Arabidopsis
  misc_feature (1)..(623): Homolog of NCBI NO: 15230897 NR Description: glycosyl hydrolase family 3 [Arabidopsis thaliana]
  misc_feature (1)..(623): Homolog of NCBI NO: 25453520 NR Description: beta-1,4-xylosidase [imported] - Arabidopsis
  misc_feature (1)..(623): Homolog of NCBI NO: 25518461 NR Description: hypothetical protein T14P4.8 - Arabidopsis
  misc_feature (1)..(51): Homolog of NCBI NO: 15238197 NR Description: glycosyl hydrolase family 3 [Arabidopsis
  misc_feature (1)..(623): Homolog of NCBI NO: 25453520 NR Description: beta-1,4-xylosidase [imported] - Arabidopsis
  misc_feature (1)..(623): Homolog of NCBI NO: 15230897 NR Description: glycosyl hydrolase family 3 [Arabidopsis thaliana]
  misc_feature (1)..(621): Homolog of NCBI NO: 15239867 NR Description: glycosyl hydrolase family 3 [Arabidopsis
  misc_feature (1)..(625): Homolog of NCBI NO: 32481073 NR Description: auxin-induced beta-glucosidase [Chenopodium
  misc_feature (1)..(625): Homolog of NCBI NO: 18025340 NR Description: alpha-L-arabinofuranosidase/beta-D-xylosidase

SEQ ID NO: 49632 - DNA, 1557 bp, Arabidopsis thaliana
  misc_feature (1)..(1557): Ceres Seq. ID no. 12592218
  misc_feature: MA Experiment ID: 20000171 Result: Up-regulated in Transcription
  misc_feature: MA Experiment 20000171 PARAMETER Experiment Name: At_42deg_Heat_P Parameter: Age (day) Value: 14
  misc_feature: MA Experiment 20000171 PARAMETER Experiment Name: At_42deg_Heat_P Parameter: Organism Value: A. thaliana
  misc_feature: MA Experiment 20000171 PARAMETER Experiment Name: At_42deg_Heat_P Parameter: Plant Line Value: WS
  misc_feature: MA Experiment 20000171 PARAMETER Experiment Name: At_42deg_Heat_P Parameter: Temperature (deg C) Value: 42 vs. 22
  misc_feature: MA Experiment 20000171 PARAMETER Experiment Name: At_42deg_Heat_P Parameter: Timepoint (hr) Value: 1
  misc_feature: MA Experiment 20000171 PARAMETER Experiment Name: At_42deg_Heat_P Parameter: Tissue Value: Aerial
  misc_feature: MA Experiment ID: 20000173 Result: Up-regulated in Transcription
  misc_feature: MA Experiment 20000173 PARAMETER Experiment Name: At_42deg_Heat_P Parameter: Age (day) Value: 14
  misc_feature: MA Experiment 20000173 PARAMETER Experiment Name: At_42deg_Heat_P Parameter: Organism Value: A. thaliana
  misc_feature: MA Experiment 20000173 PARAMETER Experiment Name: At_42deg_Heat_P Parameter: Plant Line Value: WS
  misc_feature: MA Experiment 20000173 PARAMETER Experiment Name: At_42deg_Heat_P Parameter: Temperature (deg C) Value: 42 vs. 22
  misc_feature: MA Experiment 20000173 PARAMETER Experiment Name: At_42deg_Heat_P Parameter: Timepoint (hr) Value: 6
  misc_feature: MA Experiment 20000173 PARAMETER Experiment Name: At_42deg_Heat_P Parameter: Tissue Value: Aerial
  misc_feature: MA Experiment ID: 20000184 Result: Down-regulated in Transcription
  misc_feature: MA Experiment 20000184 PARAMETER Experiment Name: At_Shoots__P Parameter: Age (day) Value: 7
  misc_feature: MA Experiment 20000184 PARAMETER Experiment Name: At_Shoots__P Parameter: Tissue Value: Shoots vs. Whole Plant
  misc_feature: MA Experiment ID: 20000227 Result: Up-regulated in Transcription
  misc_feature: MA Experiment 20000227 PARAMETER Experiment Name: At_Root-Tips-vs-Tops_P Parameter: Tissue Value: Root Tips vs. Root Tops
  misc_feature: MA Experiment ID: 20000495 Result: Up-regulated in Transcription
  misc_feature: MA Experiment 20000495 PARAMETER Experiment Name: At_Guard_Cells_P Parameter: Harvest Date Value: 8/2/2002
  misc_feature: MA Experiment 20000495 PARAMETER Experiment Name: At_Guard_Cells_P Parameter: Organism Value: A. thaliana
  misc_feature: MA Experiment 20000495 PARAMETER Experiment Name: At_Guard_Cells_P Parameter: Tissue Value: Guard Cells vs. Leaves
  misc_feature: MA Experiment ID: 20001558 Result: Up-regulated in Transcription
  misc_feature: MA Experiment 20001558 PARAMETER Experiment Name: At_Drought_Soil_Dry_P Parameter: Age (day) Value: 27
  misc_feature: MA Experiment 20001558 PARAMETER Experiment Name: At_Drought_Soil_Dry_P Parameter: Organism Value: A. thaliana
  misc_feature: MA Experiment 20001558 PARAMETER Experiment Name: At_Drought_Soil_Dry_P Parameter: Plant Line Value: WS
  misc_feature: MA Experiment 20001558 PARAMETER Experiment Name: At_Drought_Soil_Dry_P Parameter: Post Timepoint (hr) Value: 6
  misc_feature: MA Experiment 20001558 PARAMETER Experiment Name: At_Drought_Soil_Dry_P Parameter: Post-Treatment Value: Re-Water vs. No Drought
  misc_feature: MA Experiment 20001558 PARAMETER Experiment Name: At_Drought_Soil_Dry_P Parameter: Timepoint (day) Value: 13
  misc_feature: MA Experiment 20001558 PARAMETER Experiment Name: At_Drought_Soil_Dry_P Parameter: Treatment Value: Drought vs. No Drought
  misc_feature: MA Experiment ID: 20001560 Result: Up-regulated in Transcription
  misc_feature: MA Experiment 20001560 PARAMETER Experiment Name: At_Drought_Soil_Dry_P Parameter: Age (day) Value: 28
  misc_feature: MA Experiment 20001560 PARAMETER Experiment Name: At_Drought_Soil_Dry_P Parameter: Organism Value: A. thaliana
  misc_feature: MA Experiment 20001560 PARAMETER Experiment Name: At_Drought_Soil_Dry_P Parameter: Plant Line Value: WS
  misc_feature: MA Experiment 20001560 PARAMETER Experiment Name: At_Drought_Soil_Dry_P Parameter: Post Timepoint (hr) Value: None
  misc_feature: MA Experiment 20001560 PARAMETER Experiment Name: At_Drought_Soil_Dry_P Parameter: Post-Treatment Value: None
  misc_feature: MA Experiment 20001560 PARAMETER Experiment Name: At_Drought_Soil_Dry_P Parameter: Timepoint (day) Value: 14
  misc_feature: MA Experiment 20001560 PARAMETER Experiment Name: At_Drought_Soil_Dry_P Parameter: Treatment Value: Drought vs. No Drought
acaattttacagaagaaagtgaaaagaaagagagaaaggggaagaagaaaaatgtataaatcaccattaacgttgctcacacttcttactatttgttttggattcttcgatctcagcagtgctctttatgaatcttcgtcacctgtggttcagctcactgcttctaactttaagtccaaggttcttaattcaaatggagttgttttggtagagttctttgcaccatggtgtggtcattgcaaagctctaacacctacatgggagaaagtggctaatattctgaaaggagttgctactgtggctgcaattgatgcagatgctcatcagtctgccgcgcaggattatggtattaaaggtttcccaacaattaaggtttttgttcctggaaaggctccaatcgattaccaaggagcaagagatgccaaatccattgctaattttgcttataagcagatcaagggtcttttgagtgaccgtttggaaggcaaaagtaaaccaactggaggaggatctaaagaaaagaaatctgaacctagtgcatctgtggaactgaacgctagcaattttgatgatttggtcatcgaaagcaatgaactttggatcgttgagttttttgcaccttggtgtggacattgcaaaaagcttgccccggagtggaagagggctgcaaaaaatttgcagggaaaggtgaaattaggtcatgtcaattgtgatgttgagcagtcgataatgagcagattcaaagttcaaggattccctacaattttggtatttggtccagacaaaagtagtccatatccttacgagggtgctagatctgcttcagcgatagaatcttttgcttctgaacttgtggaatccagtgctggccctgttgaagtgactgaactaactggaccggatgtcatggaaaagaagtgtggttctgctgctatttgctttatctctttcttacctgacattcttgactccaaagctgaaggaaggaataagtacctcgagatgttattatcagttgcagagaagtttaagaagcagccttacagttttatgtgggtggcggctgtaactcaaatggatttggagaagcgagttaatgtaggaggatacggttatccagcaatggtagccatgaatgtgaagaaaggagtatatgctcctcttaaaagcgcctttgagcttcaacacctcttagaatttgtgaaagatgctggaaccggtggaaaaggaaatgtgccaatgaatggaacaccagagatcgtgaagacaaaggagtgggatggtaaagatggagagttgattgaggaagatgaattctcacttgatgagctcatgggaggtgatgatgctgttggttctaaggatgagttgtgaagaatccaaggggattttgctacttttgggatctgaaccgctgaatgtatttcacccttttttatttttgaaaagaaagtaagagcatttcaagagatagaacatgtacggattttgtattacgatagacacataacagagaatctatgctggagttatattagagttcattgctagtttttc

SEQ ID NO: 49633 - protein, 457 aa, Arabidopsis thaliana
  peptide (1)..(457): Ceres Seq. ID no. 12592219
  misc_feature (42)..(457): Homolog of NCBI NO: 1710248 NR Description: protein disulfide isomerase-related protein 5
  misc_feature (35)..(457): Homolog of NCBI NO: 34534342 NR Description: unnamed protein product [Homo sapiens]
  misc_feature (39)..(457): Homolog of NCBI NO: 28422183 NR Description: Similar to protein disulfide isomerase-related
  misc_feature (26)..(457): Homolog of NCBI NO: 28518289 NR Description: protein disulfide isomerase-related protein [Mus
  misc_feature (35)..(457): Homolog of NCBI NO: 2501206 NR Description: Protein disulfide isomerase A6 precursor (Protein
  misc_feature (26)..(457): Homolog of NCBI NO: 34867946 NR Description: similar to Protein disulfide isomerase A6 (Protein disulfide isomerase P5) (Calcium-binding protein 1)
  misc_feature (26)..(457): Homolog of NCBI NO: 13905146 NR Description: Similar to protein disulfide isomerase-related
  misc_feature (23)..(457): Homolog of NCBI NO: 5031973 NR Description: protein disulfide isomerase-related protein [Homo
  misc_feature (18)..(457): Homolog of NCBI NO: 22329339 NR Description: disulfide isomerase-related protein, putative
  misc_feature (18)..(457): Homolog of NCBI NO: 15225757 NR Description: putative protein disulfide isomerase
TILQKKVKRKRERGRRKMYKSPLTLLTLLTICFGFFDLSSALYESSSPVVQLTASNFKSKVLNSNGVVLVEFFAPWCGHCKALTPTWEKVANILKGVATVAAIDADAHQSAAQDYGIKGFPTIKVFVPGKAPIDYQGARDAKSIANFAYKQIKGLLSDRLEGKSKPTGGGSKEKKSEPSASVELNASNFDDLVIESNELWIVEFFAPWCGHCKKLAPEWKRAAKNLQGKVKLGHVNCDVEQSIMSRFKVQGFPTILVFGPDKSSPYPYEGARSASAIESFASELVESSAGPVEVTELTGPDVMEKKCGSAAICFISFLPDILDSKAEGRNKYLEMLLSVAEKFKKQPYSFMWVAAVTQMDLEKRVNVGGYGYPAMVAMNVKKGVYAPLKSAFELQHLLEFVKDAGTGGKGNVPMNGTPEIVKTKEWDGKDGELIEEDEFSLDELMGGDDAVGSKDEL

SEQ ID NO: 49634 - protein, 440 aa, Arabidopsis thaliana
  peptide (1)..(440): Ceres Seq. ID no. 12592220
  misc_feature (25)..(440): Homolog of NCBI NO: 1710248 NR Description: protein disulfide isomerase-related protein 5
  misc_feature (18)..(440): Homolog of NCBI NO: 34534342 NR Description: unnamed protein product [Homo sapiens]
  misc_feature (22)..(440): Homolog of NCBI NO: 28422183 NR Description: Similar to protein disulfide isomerase-related
  misc_feature (9)..(440): Homolog of NCBI NO: 28518289 NR Description: protein disulfide isomerase-related protein [Mus
  misc_feature (18)..(440): Homolog of NCBI NO: 2501206 NR Description: Protein disulfide isomerase A6 precursor (Protein
  misc_feature (9)..(440): Homolog of NCBI NO: 34867946 NR Description: similar to Protein disulfide isomerase A6 (Protein disulfide isomerase P5) (Calcium-binding protein 1)
  misc_feature (9)..(440): Homolog of NCBI NO: 13905146 NR Description: Similar to protein disulfide isomerase-related
  misc_feature (6)..(440): Homolog of NCBI NO: 5031973 NR Description: protein disulfide isomerase-related protein [Homo
  misc_feature (1)..(440): Homolog of NCBI NO: 22329339 NR Description: disulfide isomerase-related protein, putative
  misc_feature (1)..(440): Homolog of NCBI NO: 15225757 NR Description: putative protein disulfide isomerase
MYKSPLTLLTLLTICFGFFDLSSALYESSSPVVQLTASNFKSKVLNSNGVVLVEFFAPWCGHCKALTPTWEKVANILKGVATVAAIDADAHQSAAQDYGIKGFPTIKVFVPGKAPIDYQGARDAKSIANFAYKQIKGLLSDRLEGKSKPTGGGSKEKKSEPSASVELNASNFDDLVIESNELWIVEFFAPWCGHCKKLAPEWKRAAKNLQGKVKLGHVNCDVEQSIMSRFKVQGFPTILVFGPDKSSPYPYEGARSASAIESFASELVESSAGPVEVTELTGPDVMEKKCGSAAICFISFLPDILDSKAEGRNKYLEMLLSVAEKFKKQPYSFMWVAAVTQMDLEKRVNVGGYGYPAMVAMNVKKGVYAPLKSAFELQHLLEFVKDAGTGGKGNVPMNGTPEIVKTKEWDGKDGELIEEDEFSLDELMGGDDAVGSKDEL

SEQ ID NO: 49635 - DNA, 1966 bp, Arabidopsis thaliana
  misc_feature (1)..(1966): Ceres Seq. ID no. 12601878
  misc_feature: MA Experiment ID: 108595 Result: Up-regulated in Transcription
  misc_feature: MA Experiment 108595 PARAMETER Experiment Name: At_Ler-pi_Ovule_cDNA_P Parameter: Plant Line Value: null
  misc_feature: MA Experiment ID: 20000087 Result: Up-regulated in Transcription
  misc_feature: MA Experiment 20000087 PARAMETER Experiment Name: At_100uM_ABA_Mutants_cDNA_P Parameter: Plant Line Value: WS
  misc_feature: MA Experiment 20000087 PARAMETER Experiment Name: At_100uM_ABA_Mutants_cDNA_P Parameter: Timepoint (hr) Value: 6
  misc_feature: MA Experiment 20000087 PARAMETER Experiment Name: At_100uM_ABA_Mutants_cDNA_P Parameter: Tissue Value: Aerial
  misc_feature: MA Experiment 20000087 PARAMETER Experiment Name: At_100uM_ABA_Mutants_cDNA_P Parameter: Treatment Value: 100uM ABA vs. No Treatment
  misc_feature: MA Experiment ID: 20000185 Result: Up-regulated in Transcription
  misc_feature: MA Experiment 20000185 PARAMETER Experiment Name: At_Roots__P Parameter: Age (day) Value: 7 vs. 21
  misc_feature: MA Experiment 20000185 PARAMETER Experiment Name: At_Roots__P Parameter: Organism Value: A. thaliana
  misc_feature: MA Experiment 20000185 PARAMETER Experiment Name: At_Roots__P Parameter: Tissue Value: Roots vs. Whole Plant
  misc_feature: MA Experiment ID: 20000234 Result: Up-regulated in Transcription
  misc_feature: MA Experiment 20000234 PARAMETER Experiment Name: At_Siliques_P Parameter: Age (day) Value: 21
  misc_feature: MA Experiment 20000234 PARAMETER Experiment Name: At_Siliques_P Parameter: Organism Value: A. thaliana
  misc_feature: MA Experiment 20000234 PARAMETER Experiment Name: At_Siliques_P Parameter: Plant Line Value: WS
  misc_feature: MA Experiment 20000234 PARAMETER Experiment Name: At_Siliques_P Parameter: Tissue Value: Less Than 5mm Siliques vs. Whole Plant
  misc_feature: MA Experiment ID: 20000235 Result: Up-regulated in Transcription
  misc_feature: MA Experiment 20000235 PARAMETER Experiment Name: At_Siliques_P Parameter: Age (day) Value: 21
  misc_feature: MA Experiment 20000235 PARAMETER Experiment Name: At_Siliques_P Parameter: Organism Value: A. thaliana
  misc_feature: MA Experiment 20000235 PARAMETER Experiment Name: At_Siliques_P Parameter: Plant Line Value: WS
  misc_feature: MA Experiment 20000235 PARAMETER Experiment Name: At_Siliques_P Parameter: Tissue Value: 5-10mm Siliques vs. Whole Plant
  misc_feature: MA Experiment ID: 20000264 Result: Up-regulated in Transcription
  misc_feature: MA Experiment 20000264 PARAMETER Experiment Name: At_Open_Flower_P Parameter: Age (day) Value: 21
  misc_feature: MA Experiment 20000264 PARAMETER Experiment Name: At_Open_Flower_P Parameter: Plant Line Value: WS
  misc_feature: MA Experiment 20000264 PARAMETER Experiment Name: At_Open_Flower_P Parameter: Tissue Value: Open Flower vs. Whole Plant
  misc_feature: MA Experiment ID: 20000265 Result: Up-regulated in Transcription
  misc_feature: MA Experiment 20000265 PARAMETER Experiment Name: At_Open_Flower_P Parameter: Age (day) Value: 21
  misc_feature: MA Experiment 20000265 PARAMETER Experiment Name: At_Open_Flower_P Parameter: Plant Line Value: WS
  misc_feature: MA Experiment 20000265 PARAMETER Experiment Name: At_Open_Flower_P Parameter: Tissue Value: Closed Flower vs. Whole Plant
  misc_feature: MA Experiment ID: 20000286 Result: Up-regulated in Transcription
  misc_feature: MA Experiment 20000286 PARAMETER Experiment Name: At_Open_Flower_P Parameter: Age (day) Value: 21
  misc_feature: MA Experiment 20000286 PARAMETER Experiment Name: At_Open_Flower_P Parameter: Plant Line Value: WS
  misc_feature: MA Experiment 20000286 PARAMETER Experiment Name: At_Open_Flower_P Parameter: Tissue Value: Half Open vs. Whole Plant
  misc_feature: MA Experiment ID: 20000439 Result: Up-regulated in Transcription
  misc_feature: MA Experiment 20000439 PARAMETER Experiment Name: At_Roots__P Parameter: Age (day) Value: 14 vs. 21
  misc_feature: MA Experiment 20000439 PARAMETER Experiment Name: At_Roots__P Parameter: Organism Value: A. thaliana
  misc_feature: MA Experiment 20000439 PARAMETER Experiment Name: At_Roots__P Parameter: Tissue Value: Roots vs. Whole Plant
  misc_feature: MA Experiment ID: 20000495 Result: Up-regulated in Transcription
  misc_feature: MA Experiment 20000495 PARAMETER Experiment Name: At_Guard_Cells_P Parameter: Harvest Date Value: 8/2/2002
  misc_feature: MA Experiment 20000495 PARAMETER Experiment Name: At_Guard_Cells_P Parameter: Organism Value: A. thaliana
  misc_feature: MA Experiment 20000495 PARAMETER Experiment Name: At_Guard_Cells_P Parameter: Tissue Value: Guard Cells vs. Leaves
  misc_feature: MA Experiment ID: 20000794 Result: Up-regulated in Transcription
  misc_feature: MA Experiment 20000794 PARAMETER Experiment Name: At_Petals_P Parameter: Age (day) Value: 23-25 days
  misc_feature: MA Experiment 20000794 PARAMETER Experiment Name: At_Petals_P Parameter: Plant Line Value: WS
  misc_feature: MA Experiment 20000794 PARAMETER Experiment Name: At_Petals_P Parameter: Tissue Value: Petals vs. Whole plant
  misc_feature: MA Experiment ID: 20001757 Result: Down-regulated in Transcription
  misc_feature: MA Experiment 20001757 PARAMETER Experiment Name: At_50mM_NH4NO3_L-to-H_P Parameter: Timepoint (hr) Value: 6
  misc_feature: MA Experiment 20001757 PARAMETER Experiment Name: At_50mM_NH4NO3_L-to-H_P Parameter: Tissue Value: Leaf
  misc_feature: MA Experiment 20001757 PARAMETER Experiment Name: At_50mM_NH4NO3_L-to-H_P Parameter: Treatment Value: 50mM NH4NO3 vs 100mM Mannitol
ctcttcgtagtctttgaatcctaaagtaacaatctttcgtttcagagcacgtctgtaagatgacagaggacaacgatgaggctagggttcctctcagcgactcgtctacaacgaacgatgcttctcgaacgagacaaaggagaaagagaaagtgggataagccagcggagcaacttgttgcggctggagttgcgtttcctcagttacttcctttaggcaacactatgaatgttccttctatgtcaccattgccccaaacgctttcggtgcctctagcagttccaaaagttaatcaacctaaaatccaggatgaggtgatcatagcgcgagaaattgttatcaacgatgctgaggcttctcttaggcacaggcttaccaaacgctcaactcaagaagatattcagaggtctaccggtgctgtggtgattactaggggcaagtatcgtcctccaaatgcacctcctgatggtgaaaagccattatatcttcacatatctgccgctgcccagttgcagttaaaagagactacagaacgtatcttagcagttgatcgtgcagcagctatgattgaggagatgatgaaacagaaatcaatttcacagatcggatcagttggtttacagacggtcaagatgctgagcacatgcgtatatttgggtttcgaagctgacccatcatctaatgttgctgctcgtattcgtgggcctaatgagcaactgttgtattaagagggcgtggttcaggaagccttgagaatcaacatggagatgaagcacagctaccgctgcatctattattatccggcagcaacccaaagagcatcgacgatgcaaaacgtttagctgagaatcttatggatacaatcagtgtagaatttggggcttcaagggtttcctcaagcaaggtgtatggtgcagtaccaccaccacagcaactgatttctggagctccgggttctgaccaggagaaccaaaatttgatttcaacgtatggtttgatgacatcgatacccatcacagcaccaccatacgctgttagttcgtttccagttactccagcaacaagtctttatcctcagtttccagtaatgcaatctctaggaatatcaaatggtggcccctcgcagcccgtggctggaggaactagctatagtgggtatgctggaatataccctcaagccacaccattgcaacaagttgctcaagtccttaagcaatcaatttctcctgttatctctactgtgccccctactatgttgacagctacgtccttatcgatcccaagtgataatgcaagtaatgaaatggaaaggcgtccaccccggaagcgaaagtttcaggaacttccagctgattgtaaggttccagaaaaagacaaacagcaatcggagttagcaatgacaggtgatgttactccatcagcaaatagagtgcggtcgccgccttcaccaagatctgtaatgcctcctcctccaccaaagaccatcgcaccaccgccttctaagaccatgtctcctccatcatcaaaaagcatgcttcctccaccaccacgttctaagaccatgtctcctctatcatcaaaaagcatgcttcctccaccaccgcgatttacactgacaactcaacgttcaagattacaggacaaccacatcagtgtaaagaaaccaaatccagttccagatacgttaataaagctgatggaatatggagacgatgaagacgatgatgacgatcctgatgagccattgacaactagatcgtgacagtgtattagattacagaaccttcttatctggcaacaaaatgtcaatttgtgtttgtaacaatagaaagaaatgttggtctcttactgatttggaacttcattgcctaaggctattagttaaatatttaagacattagctacttgttttgcaaggcactgctcgttttgttgtatttcttatcattaatacataatggttaac

SEQ ID NO: 49636 - protein, 302 aa, Arabidopsis thaliana
  peptide (1)..(302): Ceres Seq. ID no. 12601879
  misc_feature (127)..(251): Pfam Name: Extensin-like region Pfam Description: Extensin-like region
  misc_feature (1)..(216): Homolog of NCBI NO: 13879294 NR Description: RIKEN cDNA 2810403A07 gene [Mus musculus]
  misc_feature (1)..(216): Homolog of NCBI NO: 31281048 NR Description: BLOM7 alpha [Homo sapiens]
  misc_feature (1)..(216): Homolog of NCBI NO: 40788982 NR Description: KIAA0907 protein [Homo sapiens]
  misc_feature (1)..(216): Homolog of NCBI NO: 7662372 NR Description: KIAA0907 protein [Homo sapiens]
  misc_feature (1)..(216): Homolog of NCBI NO: 34857952 NR Description: similar to RIKEN cDNA 2810403A07 [Rattus
  misc_feature (176)..(250): Homolog of NCBI NO: 32415249 NR Description: hypothetical protein [Neurospora crassa]
  misc_feature (176)..(302): Homolog of NCBI NO: 11994522 NR Description: gene_id:MUO10.13~unknown protein [Arabidopsis
  misc_feature (151)..(302): Homolog of NCBI NO: 21554687 NR Description: unknown [Arabidopsis thaliana]
  misc_feature (1)..(302): Homolog of NCBI NO: 22331412 NR Description: hypothetical protein
  misc_feature (1)..(176): Homolog of NCBI NO: 11994521 NR Description: gene_id:MUO10.12~unknown protein [Arabidopsis
MDTISVEFGASRVSSSKVYGAVPPPQQLISGAPGSDQENQNLISTYGLMTSIPITAPPYAVSSFPVTPATSLYPQFPVMQSLGISNGGPSQPVAGGTSYSGYAGIYPQATPLQQVAQVLKQSISPVISTVPPTMLTATSLSIPSDNASNEMERRPPRKRKFQELPADCKVPEKDKQQSELAMTGDVTPSANRVRSPPSPRSVMPPPPPKTIAPPPSKTMSPPSSKSMLPPPPRSKTMSPLSSKSMLPPPPRFTLTTQRSRLQDNHISVKKPNPVPDTLIKLMEYGDDEDDDDDPDEPLTTRS

SEQ ID NO: 49637 - protein, 254 aa, Arabidopsis thaliana
  peptide (1)..(254): Ceres Seq. ID no. 12601880
  misc_feature (79)..(203): Pfam Name: Extensin-like region Pfam Description: Extensin-like region
  misc_feature (1)..(168): Homolog of NCBI NO: 13879294 NR Description: RIKEN cDNA 2810403A07 gene [Mus musculus]
  misc_feature (1)..(168): Homolog of NCBI NO: 31281048 NR Description: BLOM7 alpha [Homo sapiens]
  misc_feature (1)..(168): Homolog of NCBI NO: 40788982 NR Description: KIAA0907 protein [Homo sapiens]
  misc_feature (1)..(168): Homolog of NCBI NO: 7662372 NR Description: KIAA0907 protein [Homo sapiens]
  misc_feature (1)..(168): Homolog of NCBI NO: 34857952 NR Description: similar to RIKEN cDNA 2810403A07 [Rattus
  misc_feature (128)..(202): Homolog of NCBI NO: 32415249 NR Description: hypothetical protein [Neurospora crassa]
  misc_feature (128)..(254): Homolog of NCBI NO: 11994522 NR Description: gene_id:MUO10.13~unknown protein [Arabidopsis
  misc_feature (103)..(254): Homolog of NCBI NO: 21554687 NR Description: unknown [Arabidopsis thaliana]
  misc_feature (1)..(254): Homolog of NCBI NO: 22331412 NR Description: hypothetical protein
  misc_feature (1)..(128): Homolog of NCBI NO: 11994521 NR Description: gene_id:MUO10.12~unknown protein [Arabidopsis
MTSIPITAPPYAVSSFPVTPATSLYPQFPVMQSLGISNGGPSQPVAGGTSYSGYAGIYPQATPLQQVAQVLKQSISPVISTVPPTMLTATSLSIPSDNASNEMERRPPRKRKFQELPADCKVPEKDKQQSELAMTGDVTPSANRVRSPPSPRSVMPPPPPKTIAPPPSKTMSPPSSKSMLPPPPRSKTMSPLSSKSMLPPPPRFTLTTQRSRLQDNHISVKKPNPVPDTLIKLMEYGDDEDDDDDPDEPLTTRS

SEQ ID NO: 49638 - protein, 224 aa, Arabidopsis thaliana
  peptide (1)..(224): Ceres Seq. ID no. 12601881
  misc_feature (49)..(173): Pfam Name: Extensin-like region Pfam Description: Extensin-like region
  misc_feature (1)..(138): Homolog of NCBI NO: 13879294 NR Description: RIKEN cDNA 2810403A07 gene [Mus musculus]
  misc_feature (1)..(138): Homolog of NCBI NO: 31281048 NR Description: BLOM7 alpha [Homo sapiens]
  misc_feature (1)..(138): Homolog of NCBI NO: 40788982 NR Description: KIAA0907 protein [Homo sapiens]
  misc_feature (1)..(138): Homolog of NCBI NO: 7662372 NR Description: KIAA0907 protein [Homo sapiens]
  misc_feature (1)..(138): Homolog of NCBI NO: 34857952 NR Description: similar to RIKEN cDNA 2810403A07 [Rattus
  misc_feature (98)..(172): Homolog of NCBI NO: 32415249 NR Description: hypothetical protein [Neurospora crassa]
  misc_feature (98)..(224): Homolog of NCBI NO: 11994522 NR Description: gene_id:MUO10.13~unknown protein [Arabidopsis
  misc_feature (73)..(224): Homolog of NCBI NO: 21554687 NR Description: unknown [Arabidopsis thaliana]
  misc_feature (1)..(224): Homolog of NCBI NO: 22331412 NR Description: hypothetical protein
  misc_feature (1)..(98): Homolog of NCBI NO: 11994521 NR Description: gene_id:MUO10.12~unknown protein [Arabidopsis
MQSLGISNGGPSQPVAGGTSYSGYAGIYPQATPLQQVAQVLKQSISPVISTVPPTMLTATSLSIPSDNASNEMERRPPRKRKFQELPADCKVPEKDKQQSELAMTGDVTPSANRVRSPPSPRSVMPPPPPKTIAPPPSKTMSPPSSKSMLPPPPRSKTMSPLSSKSMLPPPPRFTLTTQRSRLQDNHISVKKPNPVPDTLIKLMEYGDDEDDDDDPDEPLTTRS

SEQ ID NO: 49639 - DNA, 1538 bp, Arabidopsis thaliana
  misc_feature (1)..(1538): Ceres Seq. ID no. 13588804
  misc_feature: MA Experiment ID: 20000227 Result: Down-regulated in Transcription
  misc_feature: MA Experiment 20000227 PARAMETER Experiment Name: At_Root-Tips-vs-Tops_P Parameter: Tissue Value: Root Tips vs. Root Tops
  misc_feature: MA Experiment ID: 20000265 Result: Up-regulated in Transcription
  misc_feature: MA Experiment 20000265 PARAMETER Experiment Name: At_Open_Flower_P Parameter: Age (day) Value: 21
  misc_feature: MA Experiment 20000265 PARAMETER Experiment Name: At_Open_Flower_P Parameter: Plant Line Value: WS
  misc_feature: MA Experiment 20000265 PARAMETER Experiment Name: At_Open_Flower_P Parameter: Tissue Value: Closed Flower vs. Whole Plant
  misc_feature: MA Experiment ID: 20001451 Result: Down-regulated in Transcription
  misc_feature: MA Experiment 20001451 PARAMETER Experiment Name: At_Far-red-induction_P Parameter: Age (day) Value: 7
  misc_feature: MA Experiment 20001451 PARAMETER Experiment Name: At_Far-red-induction_P Parameter: Light Value: Far-red vs. White
  misc_feature: MA Experiment 20001451 PARAMETER Experiment Name: At_Far-red-induction_P Parameter: Organism Value: A. thaliana
  misc_feature: MA Experiment 20001451 PARAMETER Experiment Name: At_Far-red-induction_P Parameter: Plant Line Value: Columbia
  misc_feature: MA Experiment 20001451 PARAMETER Experiment Name: At_Far-red-induction_P Parameter: Timepoint (hr) Value: 24
  misc_feature: MA Experiment 20001451 PARAMETER Experiment Name: At_Far-red-induction_P Parameter: Tissue Value: Whole Plant
atgaagaagaagaagaaagaaagtgacacaaatcggactctccgttcatcgccggggagggatcaaatggataacattgtggactcattgaacaaagcttatgagaagtttgttcttgcttcagctggtgttcttgagtctaaagagagtgcaggtggacaaaaagctttgctcactgatactgcgttggagaatttcaaggagaaatgggaactgttccgtgtggcttgtgatcaagcagaggagtttgtggagtcagttaagcagagaattggatctgagtgtttagttgatgaggctactggtttaactactactgcagcaggtggccaagcaccagcagcggtgactggtgctgcgactagtctccctcccattagtgcagtaaggcttgaacagatgagtagagcggttcgatggcttgttcttgagctgcaacgtggctctggtgtagctcctggttctgttcattcatcctctaccggatatatggattcgaatcaatcgatgcggctcctcagtgcttggattggtcaaattggtgatcttggtcttaatttgctatggcgttttatacacattgttgtgagcttatggtacattgtctctggcatatttgaggcaatagaaagctatgccataacgttaggattgaataaaaagtacggttccatcgatcttgagaaactccggtgtctagctgttgtagtggacatcgaagcagctcaagatgttgccaatgttgttgagcttttgcaatggctaaccaccattggggttaaacaagttggtctatttgactctcaaggtttattgaagaaatccaaggatttgatccttgaaaccgttccaggttccatgttgttagaggagattgaaaaggatgttgcgcctgacggaaagcgcattgcattagaattcatttcatcttcagacaataaagaagctgttatgaaagcagccaacatacttcttcagagatacttgaaatccagccatcctgaggacgacaaaggggaagacttttttacagagtctcatttgaatgacgcattaagagttgttggtgagaatgtgcatgtacccgatctgttactggtttatggacctataaggagccacctcggtttccctgcttggagacttcgatacactgagatagtacatatgggaactttgaagtatatgagatatggttcccttttgaaggcaattcacaagttcacaggagtccaccaaaactatggaacttaacggtgactagagagcagagtttcagagatcgatttttggtttgtgattcacatatttgcaatgaattctaaaggagagattattggagagcttttgagtcagtgcagccactactgttcccaatttccggcaattctatgtaccaaagcaacatatgcattggcattgtataggattaagtagtaacaagctggacctaaccaatccggtttttccataaagttccggtttgcttggttatcgtgtgtaaacaaaaatagaacacaactttcagatttttcagt

SEQ ID NO: 49640 - protein, 417 aa, Arabidopsis thaliana
  peptide (1)..(417): Ceres Seq. ID no. 13588805
  misc_feature (227)..(416): Homolog of NCBI NO: 20270243 NR Description: hypothetical protein, MGC:7199 [Homo sapiens]
  misc_feature (23)..(152): Homolog of NCBI NO: 37536630 NR Description: hypothetical protein [Oryza sativa (japonica
  misc_feature (23)..(169): Homolog of NCBI NO: 28466841 NR Description: At1g11760 [Arabidopsis thaliana]
  misc_feature (164)..(417): Homolog of NCBI NO: 25083010 NR Description: Unknown protein [Arabidopsis thaliana]
  misc_feature (1)..(160): Homolog of NCBI NO: 15221091 NR Description: expressed protein [Arabidopsis thaliana]
  misc_feature (163)..(356): Homolog of NCBI NO: 15221091 NR Description: expressed protein [Arabidopsis thaliana]
  misc_feature (1)..(417): Homolog of NCBI NO: 25372987 NR Description: protein F25C20.9 [imported] - Arabidopsis
MKKKKKESDTNRTLRSSPGRDQMDNIVDSLNKAYEKFVLASAGVLESKESAGGQKALLTDTALENFKEKWELFRVACDQAEEFVESVKQRIGSECLVDEATGLTTTAAGGQAPAAVTGAATSLPPISAVRLEQMSRAVRWLVLELQRGSGVAPGSVHSSSTGYMDSNQSMRLLSAWIGQIGDLGLNLLWRFIHIVVSLWYIVSGIFEAIESYAITLGLNKKYGSIDLEKLRCLAVVVDIEAAQDVANVVELLQWLTTIGVKQVGLFDSQGLLKKSKDLILETVPGSMLLEEIEKDVAPDGKRIALEFISSSDNKEAVMKAANILLQRYLKSSHPEDDKGEDFFTESHLNDALRVVGENVHVPDLLLVYGPIRSHLGFPAWRLRYTEIVHMGTLKYMRYGSLLKAIHKFTGVHQNYGT

SEQ ID NO: 49641 - protein, 395 aa, Arabidopsis thaliana
  peptide (1)..(395): Ceres Seq. ID no. 13588806
  misc_feature (205)..(394): Homolog of NCBI NO: 20270243 NR Description: hypothetical protein, MGC:7199 [Homo sapiens]
  misc_feature (1)..(130): Homolog of NCBI NO: 37536630 NR Description: hypothetical protein [Oryza sativa (japonica
  misc_feature (1)..(147): Homolog of NCBI NO: 28466841 NR Description: At1g11760 [Arabidopsis thaliana]
  misc_feature (142)..(395): Homolog of NCBI NO: 25083010 NR Description: Unknown protein [Arabidopsis thaliana]
  misc_feature (1)..(138): Homolog of NCBI NO: 15221091 NR Description: expressed protein [Arabidopsis thaliana]
  misc_feature (141)..(334): Homolog of NCBI NO: 15221091 NR Description: expressed protein [Arabidopsis thaliana]
  misc_feature (1)..(395): Homolog of NCBI NO: 25372987 NR Description: protein F25C20.9 [imported] - Arabidopsis
MDNIVDSLNKAYEKFVLASAGVLESKESAGGQKALLTDTALENFKEKWELFRVACDQAEEFVESVKQRIGSECLVDEATGLTTTAAGGQAPAAVTGAATSLPPISAVRLEQMSRAVRWLVLELQRGSGVAPGSVHSSSTGYMDSNQSMRLLSAWIGQIGDLGLNLLWRFIHIVVSLWYIVSGIFEAIESYAITLGLNKKYGSIDLEKLRCLAVVVDIEAAQDVANVVELLQWLTTIGVKQVGLFDSQGLLKKSKDLILETVPGSMLLEEIEKDVAPDGKRIALEFISSSDNKEAVMKAANILLQRYLKSSHPEDDKGEDFFTESHLNDALRVVGENVHVPDLLLVYGPIRSHLGFPAWRLRYTEIVHMGTLKYMRYGSLLKAIHKFTGVHQNYGT

SEQ ID NO: 49642 - protein, 284 aa, Arabidopsis thaliana
  peptide (1)..(284): Ceres Seq. ID no. 13588807
  misc_feature (94)..(283): Homolog of NCBI NO: 20270243 NR Description: hypothetical protein, MGC:7199 [Homo sapiens]
  misc_feature (1)..(19): Homolog of NCBI NO: 37536630 NR Description: hypothetical protein [Oryza sativa (japonica
  misc_feature (1)..(36): Homolog of NCBI NO: 28466841 NR Description: At1g11760 [Arabidopsis thaliana]
  misc_feature (31)..(284): Homolog of NCBI NO: 25083010 NR Description: Unknown protein [Arabidopsis thaliana]
  misc_feature (1)..(27): Homolog of NCBI NO: 15221091 NR Description: expressed protein [Arabidopsis thaliana]
  misc_feature (30)..(223): Homolog of NCBI NO: 15221091 NR Description: expressed protein [Arabidopsis thaliana]
  misc_feature (1)..(284): Homolog of NCBI NO: 25372987 NR Description: protein F25C20.9 [imported] - Arabidopsis
MSRAVRWLVLELQRGSGVAPGSVHSSSTGYMDSNQSMRLLSAWIGQIGDLGLNLLWRFIHIVVSLWYIVSGIFEAIESYAITLGLNKKYGSIDLEKLRCLAVVVDIEAAQDVANVVELLQWLTTIGVKQVGLFDSQGLLKKSKDLILETVPGSMLLEEIEKDVAPDGKRIALEFISSSDNKEAVMKAANILLQRYLKSSHPEDDKGEDFFTESHLNDALRVVGENVHVPDLLLVYGPIRSHLGFPAWRLRYTEIVHMGTLKYMRYGSLLKAIHKFTGVHQNYGT

SEQ ID NO: 49643 - DNA, 2228 bp, Arabidopsis thaliana
  misc_feature (1)..(2228): Ceres Seq. ID no. 13592297
  misc_feature: MA Experiment ID: 20000437 Result: Down-regulated in Transcription
  misc_feature: MA Experiment 20000437 PARAMETER Experiment Name: At_Drought_P Parameter: Age (day) Value: 8
  misc_feature: MA Experiment 20000437 PARAMETER Experiment Name: At_Drought_P Parameter: Organism Value: A. thaliana
  misc_feature: MA Experiment 20000437 PARAMETER Experiment Name: At_Drought_P Parameter: Plant Line Value: WS
  misc_feature: MA Experiment 20000437 PARAMETER Experiment Name: At_Drought_P Parameter: Timepoint (hr) Value: 24
  misc_feature: MA Experiment 20000437 PARAMETER Experiment Name: At_Drought_P Parameter: Tissue Value: Whole Plant
  misc_feature: MA Experiment 20000437 PARAMETER Experiment Name: At_Drought_P Parameter: Treatment Value: Drought vs. No Drought
  misc_feature: MA Experiment ID: 20000495 Result: Up-regulated in Transcription
  misc_feature: MA Experiment 20000495 PARAMETER Experiment Name: At_Guard_Cells_P Parameter: Harvest Date Value: 8/2/2002
  misc_feature: MA Experiment 20000495 PARAMETER Experiment Name: At_Guard_Cells_P Parameter: Organism Value: A. thaliana
  misc_feature: MA Experiment 20000495 PARAMETER Experiment Name: At_Guard_Cells_P Parameter: Tissue Value: Guard Cells vs. Leaves
  misc_feature: MA Experiment ID: 20001558 Result: Up-regulated in Transcription
  misc_feature: MA Experiment 20001558 PARAMETER Experiment Name: At_Drought_Soil_Dry_P Parameter: Age (day) Value: 27
  misc_feature: MA Experiment 20001558 PARAMETER Experiment Name: At_Drought_Soil_Dry_P Parameter: Organism Value: A. thaliana
  misc_feature: MA Experiment 20001558 PARAMETER Experiment Name: At_Drought_Soil_Dry_P Parameter: Plant Line Value: WS
  misc_feature: MA Experiment 20001558 PARAMETER Experiment Name: At_Drought_Soil_Dry_P Parameter: Post Timepoint (hr) Value: 6
  misc_feature: MA Experiment 20001558 PARAMETER Experiment Name: At_Drought_Soil_Dry_P Parameter: Post-Treatment Value: Re-Water vs. No Drought
  misc_feature: MA Experiment 20001558 PARAMETER Experiment Name: At_Drought_Soil_Dry_P Parameter: Timepoint (day) Value: 13
  misc_feature: MA Experiment 20001558 PARAMETER Experiment Name: At_Drought_Soil_Dry_P Parameter: Treatment Value: Drought vs. No Drought
  misc_feature: Pfam Name: Pkinase Pfam Description: Protein kinase domain
ggaaagataaccacagaacacaaaaactcattcattaagaatgagaaagaaagtcccaaaaaccttttttgctctgaaaaagcaacgcaaagttttgaaaaatctcacacctttttcacttctctgttaccacttgtgtttcccctttggcatttttctcggttgtcattaatgagagttcctaaaatcatcatcatcaagtgtaacttctctctctttctctatctctatctcaaagctctgaactttggagagatcatggtttgtgtttgatttctcaagtttggttttttttacccttttggaggatctgagaggagaaatttgcttttttttggaaaatggggagaaaaaagtttgaagcttttggttttgtctgcttaatctcactgcttcttctgtttaattcgttatggcttgcctcttctaacatggaaggtgatgcactgcacagtttgagagctaatctagttgatccaaataatgtcttgcaaagctgggatcctacgcttgttaatccgtgtacttggtttcacgtaacgtgtaacaacgagaacagtgttataagagtcgatcttgggaatgcagacttgtctggtcagttggttcctcagctaggtcagctcaagaacttgcagtacttggagctttatagtaataacataaccgggccggttccaagcgatcttgggaatctgacaaacttagtgagcttggatctttacttgaacagcttcactggtccaattccagattctctaggaaagctattcaagcttcgctttcttcggctcaacaataacagtctcaccggaccaattcccatgtcattgactaatatcatgacccttcaagttttggatctgtcgaacaaccgattatccggatctgttcctgataatggttccttctcgctcttcactcccatcagttttgctaacaacttggatctatgcggcccagttactagccgtccttgtcctggatctcccccgttttctcctccaccaccttttataccacctcccatagttcctacaccaggtgggtatagtgctactggagccattgcgggaggagttgctgctggtgctgctttactatttgctgcccctgctttagcttttgcttggtggcgtagaagaaaacctcaagaattcttctttgatgttcctgccgaagaggaccctgaggttcacttggggcagcttaagcggttctctctacgggaacttcaagtagcaactgatagcttcagcaacaagaacattttgggccgaggtgggttcggaaaagtctacaaaggccgtcttgctgatggaacacttgttgcagtcaaacggcttaaagaagagcgaaccccaggtggcgagctccagtttcagacagaagtggagatgataagcatggccgttcacagaaatctcctcaggctacgcggtttctgtatgacccctaccgagagattgcttgtttatccttacatggctaatggaagtgtcgcttcctgtttgagagaacgtccaccatcacagttgcctctagcctggtcaataagacagcaaatcgcgctaggatcagcgaggggtttgtcttatcttcatgatcattgcgaccccaaaattattcaccgtgatgtgaaagctgctaatattctgttggacgaggaatttgaggcggtggtaggtgatttcgggttagctagacttatggactataaagatactcatgtcacaacggctgtgcgtgggactattggacacattgctcctgagtatctctcaactggaaaatcttcagagaaaactgatgtttttggctacgggatcatgcttttggaactgattacaggtcagagagcttttgatcttgcaagactggcgaatgacgatgacgttatgctcctagattgggtgaaagggcttttgaaggagaagaagctggagatgcttgtggatcctgacctgcaaagcaattacacagaagcagaagtagaacagctcatacaagtggctcttctctgcacacagagctcacctatggaacgacctaagatgtctgaggttgttcgaatgcttgaaggtgacggtttagcggagaaatgggacgagtggcagaaagtggaagttctcaggcaagaagtggagctctcttctcaccccacctctgactggatccttgattcgactgataatcttcatgctatggagttgtctggtccaagataa

SEQ ID NO: 49644 - protein, 628 aa, Arabidopsis thaliana
  peptide (1)..(628): Ceres Seq. ID no. 15221085
  misc_feature: Pfam Name: Pkinase Pfam Description: Protein kinase domain
  misc_feature (17)..(588): Homolog of NCBI NO: 22329033 NR Description: receptor-related kinase homolog [Arabidopsis
  misc_feature (1)..(628): Homolog of NCBI NO: 15237242 NR Description: receptor protein kinase-related protein
  misc_feature (98)..(628): Homolog of NCBI NO: 7488932 NR Description: probable somatic embryogenesis receptor-like
  misc_feature (13)..(628): Homolog of NCBI NO: 14573459 NR Description: somatic embryogenesis receptor-like kinase 3
  misc_feature (29)..(628): Homolog of NCBI NO: 13897308 NR Description: SERK1 protein [Zea mays]
  misc_feature (29)..(628): Homolog of NCBI NO: 13897320 NR Description: somatic embryogenesis receptor-like kinase 2 [Zea
  misc_feature (29)..(628): Homolog of NCBI NO: 13897310 NR Description: SERK2 protein [Zea mays]
  misc_feature (14)..(628): Homolog of NCBI NO: 15081616 NR Description: At1g71830/F14O23_24 [Arabidopsis thaliana]
  misc_feature (14)..(628): Homolog of NCBI NO: 15217584 NR Description: protein kinase -related [Arabidopsis thaliana]
  misc_feature (1)..(628): Homolog of NCBI NO: 24935324 NR Description: somatic embryogenesis receptor kinase 1 [Medicago
MGRKKFEAFGFVCLISLLLLFNSLWLASSNMEGDALHSLRANLVDPNNVLQSWDPTLVNPCTWFHVTCNNENSVIRVDLGNADLSGQLVPQLGQLKNLQYLELYSNNITGPVPSDLGNLTNLVSLDLYLNSFTGPIPDSLGKLFKLRFLRLNNNSLTGPIPMSLTNIMTLQVLDLSNNRLSGSVPDNGSFSLFTPISFANNLDLCGPVTSRPCPGSPPFSPPPPFIPPPIVPTPGGYSATGAIAGGVAAGAALLFAAPALAFAWWRRRKPQEFFFDVPAEEDPEVHLGQLKRFSLRELQVATDSFSNKNILGRGGFGKVYKGRLADGTLVAVKRLKEERTPGGELQFQTEVEMISMAVHRNLLRLRGFCMTPTERLLVYPYMANGSVASCLRERPPSQLPLAWSIRQQIALGSARGLSYLHDHCDPKIIHRDVKAANILLDEEFEAVVGDFGLARLMDYKDTHVTTAVRGTIGHIAPEYLSTGKSSEKTDVFGYGIMLLELITGQRAFDLARLANDDDVMLLDWVKGLLKEKKLEMLVDPDLQSNYTEAEVEQLIQVALLCTQSSPMERPKMSEVVRMLEGDGLAEKWDEWQKVEVLRQEVELSSHPTSDWILDSTDNLHAMELSGPR

SEQ ID NO: 49645 - protein, 598 aa, Arabidopsis thaliana
  peptide (1)..(598): Ceres Seq. ID no. 15221086
  misc_feature: Pfam Name: Pkinase Pfam Description: Protein kinase domain
  misc_feature (1)..(558): Homolog of NCBI NO: 22329033 NR Description: receptor-related kinase homolog [Arabidopsis
  misc_feature (1)..(598): Homolog of NCBI NO: 15237242 NR Description: receptor protein kinase-related protein
  misc_feature (68)..(598): Homolog of NCBI NO: 7488932 NR Description: probable somatic embryogenesis receptor-like
  misc_feature (1)..(598): Homolog of NCBI NO: 14573459 NR Description: somatic embryogenesis receptor-like kinase 3
  misc_feature (1)..(598): Homolog of NCBI NO: 13897308 NR Description: SERK1 protein [Zea mays]
  misc_feature (1)..(598): Homolog of NCBI NO: 13897320 NR Description: somatic embryogenesis receptor-like kinase 2 [Zea
  misc_feature (1)..(598): Homolog of NCBI NO: 13897310 NR Description: SERK2 protein [Zea mays]
  misc_feature (1)..(598): Homolog of NCBI NO: 15081616 NR Description: At1g71830/F14O23_24 [Arabidopsis thaliana]
  misc_feature (1)..(598): Homolog of NCBI NO: 15217584 NR Description: protein kinase -related [Arabidopsis thaliana]
  misc_feature (1)..(598): Homolog of NCBI NO: 24935324 NR Description: somatic embryogenesis receptor kinase 1 [Medicago
MEGDALHSLRANLVDPNNVLQSWDPTLVNPCTWFHVTCNNENSVIRVDLGNADLSGQLVPQLGQLKNLQYLELYSNNITGPVPSDLGNLTNLVSLDLYLNSFTGPIPDSLGKLFKLRFLRLNNNSLTGPIPMSLTNIMTLQVLDLSNNRLSGSVPDNGSFSLFTPISFANNLDLCGPVTSRPCPGSPPFSPPPPFIPPPIVPTPGGYSATGAIAGGVAAGAALLFAAPALAFAWWRRRKPQEFFFDVPAEEDPEVHLGQLKRFSLRELQVATDSFSNKNILGRGGFGKVYKGRLADGTLVAVKRLKEERTPGGELQFQTEVEMISMAVHRNLLRLRGFCMTPTERLLVYPYMANGSVASCLRERPPSQLPLAWSIRQQIALGSARGLSYLHDHCDPKIIHRDVKAANILLDEEFEAVVGDFGLARLMDYKDTHVTTAVRGTIGHIAPEYLSTGKSSEKTDVFGYGIMLLELITGQRAFDLARLANDDDVMLLDWVKGLLKEKKLEMLVDPDLQSNYTEAEVEQLIQVALLCTQSSPMERPKMSEVVRMLEGDGLAEKWDEWQKVEVLRQEVELSSHPTSDWILDSTDNLHAMELSGPR

SEQ ID NO: 49646 - protein, 467 aa, Arabidopsis thaliana
  peptide (1)..(467): Ceres Seq. ID no. 15221087
  misc_feature: Pfam Name: Pkinase Pfam Description: Protein kinase domain
  misc_feature (1)..(427): Homolog of NCBI NO: 22329033 NR Description: receptor-related kinase homolog [Arabidopsis
  misc_feature (1)..(467): Homolog of NCBI NO: 15237242 NR Description: receptor protein kinase-related protein
  misc_feature (1)..(467): Homolog of NCBI NO: 7488932 NR Description: probable somatic embryogenesis receptor-like
  misc_feature (1)..(467): Homolog of NCBI NO: 14573459 NR Description: somatic embryogenesis receptor-like kinase 3
  misc_feature (1)..(467): Homolog of NCBI NO: 13897308 NR Description: SERK1 protein [Zea mays]
  misc_feature (1)..(467): Homolog of NCBI NO: 13897320 NR Description: somatic embryogenesis receptor-like kinase 2 [Zea
  misc_feature (1)..(467): Homolog of NCBI NO: 13897310 NR Description: SERK2 protein [Zea mays]
  misc_feature (1)..(467): Homolog of NCBI NO: 15081616 NR Description: At1g71830/F14O23_24 [Arabidopsis thaliana]
  misc_feature (1)..(467): Homolog of NCBI NO: 15217584 NR Description: protein kinase -related [Arabidopsis thaliana]
  misc_feature (1)..(467): Homolog of NCBI NO: 24935324 NR Description: somatic embryogenesis receptor kinase 1 [Medicago
MSLTNIMTLQVLDLSNNRLSGSVPDNGSFSLFTPISFANNLDLCGPVTSRPCPGSPPFSPPPPFIPPPIVPTPGGYSATGAIAGGVAAGAALLFAAPALAFAWWRRRKPQEFFFDVPAEEDPEVHLGQLKRFSLRELQVATDSFSNKNILGRGGFGKVYKGRLADGTLVAVKRLKEERTPGGELQFQTEVEMISMAVHRNLLRLRGFCMTPTERLLVYPYMANGSVASCLRERPPSQLPLAWSIRQQIALGSARGLSYLHDHCDPKIIHRDVKAANILLDEEFEAVVGDFGLARLMDYKDTHVTTAVRGTIGHIAPEYLSTGKSSEKTDVFGYGIMLLELITGQRAFDLARLANDDDVMLLDWVKGLLKEKKLEMLVDPDLQSNYTEAEVEQLIQVALLCTQSSPMERPKMSEVVRMLEGDGLAEKWDEWQKVEVLRQEVELSSHPTSDWILDSTDNLHAMELSGPR

SEQ ID NO: 49647 - DNA, 2121 bp, Arabidopsis thaliana; identical to SEQ ID NO: 24365
  misc_feature (1)..(2121): Ceres Seq. ID no. 12601883
  misc_feature: MA Experiment ID: 20000169 Result: Down-regulated in Transcription
  misc_feature: MA Experiment 20000169 PARAMETER Experiment Name: At_100uM_ABA_P Parameter: Age (day) Value: 14
  misc_feature: MA Experiment 20000169 PARAMETER Experiment Name: At_100uM_ABA_P Parameter: Organism Value: A. thaliana
  misc_feature: MA Experiment 20000169 PARAMETER Experiment Name: At_100uM_ABA_P Parameter: Plant Line Value: WS
  misc_feature: MA Experiment 20000169 PARAMETER Experiment Name: At_100uM_ABA_P Parameter: Timepoint (hr) Value: 6
  misc_feature: MA Experiment 20000169 PARAMETER Experiment Name: At_100uM_ABA_P Parameter: Tissue Value: Aerial
  misc_feature: MA Experiment 20000169 PARAMETER Experiment Name: At_100uM_ABA_P Parameter: Treatment Value: 100uM ABA vs. No Treatment
  misc_feature: MA Experiment ID: 20000180 Result: Up-regulated in Transcription
  misc_feature: MA Experiment 20000180 PARAMETER Experiment Name: At_Germinating_Seeds_P Parameter: Age (hr) Value: 24 vs. 0
  misc_feature: MA Experiment 20000180 PARAMETER Experiment Name: At_Germinating_Seeds_P Parameter: Tissue Value: Germinating Seeds
  misc_feature: MA Experiment ID: 20000214 Result: Up-regulated in Transcription
  misc_feature: MA Experiment 20000214 PARAMETER Experiment Name: At_4deg_Cold_P Parameter: Timepoint (hr) Value: 6
  misc_feature: MA Experiment ID: 20000234 Result: Up-regulated in Transcription
  misc_feature: MA Experiment 20000234 PARAMETER Experiment Name: At_Siliques_P Parameter: Age (day) Value: 21
  misc_feature: MA Experiment 20000234 PARAMETER Experiment Name: At_Siliques_P Parameter: Organism Value: A. thaliana
  misc_feature: MA Experiment 20000234 PARAMETER Experiment Name: At_Siliques_P Parameter: Plant Line Value: WS
  misc_feature: MA Experiment 20000234 PARAMETER Experiment Name: At_Siliques_P Parameter: Tissue Value: Less Than 5mm Siliques vs. Whole Plant
  misc_feature: MA Experiment ID: 20000436 Result: Down-regulated in Transcription
  misc_feature: MA Experiment 20000436 PARAMETER Experiment Name: At_Drought_P Parameter: Age (day) Value: 7
  misc_feature: MA Experiment 20000436 PARAMETER Experiment Name: At_Drought_P Parameter: Organism Value: A. thaliana
  misc_feature: MA Experiment 20000436 PARAMETER Experiment Name: At_Drought_P Parameter: Plant Line Value: WS
  misc_feature: MA Experiment 20000436 PARAMETER Experiment Name: At_Drought_P Parameter: Timepoint (hr) Value: 12
  misc_feature: MA Experiment 20000436 PARAMETER Experiment Name: At_Drought_P Parameter: Tissue Value: Whole Plant
  misc_feature: MA Experiment 20000436 PARAMETER Experiment Name: At_Drought_P Parameter: Treatment Value: Drought vs. No Drought
  misc_feature: MA Experiment ID: 20000437 Result: Down-regulated in Transcription
  misc_feature: MA Experiment 20000437 PARAMETER Experiment Name: At_Drought_P Parameter: Age (day) Value: 8
  misc_feature: MA Experiment 20000437 PARAMETER Experiment Name: At_Drought_P Parameter: Organism Value: A. thaliana
  misc_feature: MA Experiment 20000437 PARAMETER Experiment Name: At_Drought_P Parameter: Plant Line Value: WS
  misc_feature: MA Experiment 20000437 PARAMETER Experiment Name: At_Drought_P Parameter: Timepoint (hr) Value: 24
  misc_feature: MA Experiment 20000437 PARAMETER Experiment Name: At_Drought_P Parameter: Tissue Value: Whole Plant
  misc_feature: MA Experiment 20000437 PARAMETER Experiment Name: At_Drought_P Parameter: Treatment Value: Drought vs. No Drought
  misc_feature: MA Experiment ID: 20000438 Result: Up-regulated in Transcription
  misc_feature: MA Experiment 20000438 PARAMETER Experiment Name: At_Shoots__P Parameter: Age (day) Value: 14
  misc_feature: MA Experiment 20000438 PARAMETER Experiment Name: At_Shoots__P Parameter: Tissue Value: Shoots vs. Whole Plant
  misc_feature: MA Experiment ID: 20000439 Result: Down-regulated in Transcription
  misc_feature: MA Experiment 20000439 PARAMETER Experiment Name: At_Roots__P Parameter: Age (day) Value: 14 vs. 21
  misc_feature: MA Experiment 20000439 PARAMETER Experiment Name: At_Roots__P Parameter: Organism Value: A. thaliana
  misc_feature: MA Experiment 20000439 PARAMETER Experiment Name: At_Roots__P Parameter: Tissue Value: Roots vs. Whole Plant
  misc_feature: MA Experiment ID: 20000451 Result: Up-regulated in Transcription
  misc_feature: MA Experiment 20000451 PARAMETER Experiment Name: At_CS6879_Shoots-Roots_P Parameter: Age (day) Value: 14
  misc_feature: MA Experiment 20000451 PARAMETER Experiment Name: At_CS6879_Shoots-Roots_P Parameter: Organism Value: A. thaliana
  misc_feature: MA Experiment 20000451 PARAMETER Experiment Name: At_CS6879_Shoots-Roots_P Parameter: Plant Line Value: CS6879 vs. WS
  misc_feature: MA Experiment 20000451 PARAMETER Experiment Name: At_CS6879_Shoots-Roots_P Parameter: Tissue Value: Roots
  misc_feature: MA Experiment ID: 20000794 Result: Down-regulated in Transcription
  misc_feature: MA Experiment 20000794 PARAMETER Experiment Name: At_Petals_P Parameter: Age (day) Value: 23-25 days
  misc_feature: MA Experiment 20000794 PARAMETER Experiment Name: At_Petals_P Parameter: Plant Line Value: WS
  misc_feature: MA Experiment 20000794 PARAMETER Experiment Name: At_Petals_P Parameter: Tissue Value: Petals vs. Whole plant
  misc_feature: MA Experiment ID: 20001248 Result: Down-regulated in Transcription
  misc_feature: MA Experiment 20001248 PARAMETER Experiment Name: At_Far-red-induction_P Parameter: Age (day) Value: 7
  misc_feature: MA Experiment 20001248 PARAMETER Experiment Name: At_Far-red-induction_P Parameter: Light Value: Far-red vs. White
  misc_feature: MA Experiment 20001248 PARAMETER Experiment Name: At_Far-red-induction_P Parameter: Organism Value: A. thaliana
  misc_feature: MA Experiment 20001248 PARAMETER Experiment Name: At_Far-red-induction_P Parameter: Plant Line Value: Columbia
  misc_feature: MA Experiment 20001248 PARAMETER Experiment Name: At_Far-red-induction_P Parameter: Timepoint (hr) Value: 4
  misc_feature: MA Experiment 20001248 PARAMETER Experiment Name: At_Far-red-induction_P Parameter: Tissue Value: Whole Plant
  misc_feature: MA Experiment ID: 20001450 Result: Down-regulated in Transcription
  misc_feature: MA Experiment 20001450 PARAMETER Experiment Name: At_Far-red-induction_P Parameter: Age (day) Value: 7
  misc_feature: MA Experiment 20001450 PARAMETER Experiment Name: At_Far-red-induction_P Parameter: Light Value: Far-red vs. White
  misc_feature: MA Experiment 20001450 PARAMETER Experiment Name: At_Far-red-induction_P Parameter: Organism Value: A. thaliana
  misc_feature: MA Experiment 20001450 PARAMETER Experiment Name: At_Far-red-induction_P Parameter: Plant Line Value: Columbia
  misc_feature: MA Experiment 20001450 PARAMETER Experiment Name: At_Far-red-induction_P Parameter: Timepoint (hr) Value: 8
  misc_feature: MA Experiment 20001450 PARAMETER Experiment Name: At_Far-red-induction_P Parameter: Tissue Value: Whole Plant
  misc_feature: MA Experiment ID: 20001451 Result: Down-regulated in Transcription
  misc_feature: MA Experiment 20001451 PARAMETER Experiment Name: At_Far-red-induction_P Parameter: Age (day) Value: 7
  misc_feature: MA Experiment 20001451 PARAMETER Experiment Name: At_Far-red-induction_P Parameter: Light Value: Far-red vs. White
  misc_feature: MA Experiment 20001451 PARAMETER Experiment Name: At_Far-red-induction_P Parameter: Organism Value: A. thaliana
  misc_feature: MA Experiment 20001451 PARAMETER Experiment Name: At_Far-red-induction_P Parameter: Plant Line Value: Columbia
  misc_feature: MA Experiment 20001451 PARAMETER Experiment Name: At_Far-red-induction_P Parameter: Timepoint (hr) Value: 24
  misc_feature: MA Experiment 20001451 PARAMETER Experiment Name: At_Far-red-induction_P Parameter: Tissue Value: Whole Plant
  misc_feature: MA Experiment ID: 20001757 Result: Up-regulated in Transcription
  misc_feature: MA Experiment 20001757 PARAMETER Experiment Name: At_50mM_NH4NO3_L-to-H_P Parameter: Timepoint (hr) Value: 6
  misc_feature: MA Experiment 20001757 PARAMETER Experiment Name: At_50mM_NH4NO3_L-to-H_P Parameter: Tissue Value: Leaf
  misc_feature: MA Experiment 20001757 PARAMETER Experiment Name: At_50mM_NH4NO3_L-to-H_P Parameter: Treatment Value: 50mM NH4NO3 vs 100mM Mannitol
  misc_feature: MA Experiment ID: 20001904 Result: Down-regulated in Transcription
  misc_feature: MA Experiment 20001904 PARAMETER Experiment Name: At_Drought_Reproduction_P Parameter: Age (day) Value: 37
  misc_feature: MA Experiment 20001904 PARAMETER Experiment Name: At_Drought_Reproduction_P Parameter: Organism Value: A. thaliana
  misc_feature: MA Experiment 20001904 PARAMETER Experiment Name: At_Drought_Reproduction_P Parameter: Plant Line Value: WS
  misc_feature: MA Experiment 20001904 PARAMETER Experiment Name: At_Drought_Reproduction_P Parameter: Timepoint (day) Value: 7
  misc_feature: MA Experiment 20001904 PARAMETER Experiment Name: At_Drought_Reproduction_P Parameter: Tissue Value: Rosettes
  misc_feature: MA Experiment 20001904 PARAMETER Experiment Name: At_Drought_Reproduction_P Parameter: Treatment Value: Drought vs. No Drought
  misc_feature: MA Experiment ID: 20001906 Result: Down-regulated in Transcription
  misc_feature: MA Experiment 20001906 PARAMETER Experiment Name: At_Drought_Reproduction_P Parameter: Age (day) Value: 35
  misc_feature: MA Experiment 20001906 PARAMETER Experiment Name: At_Drought_Reproduction_P Parameter: Organism Value: A. thaliana
  misc_feature: MA Experiment 20001906 PARAMETER Experiment Name: At_Drought_Reproduction_P Parameter: Plant Line Value: WS
  misc_feature: MA Experiment 20001906 PARAMETER Experiment Name: At_Drought_Reproduction_P Parameter: Timepoint (day) Value: 5
  misc_feature: MA Experiment 20001906 PARAMETER Experiment Name: At_Drought_Reproduction_P Parameter: Tissue Value: Siliques
  misc_feature: MA Experiment 20001906 PARAMETER Experiment Name: At_Drought_Reproduction_P Parameter: Treatment Value: Drought vs. No Drought

SEQ ID NO: 49648 - protein, 181 aa, Arabidopsis thaliana; identical to SEQ ID NO: 24366
  peptide (1)..(181): Ceres Seq. ID no. 12601884
  misc_feature (56)..(175): Pfam Name: Ribulose bisphosphate carboxylase, small chain Pfam Description: Ribulose bisphosphate carboxylase, small chain
  misc_feature (56)..(175): Pfam Name: Ribulose bisphosphate carboxylase, small chain Pfam Description: Ribulose bisphosphate carboxylase, small chain
  misc_feature (56)..(175): Pfam Name: Ribulose bisphosphate carboxylase, small chain Pfam Description: Ribulose bisphosphate carboxylase, small chain
  misc_feature (56)..(175): Pfam Name: Ribulose bisphosphate carboxylase, small chain Pfam Description: Ribulose bisphosphate carboxylase, small chain
  misc_feature (1)..(179): Homolog of NCBI NO: 68063 NR Description: ribulose-bisphosphate carboxylase (EC 4.1.1.39)
  misc_feature (1)..(181): Homolog of NCBI NO: 132154 NR Description: Ribulose bisphosphate carboxylase small chain,
  misc_feature (1)..(179): Homolog of NCBI NO: 15219826 NR Description: ribulose-bisphosphate carboxylase small unit,
  misc_feature (1)..(181): Homolog of NCBI NO: 266891 NR Description: Ribulose bisphosphate carboxylase small chain,
  misc_feature (1)..(181): Homolog of NCBI NO: 132091 NR Description: Ribulose bisphosphate carboxylase small chain F1,
  misc_feature (1)..(179): Homolog of NCBI NO: 68063 NR Description: ribulose-bisphosphate carboxylase (EC 4.1.1.39)
  misc_feature (1)..(179): Homolog of NCBI NO: 15219826 NR Description: ribulose-bisphosphate carboxylase small unit,
  misc_feature (1)..(181): Homolog of NCBI NO: 132091 NR Description: Ribulose bisphosphate carboxylase small chain F1,
  misc_feature (1)..(181): Homolog of NCBI NO: 266891 NR Description: Ribulose bisphosphate carboxylase small chain,
  misc_feature (1)..(179): Homolog of NCBI NO: 15219826 NR Description: ribulose-bisphosphate carboxylase small unit,
  misc_feature (1)..(181): Homolog of NCBI NO: 132154 NR Description: Ribulose bisphosphate carboxylase small chain,
  misc_feature (1)..(179): Homolog of NCBI NO: 68063 NR Description: ribulose-bisphosphate carboxylase (EC 4.1.1.39)
  misc_feature (1)..(181): Homolog of NCBI NO: 15240912 NR Description: ribulose bisphosphate carboxylase small chain 1b
  misc_feature (1)..(181): Homolog of NCBI NO: 68061 NR Description: ribulose-bisphosphate carboxylase (EC 4.1.1.39)
  misc_feature (1)..(181): Homolog of NCBI NO: 15240903 NR Description: ribulose bisphosphate carboxylase small chain 2b
  misc_feature (1)..(181): Homolog of NCBI NO: 68060 NR Description: ribulose-bisphosphate carboxylase (EC 4.1.1.39)
  misc_feature (1)..(181): Homolog of NCBI NO: 15240901 NR Description: ribulose bisphosphate carboxylase small chain 3b
  misc_feature (1)..(181): Homolog of NCBI NO: 15240912 NR Description: ribulose bisphosphate carboxylase small chain 1b
  misc_feature (1)..(181): Homolog of NCBI NO: 68061 NR Description: ribulose-bisphosphate carboxylase (EC 4.1.1.39)
  misc_feature (1)..(181): Homolog of NCBI NO: 15240903 NR Description: ribulose bisphosphate carboxylase small chain 2b
  misc_feature (1)..(181): Homolog of NCBI NO: 68060 NR Description: ribulose-bisphosphate carboxylase (EC 4.1.1.39)
  misc_feature (1)..(181): Homolog of NCBI NO: 15240901 NR Description: ribulose bisphosphate carboxylase small chain 3b
  misc_feature (1)..(181): Homolog of NCBI NO: 132091 NR Description: Ribulose bisphosphate carboxylase small chain F1,
  misc_feature (1)..(181): Homolog of NCBI NO: 266891 NR Description: Ribulose bisphosphate carboxylase small chain,
  misc_feature (1)..(179): Homolog of NCBI NO: 15219826 NR Description: ribulose-bisphosphate carboxylase small unit,
  misc_feature (1)..(181): Homolog of NCBI NO: 132154 NR Description: Ribulose bisphosphate carboxylase small chain,
  misc_feature (1)..(179): Homolog of NCBI NO: 68063 NR Description: ribulose-bisphosphate carboxylase (EC 4.1.1.39)
  misc_feature (1)..(181): Homolog of NCBI NO: 15240912 NR Description: ribulose bisphosphate carboxylase small chain 1b
  misc_feature (1)..(181): Homolog of NCBI NO: 68061 NR Description: ribulose-bisphosphate carboxylase (EC 4.1.1.39)
  misc_feature (1)..(181): Homolog of NCBI NO: 15240903 NR Description: ribulose bisphosphate carboxylase small chain 2b
  misc_feature (1)..(181): Homolog of NCBI NO: 68060 NR Description: ribulose-bisphosphate carboxylase (EC 4.1.1.39)
  misc_feature (1)..(181): Homolog of NCBI NO: 15240901 NR Description: ribulose bisphosphate carboxylase small chain 3b
  misc_feature (1)..(181): Homolog of NCBI NO: 132091 NR Description: Ribulose bisphosphate carboxylase small chain F1,
  misc_feature (1)..(181): Homolog of NCBI NO: 266891 NR Description: Ribulose bisphosphate carboxylase small chain,
  misc_feature (1)..(181): Homolog of NCBI NO: 132154 NR Description: Ribulose bisphosphate carboxylase small chain,
  misc_feature (1)..(181): Homolog of NCBI NO: 15240901 NR Description: ribulose bisphosphate carboxylase small chain 3b
  misc_feature (1)..(181): Homolog of NCBI NO: 68060 NR Description: ribulose-bisphosphate carboxylase (EC 4.1.1.39)
  misc_feature (1)..(181): Homolog of NCBI NO: 15240903 NR Description: ribulose bisphosphate carboxylase small chain 2b
  misc_feature (1)..(181): Homolog of NCBI NO: 68061 NR Description: ribulose-bisphosphate carboxylase (EC 4.1.1.39)
  misc_feature (1)..(181): Homolog of NCBI NO: 15240912 NR Description: ribulose bisphosphate carboxylase small chain 1b

SEQ ID NO: 49649 - protein, 177 aa, Arabidopsis thaliana; identical to SEQ ID NO: 24367
  peptide (1)..(177): Ceres Seq. ID no. 12601885
  misc_feature (52)..(171): Pfam Name: Ribulose bisphosphate carboxylase, small chain Pfam Description: Ribulose bisphosphate carboxylase, small chain
  misc_feature (52)..(171): Pfam Name: Ribulose bisphosphate carboxylase, small chain Pfam Description: Ribulose bisphosphate carboxylase, small chain
  misc_feature (52)..(171): Pfam Name: Ribulose bisphosphate carboxylase, small chain Pfam Description: Ribulose bisphosphate carboxylase, small chain
  misc_feature (52)..(171): Pfam Name: Ribulose bisphosphate carboxylase, small chain Pfam Description: Ribulose bisphosphate carboxylase, small chain
  misc_feature (1)..(175): Homolog of NCBI NO: 68063 NR Description: ribulose-bisphosphate carboxylase (EC 4.1.1.39)
  misc_feature (1)..(177): Homolog of NCBI NO: 132154 NR Description: Ribulose bisphosphate carboxylase small chain,
  misc_feature (1)..(175): Homolog of NCBI NO: 15219826 NR Description: ribulose-bisphosphate carboxylase small unit,
  misc_feature (1)..(177): Homolog of NCBI NO: 266891 NR Description: Ribulose bisphosphate carboxylase small chain,
  misc_feature (1)..(177): Homolog of NCBI NO: 132091 NR Description: Ribulose bisphosphate carboxylase small chain F1,
  misc_feature (1)..(175): Homolog of NCBI NO: 68063 NR Description: ribulose-bisphosphate carboxylase (EC 4.1.1.39)
  misc_feature (1)..(175): Homolog of NCBI NO: 15219826 NR Description: ribulose-bisphosphate carboxylase small unit,
  misc_feature (1)..(177): Homolog of NCBI NO: 132091 NR Description: Ribulose bisphosphate carboxylase small chain F1,
  misc_feature (1)..(177): Homolog of NCBI NO: 266891 NR Description: Ribulose bisphosphate carboxylase small chain,
  misc_feature (1)..(175): Homolog of NCBI NO: 15219826 NR Description: ribulose-bisphosphate carboxylase small unit,
  misc_feature (1)..(177): Homolog of NCBI NO: 132154 NR Description: Ribulose bisphosphate carboxylase small chain,
  misc_feature (1)..(175): Homolog of NCBI NO: 68063 NR Description: ribulose-bisphosphate carboxylase (EC 4.1.1.39)
  misc_feature (1)..(177): Homolog of NCBI NO: 15240912 NR Description: ribulose bisphosphate carboxylase small chain 1b
  misc_feature (1)..(177): Homolog of NCBI NO: 68061 NR Description: ribulose-bisphosphate carboxylase (EC 4.1.1.39)
  misc_feature (1)..(177): Homolog of NCBI NO: 15240903 NR Description: ribulose bisphosphate carboxylase small chain 2b
  misc_feature (1)..(177): Homolog of NCBI NO: 68060 NR Description: ribulose-bisphosphate carboxylase (EC 4.1.1.39)
  misc_feature (1)..(177): Homolog of NCBI NO: 15240901 NR Description: ribulose bisphosphate carboxylase small chain 3b
  misc_feature (1)..(177): Homolog of NCBI NO: 15240901 NR Description: ribulose bisphosphate carboxylase small chain 3b
  misc_feature (1)..(177): Homolog of NCBI NO: 132091 NR Description: Ribulose bisphosphate carboxylase small chain F1,
  misc_feature (1)..(177): Homolog of NCBI NO: 266891 NR Description: Ribulose bisphosphate carboxylase small chain,
  misc_feature (1)..(175): Homolog of NCBI NO: 15219826 NR Description: ribulose-bisphosphate carboxylase small unit,
  misc_feature (1)..(177): Homolog of NCBI NO: 132154 NR Description: Ribulose bisphosphate carboxylase small chain,
  misc_feature (1)..(175): Homolog of NCBI NO: 68063 NR Description: ribulose-bisphosphate carboxylase (EC 4.1.1.39)
  misc_feature (1)..(177): Homolog of NCBI NO: 15240912 NR Description: ribulose bisphosphate carboxylase small chain 1b
  misc_feature (1)..(177): Homolog of NCBI NO: 68061 NR Description: ribulose-bisphosphate carboxylase (EC 4.1.1.39)
  misc_feature (1)..(177): Homolog of NCBI NO: 15240903 NR Description: ribulose bisphosphate carboxylase small chain 2b
  misc_feature (1)..(177): Homolog of NCBI NO: 68060 NR Description: ribulose-bisphosphate carboxylase (EC 4.1.1.39)
  misc_feature (1)..(177): Homolog of NCBI NO: 15240912 NR Description: ribulose bisphosphate carboxylase small chain 1b
  misc_feature (1)..(177): Homolog of NCBI NO: 68061 NR Description: ribulose-bisphosphate carboxylase (EC 4.1.1.39)
  misc_feature (1)..(177): Homolog of NCBI NO: 15240903 NR Description: ribulose bisphosphate carboxylase small chain 2b
  misc_feature (1)..(177): Homolog of NCBI NO: 68060 NR Description: ribulose-bisphosphate carboxylase (EC 4.1.1.39)
  misc_feature (1)..(177): Homolog of NCBI NO: 15240901 NR Description: ribulose bisphosphate carboxylase small chain 3b
  misc_feature (1)..(177): Homolog of NCBI NO: 132091 NR Description: Ribulose bisphosphate carboxylase small chain F1,
  misc_feature (1)..(177): Homolog of NCBI NO: 266891 NR Description: Ribulose bisphosphate carboxylase small chain,
  misc_feature (1)..(177): Homolog of NCBI NO: 132154 NR Description: Ribulose bisphosphate carboxylase small chain,
  misc_feature (1)..(177): Homolog of NCBI NO: 15240901 NR Description: ribulose bisphosphate carboxylase small chain 3b
  misc_feature (1)..(177): Homolog of NCBI NO: 68060 NR Description: ribulose-bisphosphate carboxylase (EC 4.1.1.39)
  misc_feature (1)..(177): Homolog of NCBI NO: 15240903 NR Description: ribulose bisphosphate carboxylase small chain 2b
  misc_feature (1)..(177): Homolog of NCBI NO: 68061 NR Description: ribulose-bisphosphate carboxylase (EC 4.1.1.39)
  misc_feature (1)..(177): Homolog of NCBI NO: 15240912 NR Description: ribulose bisphosphate carboxylase small chain 1b

SEQ ID NO: 49650 - protein, 162 aa, Arabidopsis thaliana; identical to SEQ ID NO: 24368
  peptide (1)..(162): Ceres Seq. ID no. 12601886
  misc_feature (37)..(156): Pfam Name: Ribulose bisphosphate carboxylase, small chain Pfam Description: Ribulose bisphosphate carboxylase, small chain
  misc_feature (37)..(156): Pfam Name: Ribulose bisphosphate carboxylase, small chain Pfam Description: Ribulose bisphosphate carboxylase, small chain
  misc_feature (37)..(156): Pfam Name: Ribulose bisphosphate carboxylase, small chain Pfam Description: Ribulose bisphosphate carboxylase, small chain
  misc_feature (37)..(156): Pfam Name: Ribulose bisphosphate carboxylase, small chain Pfam Description: Ribulose bisphosphate carboxylase, small chain
  misc_feature (1)..(160): Homolog of NCBI NO: 68063 NR Description: ribulose-bisphosphate carboxylase (EC 4.1.1.39)
  misc_feature (1)..(162): Homolog of NCBI NO: 132154 NR Description: Ribulose bisphosphate carboxylase small chain,
  misc_feature (1)..(160): Homolog of NCBI NO: 15219826 NR Description: ribulose-bisphosphate carboxylase small unit,
  misc_feature (1)..(162): Homolog of NCBI NO: 266891 NR Description: Ribulose bisphosphate carboxylase small chain,
  misc_feature (1)..(162): Homolog of NCBI NO: 132091 NR Description: Ribulose bisphosphate carboxylase small chain F1,
  misc_feature (1)..(160): Homolog of NCBI NO: 68063 NR Description: ribulose-bisphosphate carboxylase (EC 4.1.1.39)
  misc_feature (1)..(160): Homolog of NCBI NO: 15219826 NR Description: ribulose-bisphosphate carboxylase small unit,
  misc_feature (1)..(162): Homolog of NCBI NO: 132091 NR Description: Ribulose bisphosphate carboxylase small chain F1,
  misc_feature (1)..(162): Homolog of NCBI NO: 266891 NR Description: Ribulose bisphosphate carboxylase small chain,
  misc_feature (1)..(160): Homolog of NCBI NO: 15219826 NR Description: ribulose-bisphosphate carboxylase small unit,
  misc_feature (1)..(162): Homolog of NCBI NO: 132154 NR Description: Ribulose bisphosphate carboxylase small chain,
  misc_feature (1)..(160): Homolog of NCBI NO: 68063 NR Description: ribulose-bisphosphate carboxylase (EC 4.1.1.39)
  misc_feature (1)..(162): Homolog of NCBI NO: 15240912 NR Description: ribulose bisphosphate carboxylase small chain 1b
  misc_feature (1)..(162): Homolog of NCBI NO: 68061 NR Description: ribulose-bisphosphate carboxylase (EC 4.1.1.39)
  misc_feature (1)..(162): Homolog of NCBI NO: 15240903 NR Description: ribulose bisphosphate carboxylase small chain 2b
  misc_feature (1)..(162): Homolog of NCBI NO: 68060 NR Description: ribulose-bisphosphate carboxylase (EC 4.1.1.39)
  misc_feature (1)..(162): Homolog of NCBI NO: 15240901 NR Description: ribulose bisphosphate carboxylase small chain 3b
  misc_feature (1)..(162): Homolog of NCBI NO: 15240912 NR Description: ribulose bisphosphate carboxylase small chain 1b
  misc_feature (1)..(162): Homolog of NCBI NO: 68061 NR Description: ribulose-bisphosphate carboxylase (EC 4.1.1.39)
  misc_feature (1)..(162): Homolog of NCBI NO: 15240903 NR Description: ribulose bisphosphate carboxylase small chain 2b
  misc_feature (1)..(162): Homolog of NCBI NO: 68060 NR Description: ribulose-bisphosphate carboxylase (EC 4.1.1.39)
  misc_feature (1)..(162): Homolog of NCBI NO: 15240901 NR Description: ribulose bisphosphate carboxylase small chain 3b
  misc_feature (1)..(162): Homolog of NCBI NO: 132091 NR Description: Ribulose bisphosphate carboxylase small chain F1,
  misc_feature (1)..(162): Homolog of NCBI NO: 266891 NR Description: Ribulose bisphosphate carboxylase small chain,
  misc_feature (1)..(160): Homolog of NCBI NO: 15219826 NR Description: ribulose-bisphosphate carboxylase small unit,
  misc_feature (1)..(162): Homolog of NCBI NO: 132154 NR Description: Ribulose bisphosphate carboxylase small chain,
  misc_feature (1)..(160): Homolog of NCBI NO: 68063 NR Description: ribulose-bisphosphate carboxylase (EC 4.1.1.39)
  misc_feature (1)..(162): Homolog of NCBI NO: 15240912 NR Description: ribulose bisphosphate carboxylase small chain 1b
  misc_feature (1)..(162): Homolog of NCBI NO: 68061 NR Description: ribulose-bisphosphate carboxylase (EC 4.1.1.39)
  misc_feature (1)..(162): Homolog of NCBI NO: 15240903 NR Description: ribulose bisphosphate carboxylase small chain 2b
  misc_feature (1)..(162): Homolog of NCBI NO: 68060 NR Description: ribulose-bisphosphate carboxylase (EC 4.1.1.39)
  misc_feature (1)..(162): Homolog of NCBI NO: 15240901 NR Description: ribulose bisphosphate carboxylase small chain 3b
  misc_feature (1)..(162): Homolog of NCBI NO: 132091 NR Description: Ribulose bisphosphate carboxylase small chain F1,
  misc_feature (1)..(162): Homolog of NCBI NO: 266891 NR Description: Ribulose bisphosphate carboxylase small chain,
  misc_feature (1)..(162): Homolog of NCBI NO: 132154 NR Description: Ribulose bisphosphate carboxylase small chain,
  misc_feature (1)..(162): Homolog of NCBI NO: 15240901 NR Description: ribulose bisphosphate carboxylase small chain 3b
  misc_feature (1)..(162): Homolog of NCBI NO: 68060 NR Description: ribulose-bisphosphate carboxylase (EC 4.1.1.39)
  misc_feature (1)..(162): Homolog of NCBI NO: 15240903 NR Description: ribulose bisphosphate carboxylase small chain 2b
  misc_feature (1)..(162): Homolog of NCBI NO: 68061 NR Description: ribulose-bisphosphate carboxylase (EC 4.1.1.39)
  misc_feature (1)..(162): Homolog of NCBI NO: 15240912 NR Description: ribulose bisphosphate carboxylase small chain 1b

SEQ ID NO: 49651 - DNA, 1696 bp, Arabidopsis thaliana
  misc_feature (1)..(1696): Ceres Seq. ID no. 12603956
  misc_feature: MA Experiment ID: 20000794 Result: Down-regulated in Transcription
  misc_feature: MA Experiment 20000794 PARAMETER Experiment Name: At_Petals_P Parameter: Age (day) Value: 23-25 days
  misc_feature: MA Experiment 20000794 PARAMETER Experiment Name: At_Petals_P Parameter: Plant Line Value: WS
  misc_feature: MA Experiment 20000794 PARAMETER Experiment Name: At_Petals_P Parameter: Tissue Value: Petals vs. Whole plant
  misc_feature: MA Experiment ID: 20001248 Result: Up-regulated in Transcription
  misc_feature: MA Experiment 20001248 PARAMETER Experiment Name: At_Far-red-induction_P Parameter: Age (day) Value: 7
  misc_feature: MA Experiment 20001248 PARAMETER Experiment Name: At_Far-red-induction_P Parameter: Light Value: Far-red vs. White
  misc_feature: MA Experiment 20001248 PARAMETER Experiment Name: At_Far-red-induction_P Parameter: Organism Value: A. thaliana
  misc_feature: MA Experiment 20001248 PARAMETER Experiment Name: At_Far-red-induction_P Parameter: Plant Line Value: Columbia
  misc_feature: MA Experiment 20001248 PARAMETER Experiment Name: At_Far-red-induction_P Parameter: Timepoint (hr) Value: 4
  misc_feature: MA Experiment 20001248 PARAMETER Experiment Name: At_Far-red-induction_P Parameter: Tissue Value: Whole Plant
  misc_feature: MA Experiment ID: 20001451 Result: Up-regulated in Transcription
  misc_feature: MA Experiment 20001451 PARAMETER Experiment Name: At_Far-red-induction_P Parameter: Age (day) Value: 7
  misc_feature: MA Experiment 20001451 PARAMETER Experiment Name: At_Far-red-induction_P Parameter: Light Value: Far-red vs. White
  misc_feature: MA Experiment 20001451 PARAMETER Experiment Name: At_Far-red-induction_P Parameter: Organism Value: A. thaliana
  misc_feature: MA Experiment 20001451 PARAMETER Experiment Name: At_Far-red-induction_P Parameter: Plant Line Value: Columbia
  misc_feature: MA Experiment 20001451 PARAMETER Experiment Name: At_Far-red-induction_P Parameter: Timepoint (hr) Value: 24
  misc_feature: MA Experiment 20001451 PARAMETER Experiment Name: At_Far-red-induction_P Parameter: Tissue Value: Whole Plant
tggtctggaggaaatagtaccagctaagctcgcagctcaaagctcagtgtttaataattgtatagcttttttggtgaacgaagagtcagatcggcgagcctgagatgggttggggttcggtgttgctattactggcggtggctcttctttgtcagagggcaagttcaatcggagctaactggggcacacaggcgtcgcacccacttccaccggacatagttgtgcggatgctaagagagaatggtattcagaaagtaaagctctttgacgccgaatacgacactctcagagctttgggcaaatccggaatcgaagtcatggttggtattcccaatgagatgcttgcgactctcgcctctagcctgaaagctgctgagaaatgggttgctaaaaatgtctctactcacatctccaccgacaacgtcaacatcagatatgtggctgttgggaatgaacctttcttgtctacttataatgggagctatctgagtactactttccctgcgttgaggaacatccaaattgcaattataaaggctggccttcagaaccaagtgaaggtcacttgtcccttgaacgctgatgtctatgacagctccaccacttttccttctggaggggacttcagggccaatatccgtgacctcatgatcactatcgtcaagttcttgagcgaaaatggcggtcctttcactgttaacatctacccttacatcagtctttacaccaaccccgatttcccagttgattacgccttctttgacggcaatgcacagcccctgaacgatggtgggactttttattacaacatgtttgatgcaaattacgacaccctagtccacgcgttggagaagaatgggtttggtaacatgcctatcattattggggaaattggttggcctactgatggggacagtaatgcgaatttggactacgctaagaagttcaaccaaggctttatggctcacatctcaggggggaaagggactccgaggagacctggccctatcgatgcatacctgttcagcttgatagacgaggacgccaagagtgttcagccaggatactttgagcgacactgggggatattcacatttgacggcttaccaaaatatgccttgaacctagggacaacgaacacaggagctctgatccaggccaaaggggtacgctacctagagaggaagtggtgtgtgatgaagccaaatgtgaggttggatgatccgcaggtagctccagccgtgagctacgcgtgtagccttggggactgtactagtcttggggttgggacgtcctgtgctaatcttgacgggaaacaaaacatatcgtatgcattcaacagttattatcagatacaggatcagcttgatacagcttgtaagttcccaaacatatcagaggtgaccaagacagatccatctactggaacttgcagatttccgattatgatagaaccttactacggtggggcagcccgggaacacgggttctttttcccactactgatggtggcagccatcgcagtctctattttttgatggtttcttcttgtcaatttgtaattctgtgtgatggcttgaactatttttttttcttcttgaattctgatttctcttccttacaccaagtgattattagagctgttttctgggaccaaactgaccttaaaacgatgccatattgccatgttcagtag

SEQ ID NO: 49652 - protein, 477 aa, Arabidopsis thaliana; identical to SEQ ID NO: 45752
  peptide (1)..(477): Ceres Seq. ID no. 12603957
  misc_feature (22)..(341): Pfam Name: Glycosyl hydrolases family 17 Pfam Description: Glycosyl hydrolases family 17
  misc_feature (6)..(477): Homolog of NCBI NO: 34395009 NR Description: putative 3-glucanase [Oryza sativa (japonica
  misc_feature (7)..(476): Homolog of NCBI NO: 31415977 NR Description: putative beta-1,3-glucanase
  misc_feature (7)..(473): Homolog of NCBI NO: 18483232 NR Description: 3-glucanase [Sorghum bicolor]
  misc_feature (19)..(461): Homolog of NCBI NO: 28269434 NR Description: putative beta-1,3 glucanase
  misc_feature (6)..(450): Homolog of NCBI NO: 15242078 NR Description: glycosyl hydrolase family 17; protein id:
  misc_feature (11)..(450): Homolog of NCBI NO: 30017525 NR Description: putative 1,3-beta-glucanase
  misc_feature (4)..(476): Homolog of NCBI NO: 30060382 NR Description: putative glucan endo-1,3-beta-glucosidase
  misc_feature (6)..(450): Homolog of NCBI NO: 15235840 NR Description: glycosyl hydrolase family 17; protein id:
  misc_feature (1)..(477): Homolog of NCBI NO: 16604491 NR Description: AT5g58090/k21l19_70 [Arabidopsis thaliana]
  misc_feature (1)..(477): Homolog of NCBI NO: 22327934 NR Description: glycosyl hydrolase family 17

SEQ ID NO: 49653 - protein, 436 aa, Arabidopsis thaliana; identical to SEQ ID NO: 45753
  peptide (1)..(436): Ceres Seq. ID no. 12603958
  misc_feature (1)..(300): Pfam Name: Glycosyl hydrolases family 17 Pfam Description: Glycosyl hydrolases family 17
  misc_feature (1)..(436): Homolog of NCBI NO: 34395009 NR Description: putative 3-glucanase [Oryza sativa (japonica
  misc_feature (1)..(435): Homolog of NCBI NO: 31415977 NR Description: putative beta-1,3-glucanase
  misc_feature (1)..(432): Homolog of NCBI NO: 18483232 NR Description: 3-glucanase [Sorghum bicolor]
  misc_feature (1)..(420): Homolog of NCBI NO: 28269434 NR Description: putative beta-1,3 glucanase
  misc_feature (1)..(409): Homolog of NCBI NO: 15242078 NR Description: glycosyl hydrolase family 17; protein id:
  misc_feature (1)..(409): Homolog of NCBI NO: 30017525 NR Description: putative 1,3-beta-glucanase
  misc_feature (1)..(435): Homolog of NCBI NO: 30060382 NR Description: putative glucan endo-1,3-beta-glucosidase
  misc_feature (1)..(409): Homolog of NCBI NO: 15235840 NR Description: glycosyl hydrolase family 17; protein id:
  misc_feature (1)..(436): Homolog of NCBI NO: 16604491 NR Description: AT5g58090/k21l19_70 [Arabidopsis thaliana]
  misc_feature (1)..(436): Homolog of NCBI NO: 22327934 NR Description: glycosyl hydrolase family 17

SEQ ID NO: 49654 - protein, 406 aa, Arabidopsis thaliana; identical to SEQ ID NO: 45754
  peptide (1)..(406): Ceres Seq. ID no. 12603959
  misc_feature (1)..(270): Pfam Name: Glycosyl hydrolases family 17 Pfam Description: Glycosyl hydrolases family 17
  misc_feature (1)..(406): Homolog of NCBI NO: 34395009 NR Description: putative 3-glucanase [Oryza sativa (japonica
  misc_feature (1)..(405): Homolog of NCBI NO: 31415977 NR Description: putative beta-1,3-glucanase
  misc_feature (1)..(402): Homolog of NCBI NO: 18483232 NR Description: 3-glucanase [Sorghum bicolor]
  misc_feature (1)..(390): Homolog of NCBI NO: 28269434 NR Description: putative beta-1,3 glucanase
  misc_feature (1)..(379): Homolog of NCBI NO: 15242078 NR Description: glycosyl hydrolase family 17; protein id:
  misc_feature (1)..(379): Homolog of NCBI NO: 30017525 NR Description: putative 1,3-beta-glucanase
  misc_feature (1)..(405): Homolog of NCBI NO: 30060382 NR Description: putative glucan endo-1,3-beta-glucosidase
  misc_feature (1)..(379): Homolog of NCBI NO: 15235840 NR Description: glycosyl hydrolase family 17; protein id:
  misc_feature (1)..(406): Homolog of NCBI NO: 16604491 NR Description: AT5g58090/k21l19_70 [Arabidopsis thaliana]
  misc_feature (1)..(406): Homolog of NCBI NO: 22327934 NR Description: glycosyl hydrolase family 17

SEQ ID NO: 49655 - DNA, 760 bp, Arabidopsis thaliana
  misc_feature (1)..(760): Ceres Seq. ID no. 14302976
  misc_feature: MA Experiment ID: 108434 Result: Up-regulated in Transcription
  misc_feature: MA Experiment 108434 PARAMETER Experiment Name: At_Root_Tips_cDNA_P Parameter: Tissue Value: Root Tips
  misc_feature: MA Experiment ID: 108569 Result: Down-regulated in Transcription
  misc_feature: MA Experiment 108569 PARAMETER Experiment Name: At_0.001%_MeJA__cDNA_P Parameter: Timepoint (hr) Value: 6
  misc_feature: MA Experiment 108569 PARAMETER Experiment Name: At_0.001%_MeJA__cDNA_P Parameter: Tissue Value: Aerial
  misc_feature: MA Experiment 108569 PARAMETER Experiment Name: At_0.001%_MeJA__cDNA_P Parameter: Treatment Value: 0.001% MeJA vs. No Treatment
  misc_feature: MA Experiment ID: 20000113 Result: Down-regulated in Transcription
  misc_feature: MA Experiment 20000113 PARAMETER Experiment Name: At_42deg_Heat_cDNA_P Parameter: Temperature (deg C) Value: 42 vs. 22
  misc_feature: MA Experiment 20000113 PARAMETER Experiment Name: At_42deg_Heat_cDNA_P Parameter: Timepoint (hr) Value: 8
  misc_feature: MA Experiment 20000113 PARAMETER Experiment Name: At_42deg_Heat_cDNA_P Parameter: Tissue Value: Aerial
  misc_feature: MA Experiment ID: 20000173 Result: Down-regulated in Transcription
  misc_feature: MA Experiment 20000173 PARAMETER Experiment Name: At_42deg_Heat_P Parameter: Age (day) Value: 14
  misc_feature: MA Experiment 20000173 PARAMETER Experiment Name: At_42deg_Heat_P Parameter: Organism Value: A. thaliana
  misc_feature: MA Experiment 20000173 PARAMETER Experiment Name: At_42deg_Heat_P Parameter: Plant Line Value: WS
  misc_feature: MA Experiment 20000173 PARAMETER Experiment Name: At_42deg_Heat_P Parameter: Temperature (deg C) Value: 42 vs. 22
  misc_feature: MA Experiment 20000173 PARAMETER Experiment Name: At_42deg_Heat_P Parameter: Timepoint (hr) Value: 6
  misc_feature: MA Experiment 20000173 PARAMETER Experiment Name: At_42deg_Heat_P Parameter: Tissue Value: Aerial
  misc_feature: MA Experiment ID: 20000224 Result: Down-regulated in Transcription
  misc_feature: MA Experiment ID: 20000234 Result: Up-regulated in Transcription
  misc_feature: MA Experiment 20000234 PARAMETER Experiment Name: At_Siliques_P Parameter: Age (day) Value: 21
  misc_feature: MA Experiment 20000234 PARAMETER Experiment Name: At_Siliques_P Parameter: Organism Value: A. thaliana
  misc_feature: MA Experiment 20000234 PARAMETER Experiment Name: At_Siliques_P Parameter: Plant Line Value: WS
  misc_feature: MA Experiment 20000234 PARAMETER Experiment Name: At_Siliques_P Parameter: Tissue Value: Less Than 5mm Siliques vs. Whole Plant
  misc_feature: MA Experiment ID: 20000264 Result: Up-regulated in Transcription
  misc_feature: MA Experiment 20000264 PARAMETER Experiment Name: At_Open_Flower_P Parameter: Age (day) Value: 21
  misc_feature: MA Experiment 20000264 PARAMETER Experiment Name: At_Open_Flower_P Parameter: Plant Line Value: WS
  misc_feature: MA Experiment 20000264 PARAMETER Experiment Name: At_Open_Flower_P Parameter: Tissue Value: Open Flower vs. Whole Plant
  misc_feature: MA Experiment ID: 20000265 Result: Up-regulated in Transcription
  misc_feature: MA Experiment 20000265 PARAMETER Experiment Name: At_Open_Flower_P Parameter: Age (day) Value: 21
  misc_feature: MA Experiment 20000265 PARAMETER Experiment Name: At_Open_Flower_P Parameter: Plant Line Value: WS
  misc_feature: MA Experiment 20000265 PARAMETER Experiment Name: At_Open_Flower_P Parameter: Tissue Value: Closed Flower vs. Whole Plant
  misc_feature: MA Experiment ID: 20000286 Result: Up-regulated in Transcription
  misc_feature: MA Experiment 20000286 PARAMETER Experiment Name: At_Open_Flower_P Parameter: Age (day) Value: 21
  misc_feature: MA Experiment 20000286 PARAMETER Experiment Name: At_Open_Flower_P Parameter: Plant Line Value: WS
  misc_feature: MA Experiment 20000286 PARAMETER Experiment Name: At_Open_Flower_P Parameter: Tissue Value: Half Open vs. Whole Plant
  misc_feature: MA Experiment ID: 20001905 Result: Down-regulated in Transcription
  misc_feature: MA Experiment 20001905 PARAMETER Experiment Name: At_Drought_Reproduction_P Parameter: Age (day) Value: 40
  misc_feature: MA Experiment 20001905 PARAMETER Experiment Name: At_Drought_Reproduction_P Parameter: Organism Value: A. thaliana
  misc_feature: MA Experiment 20001905 PARAMETER Experiment Name: At_Drought_Reproduction_P Parameter: Plant Line Value: WS
  misc_feature: MA Experiment 20001905 PARAMETER Experiment Name: At_Drought_Reproduction_P Parameter: Timepoint (day) Value: 10
  misc_feature: MA Experiment 20001905 PARAMETER Experiment Name: At_Drought_Reproduction_P Parameter: Tissue Value: Rosettes
  misc_feature: MA Experiment 20001905 PARAMETER Experiment Name: At_Drought_Reproduction_P Parameter: Treatment Value: Drought vs. No Drought
gctcactagtcccccccccccggaaaatctctgaaagtctttttgtttgaagaagatgacgcatgttgaagatgataaggaattcaaggagaaacctttggttcaggttctgagcgacgacgacagtgaagtgaaggaagccaaagacggaggaggtgaagaagttaccggcggcgacggtgaaggagaggctaatgtagaagaggaagacgacgaagcagaaaatgaagacgatgatgatgatgatgatgatgatgacgacgacgaggacgaggacgatgaagaaggggaggaggatcttgggacagagtacctagtgaggccggttggtgaggttgaagatgaggatgatgcaagtgattttgaccctgaggagaatggcttggatgaagaagaaggtgatgaagagattgaagaagatgatgttgatgaggacatcagcttgagtgctggcaaatctgagcctctgtccaagaggaagagggttgctaaggaccacagtgagcaaggagatgtcactggtgataacattaggccttctaaacggtagttcttctaacttcgaactgatctcaatccaagaagaaagtcagaaattgattcgaattctcagtattttgaatcattcgttgggttgatatagtttttaatctaatggtagtagtgttgcttagagcttaatggattgttgtttcttctttatgttccttgagactgctttcaaacaagtttaagtattcaacgcttttcttttcaaggg

SEQ ID NO: 49656 - protein, 164 aa, Arabidopsis thaliana
  peptide (1)..(164): Ceres Seq. ID no. 14302977
  misc_feature (19)..(151): Pfam Name: Chromadorea ALT protein Pfam Description: Chromadorea ALT protein
  misc_feature (11)..(127): Homolog of NCBI NO: 35210492 NR Description: aspartic acid-rich protein aspolin1 [Theragra
  misc_feature (5)..(127): Homolog of NCBI NO: 23509612 NR Description: hypothetical protein [Plasmodium falciparum 3D7]
  misc_feature (5)..(127): Homolog of NCBI NO: 23481405 NR Description: hypothetical protein [Plasmodium yoelii yoelii]
  misc_feature (5)..(127): Homolog of NCBI NO: 23509612 NR Description: hypothetical protein [Plasmodium falciparum 3D7]
  misc_feature (1)..(135): Homolog of NCBI NO: 23481405 NR Description: hypothetical protein [Plasmodium yoelii yoelii]
  misc_feature (1)..(128): Homolog of NCBI NO: 18401985 NR Description: expressed protein [Arabidopsis thaliana]
  misc_feature (21)..(157): Homolog of NCBI NO: 34894890 NR Description: B1140D12.10 [Oryza sativa (japonica
  misc_feature (5)..(164): Homolog of NCBI NO: 18401985 NR Description: expressed protein [Arabidopsis thaliana]
  misc_feature (1)..(164): Homolog of NCBI NO: 28393370 NR Description: unknown protein [Arabidopsis thaliana]
  misc_feature (1)..(164): Homolog of NCBI NO: 30684391 NR Description: expressed protein [Arabidopsis thaliana]
MTHVEDDKEFKEKPLVQVLSDDDSEVKEAKDGGGEEVTGGDGEGEANVEEEDDEAENEDDDDDDDDDDDDEDEDDEEGEEDLGTEYLVRPVGEVEDEDDASDFDPEENGLDEEEGDEEIEEDDVDEDISLSAGKSEPLSKRKRVAKDHSEQGDVTGDNIRPSKR

SEQ ID NO: 49657 - DNA, 1239 bp, Arabidopsis thaliana
  misc_feature (1)..(1239): Ceres Seq. ID no. 14313001
  misc_feature: MA Experiment ID: 108434 Result: Up-regulated in Transcription
  misc_feature: MA Experiment 108434 PARAMETER Experiment Name: At_Root_Tips_cDNA_P Parameter: Tissue Value: Root Tips
  misc_feature: MA Experiment ID: 20000111 Result: Down-regulated in Transcription
  misc_feature: MA Experiment 20000111 PARAMETER Experiment Name: At_42deg_Heat_cDNA_P Parameter: Temperature (deg C) Value: 42 vs. 22
  misc_feature: MA Experiment 20000111 PARAMETER Experiment Name: At_42deg_Heat_cDNA_P Parameter: Timepoint (hr) Value: 6
  misc_feature: MA Experiment 20000111 PARAMETER Experiment Name: At_42deg_Heat_cDNA_P Parameter: Tissue Value: Aerial
  misc_feature: MA Experiment ID: 20000113 Result: Down-regulated in Transcription
  misc_feature: MA Experiment 20000113 PARAMETER Experiment Name: At_42deg_Heat_cDNA_P Parameter: Temperature (deg C) Value: 42 vs. 22
  misc_feature: MA Experiment 20000113 PARAMETER Experiment Name: At_42deg_Heat_cDNA_P Parameter: Timepoint (hr) Value: 8
  misc_feature: MA Experiment 20000113 PARAMETER Experiment Name: At_42deg_Heat_cDNA_P Parameter: Tissue Value: Aerial
aagcaaaacaatcggagaaagttgatggaggagatgttcgttttgtgaacgcttcaatggcataaatttccggccatcacatttcttctactttctctttctctctcccttgttgttgttctctagaattcgattcatcgttgttaacgtcgtccattcttcttctttgatcccttctttgatctctcacatttccgattccaatttagggtttcctctcttttcacatttctagggtttttcttgttccctttgtaccggagatggtgaattgaaaggaaaaataaaacgcttttgagagcttatatttgaggttgtttcctcaagttttgtagatctgaggttgctatttttgaattagagattctttttttttttcaaaattttgtttgttgtgatcatacatagacgtacgtagctccatttctggtggagaaggaagaagaagagaaatgagcgcttcgaggttcataaagtgtgtcaccgttggcgacggagctgttggtaaaacctgtttgctgatttcttacaccagcaacacttttcctacggattatgtaccgactgttttcgataactttagcgcaaatgtggttgttaatggagccactgtgaatcttgggctatgggataccgcagggcaggaggattataacagattaagacctttgagttaccgcggtgctgatgttttcatcttagcattctctcttatcagtaaggctagttatgagaatgtctccaagaagtggatcccagagctgaagcattatgcccctggtgtccctatagttcttgttggaaccaaactagatcttcgggatgacaaacagttcttcattgaccaccctggcgctgtaccaattactactgctcagggagaggaactgaagaaactaattggagctcccgcatacatcgagtgcagttcaaaaacacaagagaacgtgaaaggagtatttgatgcagcgatccgagtggttcttcaacctccaaagcagaagaaaaagaaaagcaaagcacaaaaagcctgctccattttgtaatttctctacgcttctcttacgtatctctctctgtctctctgtctcttccactcttctagtgaaggcttaagaagaaaacacattgggcttaaaaattgttccagagttcgttgtgataagctctcttaatccttaaaaaaacgattatttctgtttattgatgaatagtttccagctttagctgagacctaac

SEQ ID NO: 49658 - protein, 197 aa, Arabidopsis thaliana; identical to SEQ ID NO: 22405
  peptide (1)..(197): Ceres Seq. ID no. 14313002
  misc_feature (8)..(179): Pfam Name: Ras family Pfam Description: Ras family
  misc_feature (1)..(197): Homolog of NCBI NO: 4097581 NR Description: NTGP2 [Nicotiana tabacum]
  misc_feature (1)..(196): Homolog of NCBI NO: 27413411 NR Description: putative ROP family GTPase [Brassica napus]
  misc_feature (1)..(197): Homolog of NCBI NO: 20269985 NR Description: small G-protein ROP6 [Medicago truncatula]
  misc_feature (1)..(197): Homolog of NCBI NO: 14278856 NR Description: Rac-like GTPase 1 [Nicotiana tabacum]
  misc_feature (1)..(197): Homolog of NCBI NO: 2500199 NR Description: RAC-LIKE GTP BINDING PROTEIN RHO1
  misc_feature (1)..(197): Homolog of NCBI NO: 27413417 NR Description: putative ROP family GTPase [Brassica napus]
  misc_feature (1)..(197): Homolog of NCBI NO: 15230443 NR Description: GTP binding protein, putative [Arabidopsis
  misc_feature (1)..(197): Homolog of NCBI NO: 2500195 NR Description: RAC-LIKE GTP BINDING PROTEIN RHO1
  misc_feature (1)..(197): Homolog of NCBI NO: 15233418 NR Description: GTP-binding protein, putative [Arabidopsis
  misc_feature (1)..(197): Homolog of NCBI NO: 15227902 NR Description: Rac-like GTP-binding protein (ARAC1) [Arabidopsis

SEQ ID NO: 49659 - DNA, 1663 bp, Arabidopsis thaliana; identical to SEQ ID NO: 30264
  misc_feature (1)..(1663): Ceres Seq. ID no. 13591657
  misc_feature: MA Experiment ID: 108579 Result: Down-regulated in Transcription
  misc_feature: MA Experiment 108579 PARAMETER Experiment Name: At_4deg_Cold_cDNA_P Parameter: Temperature (deg C) Value: 4 vs. 22
  misc_feature: MA Experiment 108579 PARAMETER Experiment Name: At_4deg_Cold_cDNA_P Parameter: Timepoint (hr) Value: 6
  misc_feature: MA Experiment 108579 PARAMETER Experiment Name: At_4deg_Cold_cDNA_P Parameter: Tissue Value: Aerial

SEQ ID NO: 49660 - protein, 476 aa, Arabidopsis thaliana; identical to SEQ ID NO: 30265
  peptide (1)..(476): Ceres Seq. ID no. 13591658
  misc_feature (69)..(476): Pfam Name: Aminotransferase class-III Pfam Description: Aminotransferase class-III
  misc_feature (69)..(476): Pfam Name: Aminotransferase class-III Pfam Description: Aminotransferase class-III
  misc_feature (69)..(476): Pfam Name: Aminotransferase class-III Pfam Description: Aminotransferase class-III
  misc_feature (132)..(466): Homolog of NCBI NO: 7434175 NR Description: hypothetical protein T19P19.50 - Arabidopsis
  misc_feature (1)..(229): Homolog of NCBI NO: 28574759 NR Description: CG11241-PA [Drosophila melanogaster]
  misc_feature (1)..(229): Homolog of NCBI NO: 16198011 NR Description: LD24726p [Drosophila melanogaster]
  misc_feature (232)..(474): Homolog of NCBI NO: 28574759 NR Description: CG11241-PA [Drosophila melanogaster]
  misc_feature (232)..(474): Homolog of NCBI NO: 16198011 NR Description: LD24726p [Drosophila melanogaster]
  misc_feature (132)..(466): Homolog of NCBI NO: 7434175 NR Description: hypothetical protein T19P19.50 - Arabidopsis
  misc_feature (1)..(229): Homolog of NCBI NO: 16198011 NR Description: LD24726p [Drosophila melanogaster]
  misc_feature (232)..(474): Homolog of NCBI NO: 16198011 NR Description: LD24726p [Drosophila melanogaster]
  misc_feature (232)..(474): Homolog of NCBI NO: 28574759 NR Description: CG11241-PA [Drosophila melanogaster]
  misc_feature (1)..(229): Homolog of NCBI NO: 16198011 NR Description: LD24726p [Drosophila melanogaster]
  misc_feature (1)..(229): Homolog of NCBI NO: 28574759 NR Description: CG11241-PA [Drosophila melanogaster]
  misc_feature (132)..(466): Homolog of NCBI NO: 7434175 NR Description: hypothetical protein T19P19.50 - Arabidopsis
  misc_feature (1)..(476): Homolog of NCBI NO: 5731259 NR Description: alanine:glyoxylate aminotransferase 2 homolog
  misc_feature (1)..(476): Homolog of NCBI NO: 18420498 NR Description: alanine--glyoxylate aminotransferase
  misc_feature (3)..(476): Homolog of NCBI NO: 15224499 NR Description: alanine--glyoxylate aminotransferase
  misc_feature (3)..(476): Homolog of NCBI NO: 15028237 NR Description: putative beta-alanine-pyruvate aminotransferase
  misc_feature (39)..(476): Homolog of NCBI NO: 15231974 NR Description: alanine--glyoxylate aminotransferase
  misc_feature (1)..(476): Homolog of NCBI NO: 5731259 NR Description: alanine:glyoxylate aminotransferase 2 homolog
  misc_feature (1)..(476): Homolog of NCBI NO: 18420498 NR Description: alanine--glyoxylate aminotransferase
  misc_feature (3)..(476): Homolog of NCBI NO: 15224499 NR Description: alanine--glyoxylate aminotransferase
  misc_feature (3)..(476): Homolog of NCBI NO: 15028237 NR Description: putative beta-alanine-pyruvate aminotransferase
  misc_feature (39)..(476): Homolog of NCBI NO: 15231974 NR Description: alanine--glyoxylate aminotransferase
  misc_feature (232)..(474): Homolog of NCBI NO: 16198011 NR Description: LD24726p [Drosophila melanogaster]
  misc_feature (232)..(474): Homolog of NCBI NO: 28574759 NR Description: CG11241-PA [Drosophila melanogaster]
  misc_feature (1)..(229): Homolog of NCBI NO: 28574759 NR Description: CG11241-PA [Drosophila melanogaster]
  misc_feature (39)..(476): Homolog of NCBI NO: 15231974 NR Description: alanine--glyoxylate aminotransferase
  misc_feature (3)..(476): Homolog of NCBI NO: 15028237 NR Description: putative beta-alanine-pyruvate aminotransferase
  misc_feature (3)..(476): Homolog of NCBI NO: 15224499 NR Description: alanine--glyoxylate aminotransferase
  misc_feature (1)..(476): Homolog of NCBI NO: 18420498 NR Description: alanine--glyoxylate aminotransferase
  misc_feature (1)..(476): Homolog of NCBI NO: 5731259 NR Description: alanine:glyoxylate aminotransferase 2 homolog

SEQ ID NO: 49661 - protein, 391 aa, Arabidopsis thaliana; identical to SEQ ID NO: 30266
  peptide (1)..(391): Ceres Seq. ID no. 13591659
  misc_feature (1)..(391): Pfam Name: Aminotransferase class-III Pfam Description: Aminotransferase class-III
  misc_feature (1)..(391): Pfam Name: Aminotransferase class-III Pfam Description: Aminotransferase class-III
  misc_feature (1)..(391): Pfam Name: Aminotransferase class-III Pfam Description: Aminotransferase class-III
  misc_feature (47)..(381): Homolog of NCBI NO: 7434175 NR Description: hypothetical protein T19P19.50 - Arabidopsis
  misc_feature (1)..(144): Homolog of NCBI NO: 28574759 NR Description: CG11241-PA [Drosophila melanogaster]
  misc_feature (1)..(144): Homolog of NCBI NO: 16198011 NR Description: LD24726p [Drosophila melanogaster]
  misc_feature (147)..(389): Homolog of NCBI NO: 28574759 NR Description: CG11241-PA [Drosophila melanogaster]
  misc_feature (147)..(389): Homolog of NCBI NO: 16198011 NR Description: LD24726p [Drosophila melanogaster]
  misc_feature (47)..(381): Homolog of NCBI NO: 7434175 NR Description: hypothetical protein T19P19.50 - Arabidopsis
  misc_feature (1)..(144): Homolog of NCBI NO: 16198011 NR Description: LD24726p [Drosophila melanogaster]
  misc_feature (147)..(389): Homolog of NCBI NO: 16198011 NR Description: LD24726p [Drosophila melanogaster]
  misc_feature (147)..(389): Homolog of NCBI NO: 28574759 NR Description: CG11241-PA [Drosophila melanogaster]
  misc_feature (1)..(144): Homolog of NCBI NO: 16198011 NR Description: LD24726p [Drosophila melanogaster]
  misc_feature (1)..(144): Homolog of NCBI NO: 28574759 NR Description: CG11241-PA [Drosophila melanogaster]
  misc_feature (47)..(381): Homolog of NCBI NO: 7434175 NR Description: hypothetical protein T19P19.50 - Arabidopsis
  misc_feature (1)..(391): Homolog of NCBI NO: 5731259 NR Description: alanine:glyoxylate aminotransferase 2 homolog
  misc_feature (1)..(391): Homolog of NCBI NO: 18420498 NR Description: alanine--glyoxylate aminotransferase
  misc_feature (1)..(391): Homolog of NCBI NO: 15224499 NR Description: alanine--glyoxylate aminotransferase
  misc_feature (1)..(391): Homolog of NCBI NO: 15028237 NR Description: putative beta-alanine-pyruvate aminotransferase
  misc_feature (1)..(391): Homolog of NCBI NO: 15231974 NR Description: alanine--glyoxylate aminotransferase
  misc_feature (1)..(391): Homolog of NCBI NO: 5731259 NR Description: alanine:glyoxylate aminotransferase 2 homolog
  misc_feature (1)..(391): Homolog of NCBI NO: 18420498 NR Description: alanine--glyoxylate aminotransferase
  misc_feature (1)..(391): Homolog of NCBI NO: 15224499 NR Description: alanine--glyoxylate aminotransferase
  misc_feature (1)..(391): Homolog of NCBI NO: 15028237 NR Description: putative beta-alanine-pyruvate aminotransferase
  misc_feature (1)..(391): Homolog of NCBI NO: 15231974 NR Description: alanine--glyoxylate aminotransferase
  misc_feature (147)..(389): Homolog of NCBI NO: 16198011 NR Description: LD24726p [Drosophila melanogaster]
  misc_feature (147)..(389): Homolog of NCBI NO: 28574759 NR Description: CG11241-PA [Drosophila melanogaster]
  misc_feature (1)..(144): Homolog of NCBI NO: 28574759 NR Description: CG11241-PA [Drosophila melanogaster]
  misc_feature (1)..(391): Homolog of NCBI NO: 15231974 NR Description: alanine--glyoxylate aminotransferase
  misc_feature (1)..(391): Homolog of NCBI NO: 15028237 NR Description: putative beta-alanine-pyruvate aminotransferase
  misc_feature (1)..(391): Homolog of NCBI NO: 15224499 NR Description: alanine--glyoxylate aminotransferase
  misc_feature (1)..(391): Homolog of NCBI NO: 18420498 NR Description: alanine--glyoxylate aminotransferase
  misc_feature (1)..(391): Homolog of NCBI NO: 5731259 NR Description: alanine:glyoxylate aminotransferase 2 homolog

SEQ ID NO: 49662 - protein, 327 aa, Arabidopsis thaliana; identical to SEQ ID NO: 30267
  peptide (1)..(327): Ceres Seq. ID no. 13591660
  misc_feature (1)..(327): Pfam Name: Aminotransferase class-III Pfam Description: Aminotransferase class-III
  misc_feature (1)..(327): Pfam Name: Aminotransferase class-III Pfam Description: Aminotransferase class-III
  misc_feature (1)..(327): Pfam Name: Aminotransferase class-III Pfam Description: Aminotransferase class-III
  misc_feature (1)..(317): Homolog of NCBI NO: 7434175 NR Description: hypothetical protein T19P19.50 - Arabidopsis
  misc_feature (1)..(80): Homolog of NCBI NO: 28574759 NR Description: CG11241-PA [Drosophila melanogaster]
  misc_feature (1)..(80): Homolog of NCBI NO: 16198011 NR Description: LD24726p [Drosophila melanogaster]
  misc_feature (83)..(325): Homolog of NCBI NO: 28574759 NR Description: CG11241-PA [Drosophila melanogaster]
  misc_feature (83)..(325): Homolog of NCBI NO: 16198011 NR Description: LD24726p [Drosophila melanogaster]
  misc_feature (1)..(317): Homolog of NCBI NO: 7434175 NR Description: hypothetical protein T19P19.50 - Arabidopsis
  misc_feature (1)..(80): Homolog of NCBI NO: 16198011 NR Description: LD24726p [Drosophila melanogaster]
  misc_feature (83)..(325): Homolog of NCBI NO: 16198011 NR Description: LD24726p [Drosophila melanogaster]
  misc_feature (83)..(325): Homolog of NCBI NO: 28574759 NR Description: CG11241-PA [Drosophila melanogaster]
  misc_feature (1)..(80): Homolog of NCBI NO: 16198011 NR Description: LD24726p [Drosophila melanogaster]
  misc_feature (1)..(80): Homolog of NCBI NO: 28574759 NR Description: CG11241-PA [Drosophila melanogaster]
  misc_feature (1)..(317): Homolog of NCBI NO: 7434175 NR Description: hypothetical protein T19P19.50 - Arabidopsis
  misc_feature (1)..(327): Homolog of NCBI NO: 5731259 NR Description: alanine:glyoxylate aminotransferase 2 homolog
  misc_feature (1)..(327): Homolog of NCBI NO: 18420498 NR Description: alanine--glyoxylate aminotransferase
  misc_feature (1)..(327): Homolog of NCBI NO: 15224499 NR Description: alanine--glyoxylate aminotransferase
  misc_feature (1)..(327): Homolog of NCBI NO: 15028237 NR Description: putative beta-alanine-pyruvate aminotransferase
  misc_feature (1)..(327): Homolog of NCBI NO: 15231974 NR Description: alanine--glyoxylate aminotransferase
  misc_feature (1)..(327): Homolog of NCBI NO: 5731259 NR Description: alanine:glyoxylate aminotransferase 2 homolog
  misc_feature (1)..(327): Homolog of NCBI NO: 18420498 NR Description: alanine--glyoxylate aminotransferase
  misc_feature (1)..(327): Homolog of NCBI NO: 15224499 NR Description: alanine--glyoxylate aminotransferase
  misc_feature (1)..(327): Homolog of NCBI NO: 15028237 NR Description: putative beta-alanine-pyruvate aminotransferase
  misc_feature (1)..(327): Homolog of NCBI NO: 15231974 NR Description: alanine--glyoxylate aminotransferase
  misc_feature (83)..(325): Homolog of NCBI NO: 16198011 NR Description: LD24726p [Drosophila melanogaster]
  misc_feature (83)..(325): Homolog of NCBI NO: 28574759 NR Description: CG11241-PA [Drosophila melanogaster]
  misc_feature (1)..(80): Homolog of NCBI NO: 28574759 NR Description: CG11241-PA [Drosophila melanogaster]
  misc_feature (1)..(327): Homolog of NCBI NO: 15231974 NR Description: alanine--glyoxylate aminotransferase
  misc_feature (1)..(327): Homolog of NCBI NO: 15028237 NR Description: putative beta-alanine-pyruvate aminotransferase
  misc_feature (1)..(327): Homolog of NCBI NO: 15224499 NR Description: alanine--glyoxylate aminotransferase
  misc_feature (1)..(327): Homolog of NCBI NO: 18420498 NR Description: alanine--glyoxylate aminotransferase
  misc_feature (1)..(327): Homolog of NCBI NO: 5731259 NR Description: alanine:glyoxylate aminotransferase 2 homolog

SEQ ID NO: 49663 - DNA, 1895 bp, Arabidopsis thaliana
  misc_feature (1)..(1895): Ceres Seq. ID no. 12592233
  misc_feature: MA Experiment ID: 20000179 Result: Up-regulated in Transcription
  misc_feature: MA Experiment 20000179 PARAMETER Experiment Name: At_Germinating_Seeds_P Parameter: Age (hr) Value: 6 vs. 0
  misc_feature: MA Experiment 20000179 PARAMETER Experiment Name: At_Germinating_Seeds_P Parameter: Tissue Value: Germinating Seeds
  misc_feature: MA Experiment ID: 20001560 Result: Down-regulated in Transcription
  misc_feature: MA Experiment 20001560 PARAMETER Experiment Name: At_Drought_Soil_Dry_P Parameter: Age (day) Value: 28
  misc_feature: MA Experiment 20001560 PARAMETER Experiment Name: At_Drought_Soil_Dry_P Parameter: Organism Value: A. thaliana
  misc_feature: MA Experiment 20001560 PARAMETER Experiment Name: At_Drought_Soil_Dry_P Parameter: Plant Line Value: WS
  misc_feature: MA Experiment 20001560 PARAMETER Experiment Name: At_Drought_Soil_Dry_P Parameter: Post Timepoint (hr) Value: None
  misc_feature: MA Experiment 20001560 PARAMETER Experiment Name: At_Drought_Soil_Dry_P Parameter: Post-Treatment Value: None
  misc_feature: MA Experiment 20001560 PARAMETER Experiment Name: At_Drought_Soil_Dry_P Parameter: Timepoint (day) Value: 14
  misc_feature: MA Experiment 20001560 PARAMETER Experiment Name: At_Drought_Soil_Dry_P Parameter: Treatment Value: Drought vs. No Drought
ataactccaattccaccgctgcgacgagagaggagcacagagatctctcgtttcgtttttcccggaaaatctgaggaaataaaattaagcaaaagtttccatcgatcctctgagaaaaaattcgactctctagtccacgagttttttttttgttcacctctctctttttcgttaatctctctcaaacaacgcctcttcatcatttccttgtaattcactttcttctccgttttttttttttttgaatctctcttcgtccttcgccgtttcgatttcttgtttcctctacttgatgatgaaattttgatcagatctagtgtagaatagttaggatttacccagagagattatgtttatggatcgagagagacggagttctggtcgtaatgggactcctgaatatagcaatggcaaattccgagatgataatggttttggattcttagatcgattggaaaattgccgtgagaagagtcctcctagatcgaagatccttcggatcccgtctccgacctcgtctcctccaccttctagctcttctccgccatttcatggttccaattcgcctgaccgtggatatatcgaacaccgcatctccaagtttgatactctcgccggcgttgccatcaaatacggtgttgaggttgcagatgtgaaaaagatgaataaccttgttactgatcttcaaatgtttgctctcaagtctcttcagattccgttacctgggagacatcctccttctccatgtttatctaatggctccttaaaccatggagagggatgttcatgccacgaaccggaatcaccaaaccatagcgaacaggaagtgtttgactcatttcagtctctgagattgaaatcttcggaaaagaaagtttctccagccatgtactcactgcaaggttattacgggctaaaaccagcagacagaacagtctctgatggaggatgcttcgagatgggaaattacaagacggaaacttctcatcatatcttcaacaacggtgataacggatatctcagacctttcccatccacaaatactcccttaaatcaccacaggaaatctagaagcttggtcaatgcgcttatcgaagaggttaaccaatcacctgataataatactcaagaaccaacatctgataagtttatgagaagacgccaaaaatctgaggccgatttttcatcccggactccagaacttgtgttgaaagaagagaacggtagcagcaatggcggatttttatcaatagctggaaaaggcttagctttgagatcgaaagcgtcaagcagaaccaatctagcagcagaatctgagaacggtaatttcaatccggtatcaatgaacttgatggatgctccagtttcagacagctttagcagtgtaagaaaatcgtcgagtgcatcgagtctacaagatccagatggtaacagcaataatggttcgttgtcgctatggccaacgtcaaagtggagcttgaaaccggatttgcttacacctgcggccattacaagttccatctttgatggattaccaaagcctttaactggtcgaagaaacaaaacggctctggactaaacacaaggtcagtttctggttatttataactgccttattcttttttggggtactatacaaatcaattgtcaaaagaagctatttagcttaatgcggagtaaatacaaaagtaaagagattagaggaaaacaaaattgaaggaaggaagaaagaaaaacttccggaaattgaaatttataaggaagcttctgatgatgtaatgattgggtcttttttgtaagttatattctgtaccattttctgggtgggggttgtatcgacaaaatctgtagcgtagttttattttatttttgatttaatgatacattgtcacaac

SEQ ID NO: 49664 - protein, 409 aa, Arabidopsis thaliana
  peptide (1)..(409): Ceres Seq. ID no. 12592234
  misc_feature (80)..(123): Pfam Name: LysM domain Pfam Description: LysM domain
  misc_feature (58)..(125): Homolog of NCBI NO: 24431595 NR Description: Hypothetical protein [Oryza sativa (japonica
  misc_feature (256)..(409): Homolog of NCBI NO: 37535512 NR Description: unknown protein [Oryza sativa (japonica
  misc_feature (49)..(281): Homolog of NCBI NO: 37535512 NR Description: unknown protein [Oryza sativa (japonica
  misc_feature (1)..(409): Homolog of NCBI NO: 9759371 NR Description: gene_id:MYJ24.12~unknown protein [Arabidopsis
  misc_feature (1)..(409): Homolog of NCBI NO: 22327003 NR Description: unknown protein
  misc_feature (3)..(409): Homolog of NCBI NO: 11291586 NR Description: hypothetical protein T22D6.140 - Arabidopsis
  misc_feature (1)..(409): Homolog of NCBI NO: 30682281 NR Description: expressed protein [Arabidopsis thaliana]
MFMDRERRSSGRNGTPEYSNGKFRDDNGFGFLDRLENCREKSPPRSKILRIPSPTSSPPPSSSSPPFHGSNSPDRGYIEHRISKFDTLAGVAIKYGVEVADVKKMNNLVTDLQMFALKSLQIPLPGRHPPSPCLSNGSLNHGEGCSCHEPESPNHSEQEVFDSFQSLRLKSSEKKVSPAMYSLQGYYGLKPADRTVSDGGCFEMGNYKTETSHHIFNNGDNGYLRPFPSTNTPLNHHRKSRSLVNALIEEVNQSPDNNTQEPTSDKFMRRRQKSEADFSSRTPELVLKEENGSSNGGFLSIAGKGLALRSKASSRTNLAAESENGNFNPVSMNLMDAPVSDSFSSVRKSSSASSLQDPDGNSNNGSLSLWPTSKWSLKPDLLTPAAITSSIFDGLPKPLTGRRNKTALD

SEQ ID NO: 49665 - protein, 407 aa, Arabidopsis thaliana
  peptide (1)..(407): Ceres Seq. ID no. 12592235
  misc_feature (78)..(121): Pfam Name: LysM domain Pfam Description: LysM domain
  misc_feature (56)..(123): Homolog of NCBI NO: 24431595 NR Description: Hypothetical protein [Oryza sativa (japonica
  misc_feature (254)..(407): Homolog of NCBI NO: 37535512 NR Description: unknown protein [Oryza sativa (japonica
  misc_feature (47)..(279): Homolog of NCBI NO: 37535512 NR Description: unknown protein [Oryza sativa (japonica
  misc_feature (1)..(407): Homolog of NCBI NO: 9759371 NR Description: gene_id:MYJ24.12~unknown protein [Arabidopsis
  misc_feature (1)..(407): Homolog of NCBI NO: 22327003 NR Description: unknown protein
  misc_feature (1)..(407): Homolog of NCBI NO: 11291586 NR Description: hypothetical protein T22D6.140 - Arabidopsis
  misc_feature (1)..(407): Homolog of NCBI NO: 30682281 NR Description: expressed protein [Arabidopsis thaliana]
MDRERRSSGRNGTPEYSNGKFRDDNGFGFLDRLENCREKSPPRSKILRIPSPTSSPPPSSSSPPFHGSNSPDRGYIEHRISKFDTLAGVAIKYGVEVADVKKMNNLVTDLQMFALKSLQIPLPGRHPPSPCLSNGSLNHGEGCSCHEPESPNHSEQEVFDSFQSLRLKSSEKKVSPAMYSLQGYYGLKPADRTVSDGGCFEMGNYKTETSHHIFNNGDNGYLRPFPSTNTPLNHHRKSRSLVNALIEEVNQSPDNNTQEPTSDKFMRRRQKSEADFSSRTPELVLKEENGSSNGGFLSIAGKGLALRSKASSRTNLAAESENGNFNPVSMNLMDAPVSDSFSSVRKSSSASSLQDPDGNSNNGSLSLWPTSKWSLKPDLLTPAAITSSIFDGLPKPLTGRRNKTALD

SEQ ID NO: 49666 - protein, 305 aa, Arabidopsis thaliana
  peptide (1)..(305): Ceres Seq. ID no. 12592236
  misc_feature (1)..(21): Homolog of NCBI NO: 24431595 NR Description: Hypothetical protein [Oryza sativa (japonica
  misc_feature (152)..(305): Homolog of NCBI NO: 37535512 NR Description: unknown protein [Oryza sativa (japonica
  misc_feature (1)..(177): Homolog of NCBI NO: 37535512 NR Description: unknown protein [Oryza sativa (japonica
  misc_feature (1)..(305): Homolog of NCBI NO: 9759371 NR Description: gene_id:MYJ24.12~unknown protein [Arabidopsis
  misc_feature (1)..(305): Homolog of NCBI NO: 22327003 NR Description: unknown protein
  misc_feature (1)..(305): Homolog of NCBI NO: 11291586 NR Description: hypothetical protein T22D6.140 - Arabidopsis
  misc_feature (1)..(305): Homolog of NCBI NO: 30682281 NR Description: expressed protein [Arabidopsis thaliana]
MNNLVTDLQMFALKSLQIPLPGRHPPSPCLSNGSLNHGEGCSCHEPESPNHSEQEVFDSFQSLRLKSSEKKVSPAMYSLQGYYGLKPADRTVSDGGCFEMGNYKTETSHHIFNNGDNGYLRPFPSTNTPLNHHRKSRSLVNALIEEVNQSPDNNTQEPTSDKFMRRRQKSEADFSSRTPELVLKEENGSSNGGFLSIAGKGLALRSKASSRTNLAAESENGNFNPVSMNLMDAPVSDSFSSVRKSSSASSLQDPDGNSNNGSLSLWPTSKWSLKPDLLTPAAITSSIFDGLPKPLTGRRNKTALD

SEQ ID NO: 49667 - DNA, 940 bp, Arabidopsis thaliana
  misc_feature (1)..(940): Ceres Seq. ID no. 12591255
  misc_feature: MA Experiment ID: 20000315 Result: Down-regulated in Transcription
  misc_feature: MA Experiment 20000315 PARAMETER Experiment Name: At_14day_Shoots-Roots_Sub_P Parameter: Age (day) Value: 14
  misc_feature: MA Experiment 20000315 PARAMETER Experiment Name: At_14day_Shoots-Roots_Sub_P Parameter: Organism Value: A. thaliana
  misc_feature: MA Experiment 20000315 PARAMETER Experiment Name: At_14day_Shoots-Roots_Sub_P Parameter: Plant Line Value: WS
  misc_feature: MA Experiment 20000315 PARAMETER Experiment Name: At_14day_Shoots-Roots_Sub_P Parameter: Tissue Value: Shoots vs. Whole Plant
  misc_feature: MA Experiment ID: 20000328 Result: Down-regulated in Transcription
  misc_feature: MA Experiment 20000328 PARAMETER Experiment Name: At_42deg_Heat_Sub_P Parameter: Age (day) Value: 14
  misc_feature: MA Experiment 20000328 PARAMETER Experiment Name: At_42deg_Heat_Sub_P Parameter: Organism Value: A. thaliana
  misc_feature: MA Experiment 20000328 PARAMETER Experiment Name: At_42deg_Heat_Sub_P Parameter: Plant Line Value: WS
  misc_feature: MA Experiment 20000328 PARAMETER Experiment Name: At_42deg_Heat_Sub_P Parameter: Temperature (deg C) Value: 42 vs. 22
  misc_feature: MA Experiment 20000328 PARAMETER Experiment Name: At_42deg_Heat_Sub_P Parameter: Timepoint (hr) Value: 6
  misc_feature: MA Experiment 20000328 PARAMETER Experiment Name: At_42deg_Heat_Sub_P Parameter: Tissue Value: Aerial
aattccctgaaaaaatttcataattcaaagagtgttccttggagagaaaagtttcatcctttcaacagatctgaagagggtcaattgaaattcgttttcacgattcatccgccatttttccaggaaaaaaaacaaaaggtgagatcaaagaggaaaaatggcgcatagggtagaacaggattatgattatttgttcaagatcgtgttgattggtgattctggtgtcgggaaaacaaacatcttgtctagattcacaaggaatgagttttgtttggaatctaagtccactattggtgttgaattcgccaccagaactcttcaggttgaaggaaagactgttaaggcccagatatgggacactgcaggtcaagagcggtacagagctatcacaagtgcttattacagaggagcggtaggtgcacttcttgtctatgacatcactaaaagacaaacctttgacaatgttctgaggtggctacgtgaactaagagaccatgcggattccaacattgtgatcatgatggctgggaacaaagctgatctaaaccacttgagatcagttgcggaggaagatggacagactctagctgagacagaaggtctctctttcttggagacatcagctcttgaagccaccaatgtggagaaagcatttcaaaccgtgttagcagagatttaccacatcatcagcaaaaaagctttggctgctcaagaagcagcggctgctaattctgccattccggggcaaggaacaacgattaacgttgaagacacatctggagctggcaaaagaggttgctgctctacttaattgaaagtttaaactttcgttttctattgcttattcactgtctttttttctcttcaagttttgggtgatgaaatgtaacaacgatgcaagaccatgtagaatatatatctcttcatttactcttgtcgt

SEQ ID NO: 49668 - protein, 217 aa, Arabidopsis thaliana
  peptide (1)..(217): Ceres Seq. ID no. 12591256
  misc_feature (14)..(175): Pfam Name: Ras family Pfam Description: Ras family
  misc_feature (1)..(217): Homolog of NCBI NO: 34908298 NR Description: Ras-related GTP-binding protein
  misc_feature (1)..(217): Homolog of NCBI NO: 34897394 NR Description: Ras-related GTP-binding protein
  misc_feature (1)..(217): Homolog of NCBI NO: 3024506 NR Description: RAS-RELATED PROTEIN RAB11A
  misc_feature (1)..(56): Homolog of NCBI NO: 25294121 NR Description: protein F22G5.24 [imported] - Arabidopsis
  misc_feature (58)..(217): Homolog of NCBI NO: 25294121 NR Description: protein F22G5.24 [imported] - Arabidopsis
  misc_feature (1)..(217): Homolog of NCBI NO: 3024528 NR Description: RAS-RELATED PROTEIN RAB2BV
  misc_feature (1)..(217): Homolog of NCBI NO: 15222396 NR Description: GTP-binding protein, putative; protein id:
  misc_feature (1)..(217): Homolog of NCBI NO: 3024501 NR Description: RAS-RELATED PROTEIN RAB11C
  misc_feature (1)..(217): Homolog of NCBI NO: 15232652 NR Description: GTP-binding protein, putative
  misc_feature (1)..(217): Homolog of NCBI NO: 15237828 NR Description: Ras-related GTP-binding protein, putative
MAHRVEQDYDYLFKIVLIGDSGVGKTNILSRFTRNEFCLESKSTIGVEFATRTLQVEGKTVKAQIWDTAGQERYRAITSAYYRGAVGALLVYDITKRQTFDNVLRWLRELRDHADSNIVIMMAGNKADLNHLRSVAEEDGQTLAETEGLSFLETSALEATNVEKAFQTVLAEIYHIISKKALAAQEAAAANSAIPGQGTTINVEDTSGAGKRGCCST

SEQ ID NO: 49669 - DNA, 1730 bp, Arabidopsis thaliana
  misc_feature (1)..(1730): Ceres Seq. ID no. 12592241
  misc_feature: MA Experiment ID: 20000166 Result: Down-regulated in Transcription
  misc_feature: MA Experiment 20000166 PARAMETER Experiment Name: At_100uM_ABA_P Parameter: Age (day) Value: 14
  misc_feature: MA Experiment 20000166 PARAMETER Experiment Name: At_100uM_ABA_P Parameter: Organism Value: A. thaliana
  misc_feature: MA Experiment 20000166 PARAMETER Experiment Name: At_100uM_ABA_P Parameter: Plant Line Value: WS
  misc_feature: MA Experiment 20000166 PARAMETER Experiment Name: At_100uM_ABA_P Parameter: Timepoint (hr) Value: 1
  misc_feature: MA Experiment 20000166 PARAMETER Experiment Name: At_100uM_ABA_P Parameter: Tissue Value: Aerial
  misc_feature: MA Experiment 20000166 PARAMETER Experiment Name: At_100uM_ABA_P Parameter: Treatment Value: 100uM ABA vs. No Treatment
  misc_feature: MA Experiment ID: 20000169 Result: Down-regulated in Transcription
  misc_feature: MA Experiment 20000169 PARAMETER Experiment Name: At_100uM_ABA_P Parameter: Age (day) Value: 14
  misc_feature: MA Experiment 20000169 PARAMETER Experiment Name: At_100uM_ABA_P Parameter: Organism Value: A. thaliana
  misc_feature: MA Experiment 20000169 PARAMETER Experiment Name: At_100uM_ABA_P Parameter: Plant Line Value: WS
  misc_feature: MA Experiment 20000169 PARAMETER Experiment Name: At_100uM_ABA_P Parameter: Timepoint (hr) Value: 6
  misc_feature: MA Experiment 20000169 PARAMETER Experiment Name: At_100uM_ABA_P Parameter: Tissue Value: Aerial
  misc_feature: MA Experiment 20000169 PARAMETER Experiment Name: At_100uM_ABA_P Parameter: Treatment Value: 100uM ABA vs. No Treatment
  misc_feature: MA Experiment ID: 20000173 Result: Up-regulated in Transcription
  misc_feature: MA Experiment 20000173 PARAMETER Experiment Name: At_42deg_Heat_P Parameter: Age (day) Value: 14
  misc_feature: MA Experiment 20000173 PARAMETER Experiment Name: At_42deg_Heat_P Parameter: Organism Value: A. thaliana
  misc_feature: MA Experiment 20000173 PARAMETER Experiment Name: At_42deg_Heat_P Parameter: Plant Line Value: WS
  misc_feature: MA Experiment 20000173 PARAMETER Experiment Name: At_42deg_Heat_P Parameter: Temperature (deg C) Value: 42 vs. 22
  misc_feature: MA Experiment 20000173 PARAMETER Experiment Name: At_42deg_Heat_P Parameter: Timepoint (hr) Value: 6
  misc_feature: MA Experiment 20000173 PARAMETER Experiment Name: At_42deg_Heat_P Parameter: Tissue Value: Aerial
  misc_feature: MA Experiment ID: 20000182 Result: Down-regulated in Transcription
  misc_feature: MA Experiment 20000182 PARAMETER Experiment Name: At_2mM_SA_P Parameter: Age (day) Value: 14
  misc_feature: MA Experiment 20000182 PARAMETER Experiment Name: At_2mM_SA_P Parameter: Organism Value: A. thaliana
  misc_feature: MA Experiment 20000182 PARAMETER Experiment Name: At_2mM_SA_P Parameter: Plant Line Value: WS
  misc_feature: MA Experiment 20000182 PARAMETER Experiment Name: At_2mM_SA_P Parameter: Timepoint (hr) Value: 6
  misc_feature: MA Experiment 20000182 PARAMETER Experiment Name: At_2mM_SA_P Parameter: Tissue Value: Aerial
  misc_feature: MA Experiment 20000182 PARAMETER Experiment Name: At_2mM_SA_P Parameter: Treatment Value: 2mM SA vs. No Treatment
  misc_feature: MA Experiment ID: 20000185 Result: Down-regulated in Transcription
  misc_feature: MA Experiment 20000185 PARAMETER Experiment Name: At_Roots__P Parameter: Age (day) Value: 7 vs. 21
  misc_feature: MA Experiment 20000185 PARAMETER Experiment Name: At_Roots__P Parameter: Organism Value: A. thaliana
  misc_feature: MA Experiment 20000185 PARAMETER Experiment Name: At_Roots__P Parameter: Tissue Value: Roots vs. Whole Plant
  misc_feature: MA Experiment ID: 20000234 Result: Down-regulated in Transcription
  misc_feature: MA Experiment 20000234 PARAMETER Experiment Name: At_Siliques_P Parameter: Age (day) Value: 21
  misc_feature: MA Experiment 20000234 PARAMETER Experiment Name: At_Siliques_P Parameter: Organism Value: A. thaliana
  misc_feature: MA Experiment 20000234 PARAMETER Experiment Name: At_Siliques_P Parameter: Plant Line Value: WS
  misc_feature: MA Experiment 20000234 PARAMETER Experiment Name: At_Siliques_P Parameter: Tissue Value: Less Than 5mm Siliques vs. Whole Plant
  misc_feature: MA Experiment ID: 20000235 Result: Down-regulated in Transcription
  misc_feature: MA Experiment 20000235 PARAMETER Experiment Name: At_Siliques_P Parameter: Age (day) Value: 21
  misc_feature: MA Experiment 20000235 PARAMETER Experiment Name: At_Siliques_P Parameter: Organism Value: A. thaliana
  misc_feature: MA Experiment 20000235 PARAMETER Experiment Name: At_Siliques_P Parameter: Plant Line Value: WS
  misc_feature: MA Experiment 20000235 PARAMETER Experiment Name: At_Siliques_P Parameter: Tissue Value: 5-10mm Siliques vs. Whole Plant
  misc_feature: MA Experiment ID: 20000264 Result: Down-regulated in Transcription
  misc_feature: MA Experiment 20000264 PARAMETER Experiment Name: At_Open_Flower_P Parameter: Age (day) Value: 21
  misc_feature: MA Experiment 20000264 PARAMETER Experiment Name: At_Open_Flower_P Parameter: Plant Line Value: WS
  misc_feature: MA Experiment 20000264 PARAMETER Experiment Name: At_Open_Flower_P Parameter: Tissue Value: Open Flower vs. Whole Plant
  misc_feature: MA Experiment ID: 20000265 Result: Down-regulated in Transcription
  misc_feature: MA Experiment 20000265 PARAMETER Experiment Name: At_Open_Flower_P Parameter: Age (day) Value: 21
  misc_feature: MA Experiment 20000265 PARAMETER Experiment Name: At_Open_Flower_P Parameter: Plant Line Value: WS
  misc_feature: MA Experiment 20000265 PARAMETER Experiment Name: At_Open_Flower_P Parameter: Tissue Value: Closed Flower vs. Whole Plant
  misc_feature: MA Experiment ID: 20000286 Result: Down-regulated in Transcription
  misc_feature: MA Experiment 20000286 PARAMETER Experiment Name: At_Open_Flower_P Parameter: Age (day) Value: 21
  misc_feature: MA Experiment 20000286 PARAMETER Experiment Name: At_Open_Flower_P Parameter: Plant Line Value: WS
  misc_feature: MA Experiment 20000286 PARAMETER Experiment Name: At_Open_Flower_P Parameter: Tissue Value: Half Open vs. Whole Plant
  misc_feature: MA Experiment ID: 20000439 Result: Down-regulated in Transcription
  misc_feature: MA Experiment 20000439 PARAMETER Experiment Name: At_Roots__P Parameter: Age (day) Value: 14 vs. 21
  misc_feature: MA Experiment 20000439 PARAMETER Experiment Name: At_Roots__P Parameter: Organism Value: A. thaliana
  misc_feature: MA Experiment 20000439 PARAMETER Experiment Name: At_Roots__P Parameter: Tissue Value: Roots vs. Whole Plant
  misc_feature: MA Experiment ID: 20000453 Result: Down-regulated in Transcription
  misc_feature: MA Experiment 20000453 PARAMETER Experiment Name: At_100uM_ABA_P Parameter: Age (day) Value: 15
  misc_feature: MA Experiment 20000453 PARAMETER Experiment Name: At_100uM_ABA_P Parameter: Organism Value: A. thaliana
  misc_feature: MA Experiment 20000453 PARAMETER Experiment Name: At_100uM_ABA_P Parameter: Plant Line Value: WS
  misc_feature: MA Experiment 20000453 PARAMETER Experiment Name: At_100uM_ABA_P Parameter: Timepoint (hr) Value: 24
  misc_feature: MA Experiment 20000453 PARAMETER Experiment Name: At_100uM_ABA_P Parameter: Tissue Value: Aerial
  misc_feature: MA Experiment 20000453 PARAMETER Experiment Name: At_100uM_ABA_P Parameter: Treatment Value: 100uM ABA vs. No Treatment
  misc_feature: MA Experiment ID: 20000455 Result: Down-regulated in Transcription
  misc_feature: MA Experiment 20000455 PARAMETER Experiment Name: At_100uM_ABA_P Parameter: Age (day) Value: 16
  misc_feature: MA Experiment 20000455 PARAMETER Experiment Name: At_100uM_ABA_P Parameter: Organism Value: A. thaliana
  misc_feature: MA Experiment 20000455 PARAMETER Experiment Name: At_100uM_ABA_P Parameter: Plant Line Value: WS
  misc_feature: MA Experiment 20000455 PARAMETER Experiment Name: At_100uM_ABA_P Parameter: Timepoint (hr) Value: 48
  misc_feature: MA Experiment 20000455 PARAMETER Experiment Name: At_100uM_ABA_P Parameter: Tissue Value: Aerial
  misc_feature: MA Experiment 20000455 PARAMETER Experiment Name: At_100uM_ABA_P Parameter: Treatment Value: 100uM ABA vs. No Treatment
  misc_feature: MA Experiment ID: 20000573 Result: Down-regulated in Transcription
  misc_feature: MA Experiment 20000573 PARAMETER Experiment Name: At_100uM_ABA_Mutants__P Parameter: Organism Value: A. thaliana
  misc_feature: MA Experiment 20000573 PARAMETER Experiment Name: At_100uM_ABA_Mutants__P Parameter: Plant Line Value: CS22 vs. Ler wt
  misc_feature: MA Experiment 20000573 PARAMETER Experiment Name: At_100uM_ABA_Mutants__P Parameter: Timepoint (hr) Value: N/A
  misc_feature: MA Experiment 20000573 PARAMETER Experiment Name: At_100uM_ABA_Mutants__P Parameter: Tissue Value: Whole Plant
  misc_feature: MA Experiment 20000573 PARAMETER Experiment Name: At_100uM_ABA_Mutants__P Parameter: Treatment Value: None
  misc_feature: MA Experiment ID: 20000574 Result: Down-regulated in Transcription
  misc_feature: MA Experiment 20000574 PARAMETER Experiment Name: At_100uM_ABA_Mutants__P Parameter: Organism Value: A. thaliana
  misc_feature: MA Experiment 20000574 PARAMETER Experiment Name: At_100uM_ABA_Mutants__P Parameter: Plant Line Value: CS23 vs. Ler wt
  misc_feature: MA Experiment 20000574 PARAMETER Experiment Name: At_100uM_ABA_Mutants__P Parameter: Timepoint (hr) Value: N/A
  misc_feature: MA Experiment 20000574 PARAMETER Experiment Name: At_100uM_ABA_Mutants__P Parameter: Tissue Value: Whole Plant
  misc_feature: MA Experiment 20000574 PARAMETER Experiment Name: At_100uM_ABA_Mutants__P Parameter: Treatment Value: None
  misc_feature: MA Experiment ID: 20001451 Result: Up-regulated in Transcription
  misc_feature: MA Experiment 20001451 PARAMETER Experiment Name: At_Far-red-induction_P Parameter: Age (day) Value: 7
  misc_feature: MA Experiment 20001451 PARAMETER Experiment Name: At_Far-red-induction_P Parameter: Light Value: Far-red vs. White
  misc_feature: MA Experiment 20001451 PARAMETER Experiment Name: At_Far-red-induction_P Parameter: Organism Value: A. thaliana
  misc_feature: MA Experiment 20001451 PARAMETER Experiment Name: At_Far-red-induction_P Parameter: Plant Line Value: Columbia
  misc_feature: MA Experiment 20001451 PARAMETER Experiment Name: At_Far-red-induction_P Parameter: Timepoint (hr) Value: 24
  misc_feature: MA Experiment 20001451 PARAMETER Experiment Name: At_Far-red-induction_P Parameter: Tissue Value: Whole Plant
  misc_feature: MA Experiment ID: 20001555 Result: Down-regulated in Transcription
  misc_feature: MA Experiment 20001555 PARAMETER Experiment Name: At_Drought_Soil_Dry_P Parameter: Age (day) Value: 24
  misc_feature: MA Experiment 20001555 PARAMETER Experiment Name: At_Drought_Soil_Dry_P Parameter: Organism Value: A. thaliana
  misc_feature: MA Experiment 20001555 PARAMETER Experiment Name: At_Drought_Soil_Dry_P Parameter: Plant Line Value: WS
  misc_feature: MA Experiment 20001555 PARAMETER Experiment Name: At_Drought_Soil_Dry_P Parameter: Post Timepoint (hr) Value: None
  misc_feature: MA Experiment 20001555 PARAMETER Experiment Name: At_Drought_Soil_Dry_P Parameter: Post-Treatment Value: None
  misc_feature: MA Experiment 20001555 PARAMETER Experiment Name: At_Drought_Soil_Dry_P Parameter: Timepoint (day) Value: 10
  misc_feature: MA Experiment 20001555 PARAMETER Experiment Name: At_Drought_Soil_Dry_P Parameter: Treatment Value: Drought vs. No Drought
  misc_feature: MA Experiment ID: 20001556 Result: Down-regulated in Transcription
  misc_feature: MA Experiment 20001556 PARAMETER Experiment Name: At_Drought_Soil_Dry_P Parameter: Age (day) Value: 26
  misc_feature: MA Experiment 20001556 PARAMETER Experiment Name: At_Drought_Soil_Dry_P Parameter: Organism Value: A. thaliana
  misc_feature: MA Experiment 20001556 PARAMETER Experiment Name: At_Drought_Soil_Dry_P Parameter: Plant Line Value: WS
  misc_feature: MA Experiment 20001556 PARAMETER Experiment Name: At_Drought_Soil_Dry_P Parameter: Post Timepoint (hr) Value: None
  misc_feature: MA Experiment 20001556 PARAMETER Experiment Name: At_Drought_Soil_Dry_P Parameter: Post-Treatment Value: None
  misc_feature: MA Experiment 20001556 PARAMETER Experiment Name: At_Drought_Soil_Dry_P Parameter: Timepoint (day) Value: 12
  misc_feature: MA Experiment 20001556 PARAMETER Experiment Name: At_Drought_Soil_Dry_P Parameter: Treatment Value: Drought vs. No Drought
  misc_feature: MA Experiment ID: 20001559 Result: Down-regulated in Transcription
  misc_feature: MA Experiment 20001559 PARAMETER Experiment Name: At_Drought_Soil_Dry_P Parameter: Age (day) Value: 28
  misc_feature: MA Experiment 20001559 PARAMETER Experiment Name: At_Drought_Soil_Dry_P Parameter: Organism Value: A. thaliana
  misc_feature: MA Experiment 20001559 PARAMETER Experiment Name: At_Drought_Soil_Dry_P Parameter: Plant Line Value: WS
  misc_feature: MA Experiment 20001559 PARAMETER Experiment Name: At_Drought_Soil_Dry_P Parameter: Post Timepoint (hr) Value: 29
  misc_feature: MA Experiment 20001559 PARAMETER Experiment Name: At_Drought_Soil_Dry_P Parameter: Post-Treatment Value: Re-Water vs. No Drought
  misc_feature: MA Experiment 20001559 PARAMETER Experiment Name: At_Drought_Soil_Dry_P Parameter: Timepoint (day) Value: 14
  misc_feature: MA Experiment 20001559 PARAMETER Experiment Name: At_Drought_Soil_Dry_P Parameter: Treatment Value: Drought vs. No Drought
  misc_feature: MA Experiment ID: 20001757 Result: Up-regulated in Transcription
  misc_feature: MA Experiment 20001757 PARAMETER Experiment Name: At_50mM_NH4NO3_L-to-H_P Parameter: Timepoint (hr) Value: 6
  misc_feature: MA Experiment 20001757 PARAMETER Experiment Name: At_50mM_NH4NO3_L-to-H_P Parameter: Tissue Value: Leaf
  misc_feature: MA Experiment 20001757 PARAMETER Experiment Name: At_50mM_NH4NO3_L-to-H_P Parameter: Treatment Value: 50mM NH4NO3 vs 100mM Mannitol
  misc_feature: MA Experiment ID: 20001904 Result: Down-regulated in Transcription
  misc_feature: MA Experiment 20001904 PARAMETER Experiment Name: At_Drought_Reproduction_P Parameter: Age (day) Value: 37
  misc_feature: MA Experiment 20001904 PARAMETER Experiment Name: At_Drought_Reproduction_P Parameter: Organism Value: A. thaliana
  misc_feature: MA Experiment 20001904 PARAMETER Experiment Name: At_Drought_Reproduction_P Parameter: Plant Line Value: WS
  misc_feature: MA Experiment 20001904 PARAMETER Experiment Name: At_Drought_Reproduction_P Parameter: Timepoint (day) Value: 7
  misc_feature: MA Experiment 20001904 PARAMETER Experiment Name: At_Drought_Reproduction_P Parameter: Tissue Value: Rosettes
  misc_feature: MA Experiment 20001904 PARAMETER Experiment Name: At_Drought_Reproduction_P Parameter: Treatment Value: Drought vs. No Drought
  misc_feature: MA Experiment ID: 20001911 Result: Up-regulated in Transcription
  misc_feature: MA Experiment 20001911 PARAMETER Experiment Name: At_Drought_Reproduction_P Parameter: Age (day) Value: 40
  misc_feature: MA Experiment 20001911 PARAMETER Experiment Name: At_Drought_Reproduction_P Parameter: Organism Value: A. thaliana
  misc_feature: MA Experiment 20001911 PARAMETER Experiment Name: At_Drought_Reproduction_P Parameter: Plant Line Value: WS
  misc_feature: MA Experiment 20001911 PARAMETER Experiment Name: At_Drought_Reproduction_P Parameter: Timepoint (day) Value: 10
  misc_feature: MA Experiment 20001911 PARAMETER Experiment Name: At_Drought_Reproduction_P Parameter: Tissue Value: Flowers
  misc_feature: MA Experiment 20001911 PARAMETER Experiment Name: At_Drought_Reproduction_P Parameter: Treatment Value: Drought vs. No Drought
atccaaaactataccaagaggttccaaagtatcactctctcttcttccactatcaattatgggacgatacactcaagttgagtgactcaacgttgcggaatccatcatcatcatcatcgtcatcgtcaaaaggatggaacaacatggcggttctagctcacagaaacctcacgcaatgtgcataccttatccagcacaaggccacatcaacccaatgctgaaactagccaagctcctccacgctagaggcttccacgtcactttcgtcaacaccgactacaaccaccgccgtatcctccaatcacgtggccctcacgctctcaacggtctcccctcgtttcgcttcgagactatccccgacggtcttccttggacagacgtcgacgctaagcaagacatgctcaagcttattgactccacaataaacaactgtttagctccattcaaagacctcatcctccggttaaactccggttctgatataccaccggttagctgtatcatctccgacgcttcaatgagcttcacaattgacgcagcggaggagcttaaaattccggtagttctcctctggaccaacagtgctactgctttaatcttgtatctccattaccaaaaactcatcgagaaagagataattcccctcaaagattcgagtgacttgaagaagcatttagagacggagattgattggataccgtcgatgaagaagattaagcttaaggattttccagatttcgtcaccacgacgaatcctcaagatccgatgattagtttcatccttcatgtaaccggaagaatcaaaagagcttctgcgatcttcatcaacactttcgaaaaactcgagcataacgttctcttatctctgcgatctcttctccctcagatctactccgttggaccgttccagattctggagaatcgcgaaatcgataagaacagcgaaatcagaaagctaggattgaatctctgggaagaagagacggagtctttggattggctagatactaaagctgagaaagctgtgatttacgtcaacttcgggagtctaacggttttgactagtgagcagatcttagagttcgcttggggtttagcgaggagcgggaaagagtttctctgggtggtgagatctggtatggtcgacggagatgattcgattcttccggcggagtttttatcggagacgaagaatcgaggaatgttaattaaaggatggtgttctcaggagaaggtactttcgcatccggcgattggaggatttttgactcactgtggatggaattcgacgttggagagtttgtacgccggtgttccgatgatctgttggccattttttgctgatcagttgacgaatcgaaagttctgttgcgaggattgggggattgggatggagatcggcgaggaggtgaagagggagagagtggagacggtggttaaagagctcatggacggagagaagggaaagaggttaagagagaaggtggtggagtggcggcgcttggcggaagaagcttcggcgccaccgttgggatcatcgtacgtgaattttgaaacggtggttaataaagtccttacatgtcacacgattagatcgacctaattgggctttccgtatccaaataggcccattagaaaaggcctgtttgtttccactatcatttgggctggctttaatgacaattttaaaagatgtacttacaagttgcaataatctatagtgttcttct

SEQ ID NO: 49670 - protein, 489 aa, Arabidopsis thaliana
  peptide (1)..(489): Ceres Seq. ID no. 12592242
  misc_feature (14)..(484): Pfam Name: UDP-glucoronosyl and UDP-glucosyl transferase Pfam Description: UDP-glucoronosyl and UDP-glucosyl transferase
  misc_feature (8)..(201): Homolog of NCBI NO: 25286822 NR Description: hypothetical protein T16E15.4 - Arabidopsis
  misc_feature (226)..(481): Homolog of NCBI NO: 25286822 NR Description: hypothetical protein T16E15.4 - Arabidopsis
  misc_feature (418)..(481): Homolog of NCBI NO: 15220950 NR Description: UDP-glucose glucosyltransferase, putative
  misc_feature (7)..(397): Homolog of NCBI NO: 15220950 NR Description: UDP-glucose glucosyltransferase, putative
  misc_feature (1)..(480): Homolog of NCBI NO: 15219867 NR Description: UDP-glucose glucosyltransferase, putative
  misc_feature (1)..(481): Homolog of NCBI NO: 25286821 NR Description: T16E15.2 protein - Arabidopsis thaliana
  misc_feature (5)..(481): Homolog of NCBI NO: 17065006 NR Description: UDP-glucose glucosyltransferase [Arabidopsis
  misc_feature (5)..(481): Homolog of NCBI NO: 15219870 NR Description: UDP-glucose glucosyltransferase
  misc_feature (8)..(481): Homolog of NCBI NO: 15219876 NR Description: UDP-glucose glucosyltransferase, putative
  misc_feature (1)..(489): Homolog of NCBI NO: 15218268 NR Description: UDP-glucose glucosyltransferase, putative
MEQHGGSSSQKPHAMCIPYPAQGHINPMLKLAKLLHARGFHVTFVNTDYNHRRILQSRGPHALNGLPSFRFETIPDGLPWTDVDAKQDMLKLIDSTINNCLAPFKDLILRLNSGSDIPPVSCIISDASMSFTIDAAEELKIPVVLLWTNSATALILYLHYQKLIEKEIIPLKDSSDLKKHLETEIDWIPSMKKIKLKDFPDFVTTTNPQDPMISFILHVTGRIKRASAIFINTFEKLEHNVLLSLRSLLPQIYSVGPFQILENREIDKNSEIRKLGLNLWEEETESLDWLDTKAEKAVIYVNFGSLTVLTSEQILEFAWGLARSGKEFLWVVRSGMVDGDDSILPAEFLSETKNRGMLIKGWCSQEKVLSHPAIGGFLTHCGWNSTLESLYAGVPMICWPFFADQLTNRKFCCEDWGIGMEIGEEVKRERVETVVKELMDGEKGKRLREKVVEWRRLAEEASAPPLGSSYVNFETVVNKVLTCHTIRST

SEQ ID NO: 49671 - protein, 475 aa, Arabidopsis thaliana
  peptide (1)..(475): Ceres Seq. ID no. 12592243
  misc_feature (1)..(470): Pfam Name: UDP-glucoronosyl and UDP-glucosyl transferase Pfam Description: UDP-glucoronosyl and UDP-glucosyl transferase
  misc_feature (1)..(187): Homolog of NCBI NO: 25286822 NR Description: hypothetical protein T16E15.4 - Arabidopsis
  misc_feature (212)..(467): Homolog of NCBI NO: 25286822 NR Description: hypothetical protein T16E15.4 - Arabidopsis
  misc_feature (404)..(467): Homolog of NCBI NO: 15220950 NR Description: UDP-glucose glucosyltransferase, putative
  misc_feature (1)..(383): Homolog of NCBI NO: 15220950 NR Description: UDP-glucose glucosyltransferase, putative
  misc_feature (1)..(466): Homolog of NCBI NO: 15219867 NR Description: UDP-glucose glucosyltransferase, putative
  misc_feature (1)..(467): Homolog of NCBI NO: 25286821 NR Description: T16E15.2 protein - Arabidopsis thaliana
  misc_feature (1)..(467): Homolog of NCBI NO: 17065006 NR Description: UDP-glucose glucosyltransferase [Arabidopsis
  misc_feature (1)..(467): Homolog of NCBI NO: 15219870 NR Description: UDP-glucose glucosyltransferase
  misc_feature (1)..(467): Homolog of NCBI NO: 15219876 NR Description: UDP-glucose glucosyltransferase, putative
  misc_feature (1)..(475): Homolog of NCBI NO: 15218268 NR Description: UDP-glucose glucosyltransferase, putative
MCIPYPAQGHINPMLKLAKLLHARGFHVTFVNTDYNHRRILQSRGPHALNGLPSFRFETIPDGLPWTDVDAKQDMLKLIDSTINNCLAPFKDLILRLNSGSDIPPVSCIISDASMSFTIDAAEELKIPVVLLWTNSATALILYLHYQKLIEKEIIPLKDSSDLKKHLETEIDWIPSMKKIKLKDFPDFVTTTNPQDPMISFILHVTGRIKRASAIFINTFEKLEHNVLLSLRSLLPQIYSVGPFQILENREIDKNSEIRKLGLNLWEEETESLDWLDTKAEKAVIYVNFGSLTVLTSEQILEFAWGLARSGKEFLWVVRSGMVDGDDSILPAEFLSETKNRGMLIKGWCSQEKVLSHPAIGGFLTHCGWNSTLESLYAGVPMICWPFFADQLTNRKFCCEDWGIGMEIGEEVKRERVETVVKELMDGEKGKRLREKVVEWRRLAEEASAPPLGSSYVNFETVVNKVLTCHTIRST

SEQ ID NO: 49672 - protein, 462 aa, Arabidopsis thaliana
  peptide (1)..(462): Ceres Seq. ID no. 12592244
  misc_feature (1)..(457): Pfam Name: UDP-glucoronosyl and UDP-glucosyl transferase Pfam Description: UDP-glucoronosyl and UDP-glucosyl transferase
  misc_feature (1)..(174): Homolog of NCBI NO: 25286822 NR Description: hypothetical protein T16E15.4 - Arabidopsis
  misc_feature (199)..(454): Homolog of NCBI NO: 25286822 NR Description: hypothetical protein T16E15.4 - Arabidopsis
  misc_feature (391)..(454): Homolog of NCBI NO: 15220950 NR Description: UDP-glucose glucosyltransferase, putative
  misc_feature (1)..(370): Homolog of NCBI NO: 15220950 NR Description: UDP-glucose glucosyltransferase, putative
  misc_feature (1)..(453): Homolog of NCBI NO: 15219867 NR Description: UDP-glucose glucosyltransferase, putative
  misc_feature (1)..(454): Homolog of NCBI NO: 25286821 NR Description: T16E15.2 protein - Arabidopsis thaliana
  misc_feature (1)..(454): Homolog of NCBI NO: 17065006 NR Description: UDP-glucose glucosyltransferase [Arabidopsis
  misc_feature (1)..(454): Homolog of NCBI NO: 15219870 NR Description: UDP-glucose glucosyltransferase
  misc_feature (1)..(454): Homolog of NCBI NO: 15219876 NR Description: UDP-glucose glucosyltransferase, putative
  misc_feature (1)..(462): Homolog of NCBI NO: 15218268 NR Description: UDP-glucose glucosyltransferase, putative
MLKLAKLLHARGFHVTFVNTDYNHRRILQSRGPHALNGLPSFRFETIPDGLPWTDVDAKQDMLKLIDSTINNCLAPFKDLILRLNSGSDIPPVSCIISDASMSFTIDAAEELKIPVVLLWTNSATALILYLHYQKLIEKEIIPLKDSSDLKKHLETEIDWIPSMKKIKLKDFPDFVTTTNPQDPMISFILHVTGRIKRASAIFINTFEKLEHNVLLSLRSLLPQIYSVGPFQILENREIDKNSEIRKLGLNLWEEETESLDWLDTKAEKAVIYVNFGSLTVLTSEQILEFAWGLARSGKEFLWVVRSGMVDGDDSILPAEFLSETKNRGMLIKGWCSQEKVLSHPAIGGFLTHCGWNSTLESLYAGVPMICWPFFADQLTNRKFCCEDWGIGMEIGEEVKRERVETVVKELMDGEKGKRLREKVVEWRRLAEEASAPPLGSSYVNFETVVNKVLTCHTIRST

SEQ ID NO: 49673 - DNA, 738 bp, Arabidopsis thaliana; identical to SEQ ID NO: 37407
  misc_feature (1)..(738): Ceres Seq. ID no. 13592500
  misc_feature: MA Experiment ID: 108462 Result: Up-regulated in Transcription
  misc_feature: MA Experiment 108462 PARAMETER Experiment Name: At_Germinating_Seeds_cDNA_P Parameter: Age (day) Value: 2 vs. 0
  misc_feature: MA Experiment 108462 PARAMETER Experiment Name: At_Germinating_Seeds_cDNA_P Parameter: Tissue Value: Germinating Seeds
  misc_feature: MA Experiment ID: 108463 Result: Up-regulated in Transcription
  misc_feature: MA Experiment 108463 PARAMETER Experiment Name: At_Germinating_Seeds_cDNA_P Parameter: Age (day) Value: 3 vs. 0
  misc_feature: MA Experiment 108463 PARAMETER Experiment Name: At_Germinating_Seeds_cDNA_P Parameter: Tissue Value: Germinating Seeds
  misc_feature: MA Experiment ID: 108464 Result: Up-regulated in Transcription
  misc_feature: MA Experiment 108464 PARAMETER Experiment Name: At_Germinating_Seeds_cDNA_P Parameter: Age (day) Value: 4 vs. 0
  misc_feature: MA Experiment 108464 PARAMETER Experiment Name: At_Germinating_Seeds_cDNA_P Parameter: Tissue Value: Germinating Seeds
  misc_feature: MA Experiment ID: 108577 Result: Down-regulated in Transcription
  misc_feature: MA Experiment 108577 PARAMETER Experiment Name: At_42deg_Heat_cDNA_P Parameter: Temperature (deg C) Value: 42 vs. 22
  misc_feature: MA Experiment 108577 PARAMETER Experiment Name: At_42deg_Heat_cDNA_P Parameter: Timepoint (hr) Value: 6
  misc_feature: MA Experiment 108577 PARAMETER Experiment Name: At_42deg_Heat_cDNA_P Parameter: Tissue Value: Aerial
  misc_feature: MA Experiment ID: 108595 Result: Down-regulated in Transcription
  misc_feature: MA Experiment 108595 PARAMETER Experiment Name: At_Ler-pi_Ovule_cDNA_P Parameter: Plant Line Value: null
  misc_feature: MA Experiment ID: 108668 Result: Down-regulated in Transcription
  misc_feature: MA Experiment 108668 PARAMETER Experiment Name: At_2mM_SA_cDNA_P Parameter: Plant Line Value: WS
  misc_feature: MA Experiment 108668 PARAMETER Experiment Name: At_2mM_SA_cDNA_P Parameter: Timepoint (hr) Value: 6
  misc_feature: MA Experiment 108668 PARAMETER Experiment Name: At_2mM_SA_cDNA_P Parameter: Treatment Value: 2mM SA vs. No Treatment
  misc_feature: MA Experiment ID: 20000069 Result: Down-regulated in Transcription
  misc_feature: MA Experiment 20000069 PARAMETER Experiment Name: At_100uM_ABA_Mutants_cDNA_P Parameter: Plant Line Value: CS23
  misc_feature: MA Experiment 20000069 PARAMETER Experiment Name: At_100uM_ABA_Mutants_cDNA_P Parameter: Timepoint (hr) Value: 6
  misc_feature: MA Experiment 20000069 PARAMETER Experiment Name: At_100uM_ABA_Mutants_cDNA_P Parameter: Tissue Value: Aerial
  misc_feature: MA Experiment 20000069 PARAMETER Experiment Name: At_100uM_ABA_Mutants_cDNA_P Parameter: Treatment Value: 100uM ABA vs. No Treatment
  misc_feature: MA Experiment ID: 20000070 Result: Down-regulated in Transcription
  misc_feature: MA Experiment 20000070 PARAMETER Experiment Name: At_100uM_ABA_Mutants_cDNA_P Parameter: Plant Line Value: CS24
  misc_feature: MA Experiment 20000070 PARAMETER Experiment Name: At_100uM_ABA_Mutants_cDNA_P Parameter: Timepoint (hr) Value: 6
  misc_feature: MA Experiment 20000070 PARAMETER Experiment Name: At_100uM_ABA_Mutants_cDNA_P Parameter: Tissue Value: Aerial
  misc_feature: MA Experiment 20000070 PARAMETER Experiment Name: At_100uM_ABA_Mutants_cDNA_P Parameter: Treatment Value: 100uM ABA vs. No Treatment
  misc_feature: MA Experiment ID: 20000071 Result: Down-regulated in Transcription
  misc_feature: MA Experiment 20000071 PARAMETER Experiment Name: At_100uM_ABA_Mutants_cDNA_P Parameter: Plant Line Value: CS8104
  misc_feature: MA Experiment 20000071 PARAMETER Experiment Name: At_100uM_ABA_Mutants_cDNA_P Parameter: Timepoint (hr) Value: 6
  misc_feature: MA Experiment 20000071 PARAMETER Experiment Name: At_100uM_ABA_Mutants_cDNA_P Parameter: Tissue Value: Aerial
  misc_feature: MA Experiment 20000071 PARAMETER Experiment Name: At_100uM_ABA_Mutants_cDNA_P Parameter: Treatment Value: 100uM ABA vs. No Treatment
  misc_feature: MA Experiment ID: 20000072 Result: Down-regulated in Transcription
  misc_feature: MA Experiment 20000072 PARAMETER Experiment Name: At_100uM_ABA_Mutants_cDNA_P Parameter: Plant Line Value: CS8105
  misc_feature: MA Experiment 20000072 PARAMETER Experiment Name: At_100uM_ABA_Mutants_cDNA_P Parameter: Timepoint (hr) Value: 6
  misc_feature: MA Experiment 20000072 PARAMETER Experiment Name: At_100uM_ABA_Mutants_cDNA_P Parameter: Tissue Value: Aerial
  misc_feature: MA Experiment 20000072 PARAMETER Experiment Name: At_100uM_ABA_Mutants_cDNA_P Parameter: Treatment Value: 100uM ABA vs. No Treatment
  misc_feature: MA Experiment ID: 20000086 Result: Down-regulated in Transcription
  misc_feature: MA Experiment 20000086 PARAMETER Experiment Name: At_100uM_ABA_Mutants_cDNA_P Parameter: Plant Line Value: CS22
  misc_feature: MA Experiment 20000086 PARAMETER Experiment Name: At_100uM_ABA_Mutants_cDNA_P Parameter: Timepoint (hr) Value: 6
  misc_feature: MA Experiment 20000086 PARAMETER Experiment Name: At_100uM_ABA_Mutants_cDNA_P Parameter: Tissue Value: Aerial
  misc_feature: MA Experiment 20000086 PARAMETER Experiment Name: At_100uM_ABA_Mutants_cDNA_P Parameter: Treatment Value: 100uM ABA vs. No Treatment
  misc_feature: MA Experiment ID: 20000087 Result: Down-regulated in Transcription
  misc_feature: MA Experiment 20000087 PARAMETER Experiment Name: At_100uM_ABA_Mutants_cDNA_P Parameter: Plant Line Value: WS
  misc_feature: MA Experiment 20000087 PARAMETER Experiment Name: At_100uM_ABA_Mutants_cDNA_P Parameter: Timepoint (hr) Value: 6
  misc_feature: MA Experiment 20000087 PARAMETER Experiment Name: At_100uM_ABA_Mutants_cDNA_P Parameter: Tissue Value: Aerial
  misc_feature: MA Experiment 20000087 PARAMETER Experiment Name: At_100uM_ABA_Mutants_cDNA_P Parameter: Treatment Value: 100uM ABA vs. No Treatment
  misc_feature: MA Experiment ID: 20000088 Result: Down-regulated in Transcription
  misc_feature: MA Experiment 20000088 PARAMETER Experiment Name: At_100uM_ABA_Mutants_cDNA_P Parameter: Plant Line Value: Landsberg
  misc_feature: MA Experiment 20000088 PARAMETER Experiment Name: At_100uM_ABA_Mutants_cDNA_P Parameter: Timepoint (hr) Value: 6
  misc_feature: MA Experiment 20000088 PARAMETER Experiment Name: At_100uM_ABA_Mutants_cDNA_P Parameter: Tissue Value: Aerial
  misc_feature: MA Experiment 20000088 PARAMETER Experiment Name: At_100uM_ABA_Mutants_cDNA_P Parameter: Treatment Value: 100uM ABA vs. No Treatment
  misc_feature: MA Experiment ID: 20000090 Result: Down-regulated in Transcription
  misc_feature: MA Experiment ID: 20000111 Result: Down-regulated in Transcription
  misc_feature: MA Experiment 20000111 PARAMETER Experiment Name: At_42deg_Heat_cDNA_P Parameter: Temperature (deg C) Value: 42 vs. 22
  misc_feature: MA Experiment 20000111 PARAMETER Experiment Name: At_42deg_Heat_cDNA_P Parameter: Timepoint (hr) Value: 6
  misc_feature: MA Experiment 20000111 PARAMETER Experiment Name: At_42deg_Heat_cDNA_P Parameter: Tissue Value: Aerial
  misc_feature: MA Experiment ID: 20000117 Result: Down-regulated in Transcription
  misc_feature: MA Experiment 20000117 PARAMETER Experiment Name: At_100uM_ABA_Mutants_cDNA_P Parameter: Plant Line Value: Columbia
  misc_feature: MA Experiment 20000117 PARAMETER Experiment Name: At_100uM_ABA_Mutants_cDNA_P Parameter: Timepoint (hr) Value: 6
  misc_feature: MA Experiment 20000117 PARAMETER Experiment Name: At_100uM_ABA_Mutants_cDNA_P Parameter: Tissue Value: Aerial
  misc_feature: MA Experiment 20000117 PARAMETER Experiment Name: At_100uM_ABA_Mutants_cDNA_P Parameter: Treatment Value: 100uM ABA vs. No Treatment
  misc_feature: MA Experiment ID: 20000173 Result: Down-regulated in Transcription
  misc_feature: MA Experiment 20000173 PARAMETER Experiment Name: At_42deg_Heat_P Parameter: Age (day) Value: 14
  misc_feature: MA Experiment 20000173 PARAMETER Experiment Name: At_42deg_Heat_P Parameter: Organism Value: A. thaliana
  misc_feature: MA Experiment 20000173 PARAMETER Experiment Name: At_42deg_Heat_P Parameter: Plant Line Value: WS
  misc_feature: MA Experiment 20000173 PARAMETER Experiment Name: At_42deg_Heat_P Parameter: Temperature (deg C) Value: 42 vs. 22
  misc_feature: MA Experiment 20000173 PARAMETER Experiment Name: At_42deg_Heat_P Parameter: Timepoint (hr) Value: 6
  misc_feature: MA Experiment 20000173 PARAMETER Experiment Name: At_42deg_Heat_P Parameter: Tissue Value: Aerial
  misc_feature: MA Experiment ID: 20000182 Result: Down-regulated in Transcription
  misc_feature: MA Experiment 20000182 PARAMETER Experiment Name: At_2mM_SA_P Parameter: Age (day) Value: 14
  misc_feature: MA Experiment 20000182 PARAMETER Experiment Name: At_2mM_SA_P Parameter: Organism Value: A. thaliana
  misc_feature: MA Experiment 20000182 PARAMETER Experiment Name: At_2mM_SA_P Parameter: Plant Line Value: WS
  misc_feature: MA Experiment 20000182 PARAMETER Experiment Name: At_2mM_SA_P Parameter: Timepoint (hr) Value: 6
  misc_feature: MA Experiment 20000182 PARAMETER Experiment Name: At_2mM_SA_P Parameter: Tissue Value: Aerial
  misc_feature: MA Experiment 20000182 PARAMETER Experiment Name: At_2mM_SA_P Parameter: Treatment Value: 2mM SA vs. No Treatment
  misc_feature: MA Experiment ID: 20000185 Result: Down-regulated in Transcription
  misc_feature: MA Experiment 20000185 PARAMETER Experiment Name: At_Roots__P Parameter: Age (day) Value: 7 vs. 21
  misc_feature: MA Experiment 20000185 PARAMETER Experiment Name: At_Roots__P Parameter: Organism Value: A. thaliana
  misc_feature: MA Experiment 20000185 PARAMETER Experiment Name: At_Roots__P Parameter: Tissue Value: Roots vs. Whole Plant
  misc_feature: MA Experiment ID: 20000264 Result: Down-regulated in Transcription
  misc_feature: MA Experiment 20000264 PARAMETER Experiment Name: At_Open_Flower_P Parameter: Age (day) Value: 21
  misc_feature: MA Experiment 20000264 PARAMETER Experiment Name: At_Open_Flower_P Parameter: Plant Line Value: WS
  misc_feature: MA Experiment 20000264 PARAMETER Experiment Name: At_Open_Flower_P Parameter: Tissue Value: Open Flower vs. Whole Plant
  misc_feature: MA Experiment ID: 20000286 Result: Down-regulated in Transcription
  misc_feature: MA Experiment 20000286 PARAMETER Experiment Name: At_Open_Flower_P Parameter: Age (day) Value: 21
  misc_feature: MA Experiment 20000286 PARAMETER Experiment Name: At_Open_Flower_P Parameter: Plant Line Value: WS
  misc_feature: MA Experiment 20000286 PARAMETER Experiment Name: At_Open_Flower_P Parameter: Tissue Value: Half Open vs. Whole Plant
  misc_feature: MA Experiment ID: 20000436 Result: Down-regulated in Transcription
  misc_feature: MA Experiment 20000436 PARAMETER Experiment Name: At_Drought_P Parameter: Age (day) Value: 7
  misc_feature: MA Experiment 20000436 PARAMETER Experiment Name: At_Drought_P Parameter: Organism Value: A. thaliana
  misc_feature: MA Experiment 20000436 PARAMETER Experiment Name: At_Drought_P Parameter: Plant Line Value: WS
  misc_feature: MA Experiment 20000436 PARAMETER Experiment Name: At_Drought_P Parameter: Timepoint (hr) Value: 12
  misc_feature: MA Experiment 20000436 PARAMETER Experiment Name: At_Drought_P Parameter: Tissue Value: Whole Plant
  misc_feature: MA Experiment 20000436 PARAMETER Experiment Name: At_Drought_P Parameter: Treatment Value: Drought vs. No Drought
  misc_feature: MA Experiment ID: 20000438 Result: Up-regulated in Transcription
  misc_feature: MA Experiment 20000438 PARAMETER Experiment Name: At_Shoots__P Parameter: Age (day) Value: 14
  misc_feature: MA Experiment 20000438 PARAMETER Experiment Name: At_Shoots__P Parameter: Tissue Value: Shoots vs. Whole Plant
  misc_feature: MA Experiment ID: 20000439 Result: Down-regulated in Transcription
  misc_feature: MA Experiment 20000439 PARAMETER Experiment Name: At_Roots__P Parameter: Age (day) Value: 14 vs. 21
  misc_feature: MA Experiment 20000439 PARAMETER Experiment Name: At_Roots__P Parameter: Organism Value: A. thaliana
  misc_feature: MA Experiment 20000439 PARAMETER Experiment Name: At_Roots__P Parameter: Tissue Value: Roots vs. Whole Plant
  misc_feature: MA Experiment ID: 20000460 Result: Down-regulated in Transcription
  misc_feature: MA Experiment 20000460 PARAMETER Experiment Name: At_10percent_PEG_P Parameter: Age (day) Value: 12
  misc_feature: MA Experiment 20000460 PARAMETER Experiment Name: At_10percent_PEG_P Parameter: Organism Value: A. thaliana
  misc_feature: MA Experiment 20000460 PARAMETER Experiment Name: At_10percent_PEG_P Parameter: Plant Line Value: WS
  misc_feature: MA Experiment 20000460 PARAMETER Experiment Name: At_10percent_PEG_P Parameter: Timepoint (day) Value: 12
  misc_feature: MA Experiment 20000460 PARAMETER Experiment Name: At_10percent_PEG_P Parameter: Tissue Value: Whole Plant
  misc_feature: MA Experiment 20000460 PARAMETER Experiment Name: At_10percent_PEG_P Parameter: Treatment Value: 10percent PEG vs. No Treatment
  misc_feature: MA Experiment ID: 20000495 Result: Down-regulated in Transcription
  misc_feature: MA Experiment 20000495 PARAMETER Experiment Name: At_Guard_Cells_P Parameter: Harvest Date Value: 8/2/2002
  misc_feature: MA Experiment 20000495 PARAMETER Experiment Name: At_Guard_Cells_P Parameter: Organism Value: A. thaliana
  misc_feature: MA Experiment 20000495 PARAMETER Experiment Name: At_Guard_Cells_P Parameter: Tissue Value: Guard Cells vs. Leaves
  misc_feature: MA Experiment ID: 20000496 Result: Down-regulated in Transcription
  misc_feature: MA Experiment 20000496 PARAMETER Experiment Name: At_Guard_Cells_P Parameter: Harvest Date Value: 7/19/2002
  misc_feature: MA Experiment 20000496 PARAMETER Experiment Name: At_Guard_Cells_P Parameter: Organism Value: Canola
  misc_feature: MA Experiment 20000496 PARAMETER Experiment Name: At_Guard_Cells_P Parameter: Tissue Value: Guard Cells vs. Leaves
  misc_feature: MA Experiment ID: 20000527 Result: Down-regulated in Transcription
  misc_feature: MA Experiment 20000527 PARAMETER Experiment Name: At_10percent_PEG_P Parameter: Age (day) Value: 20
  misc_feature: MA Experiment 20000527 PARAMETER Experiment Name: At_10percent_PEG_P Parameter: Organism Value: A. thaliana
  misc_feature: MA Experiment 20000527 PARAMETER Experiment Name: At_10percent_PEG_P Parameter: Plant Line Value: WS
  misc_feature: MA Experiment 20000527 PARAMETER Experiment Name: At_10percent_PEG_P Parameter: Timepoint (day) Value: 20
  misc_feature: MA Experiment 20000527 PARAMETER Experiment Name: At_10percent_PEG_P Parameter: Tissue Value: Whole Plant
  misc_feature: MA Experiment 20000527 PARAMETER Experiment Name: At_10percent_PEG_P Parameter: Treatment Value: 10percent PEG vs. No Treatment
  misc_feature: MA Experiment ID: 20000794 Result: Down-regulated in Transcription
  misc_feature: MA Experiment 20000794 PARAMETER Experiment Name: At_Petals_P Parameter: Age (day) Value: 23-25 days
  misc_feature: MA Experiment 20000794 PARAMETER Experiment Name: At_Petals_P Parameter: Plant Line Value: WS
  misc_feature: MA Experiment 20000794 PARAMETER Experiment Name: At_Petals_P Parameter: Tissue Value: Petals vs. Whole plant
  misc_feature: MA Experiment ID: 20001248 Result: Down-regulated in Transcription
  misc_feature: MA Experiment 20001248 PARAMETER Experiment Name: At_Far-red-induction_P Parameter: Age (day) Value: 7
  misc_feature: MA Experiment 20001248 PARAMETER Experiment Name: At_Far-red-induction_P Parameter: Light Value: Far-red vs. White
  misc_feature: MA Experiment 20001248 PARAMETER Experiment Name: At_Far-red-induction_P Parameter: Organism Value: A. thaliana
  misc_feature: MA Experiment 20001248 PARAMETER Experiment Name: At_Far-red-induction_P Parameter: Plant Line Value: Columbia
  misc_feature: MA Experiment 20001248 PARAMETER Experiment Name: At_Far-red-induction_P Parameter: Timepoint (hr) Value: 4
  misc_feature: MA Experiment 20001248 PARAMETER Experiment Name: At_Far-red-induction_P Parameter: Tissue Value: Whole Plant
  misc_feature: MA Experiment ID: 20001503 Result: Down-regulated in Transcription
  misc_feature: MA Experiment 20001503 PARAMETER Experiment Name: At_Far-red-enriched_P Parameter: Age (day) Value: 7
  misc_feature: MA Experiment 20001503 PARAMETER Experiment Name: At_Far-red-enriched_P Parameter: Light Value: Far-red enriched vs. White
  misc_feature: MA Experiment 20001503 PARAMETER Experiment Name: At_Far-red-enriched_P Parameter: Organism Value: A. thaliana
  misc_feature: MA Experiment 20001503 PARAMETER Experiment Name: At_Far-red-enriched_P Parameter: Plant Line Value: Columbia
  misc_feature: MA Experiment 20001503 PARAMETER Experiment Name: At_Far-red-enriched_P Parameter: Timepoint (day) Value: 3
  misc_feature: MA Experiment 20001503 PARAMETER Experiment Name: At_Far-red-enriched_P Parameter: Tissue Value: Whole Plant
  misc_feature: MA Experiment ID: 20001556 Result: Down-regulated in Transcription
  misc_feature: MA Experiment 20001556 PARAMETER Experiment Name: At_Drought_Soil_Dry_P Parameter: Age (day) Value: 26
  misc_feature: MA Experiment 20001556 PARAMETER Experiment Name: At_Drought_Soil_Dry_P Parameter: Organism Value: A. thaliana
  misc_feature: MA Experiment 20001556 PARAMETER Experiment Name: At_Drought_Soil_Dry_P Parameter: Plant Line Value: WS
  misc_feature: MA Experiment 20001556 PARAMETER Experiment Name: At_Drought_Soil_Dry_P Parameter: Post Timepoint (hr) Value: None
  misc_feature: MA Experiment 20001556 PARAMETER Experiment Name: At_Drought_Soil_Dry_P Parameter: Post-Treatment Value: None
  misc_feature: MA Experiment 20001556 PARAMETER Experiment Name: At_Drought_Soil_Dry_P Parameter: Timepoint (day) Value: 12
  misc_feature: MA Experiment 20001556 PARAMETER Experiment Name: At_Drought_Soil_Dry_P Parameter: Treatment Value: Drought vs. No Drought
  misc_feature: MA Experiment ID: 20001557 Result: Down-regulated in Transcription
  misc_feature: MA Experiment 20001557 PARAMETER Experiment Name: At_Drought_Soil_Dry_P Parameter: Age (day) Value: 27
  misc_feature: MA Experiment 20001557 PARAMETER Experiment Name: At_Drought_Soil_Dry_P Parameter: Organism Value: A. thaliana
  misc_feature: MA Experiment 20001557 PARAMETER Experiment Name: At_Drought_Soil_Dry_P Parameter: Plant Line Value: WS
  misc_feature: MA Experiment 20001557 PARAMETER Experiment Name: At_Drought_Soil_Dry_P Parameter: Post Timepoint (hr) Value: 3
  misc_feature: MA Experiment 20001557 PARAMETER Experiment Name: At_Drought_Soil_Dry_P Parameter: Post-Treatment Value: Re-Water vs. No Drought
  misc_feature: MA Experiment 20001557 PARAMETER Experiment Name: At_Drought_Soil_Dry_P Parameter: Timepoint (day) Value: 13
  misc_feature: MA Experiment 20001557 PARAMETER Experiment Name: At_Drought_Soil_Dry_P Parameter: Treatment Value: Drought vs. No Drought
  misc_feature: MA Experiment ID: 20001558 Result: Down-regulated in Transcription
  misc_feature: MA Experiment 20001558 PARAMETER Experiment Name: At_Drought_Soil_Dry_P Parameter: Age (day) Value: 27
  misc_feature: MA Experiment 20001558 PARAMETER Experiment Name: At_Drought_Soil_Dry_P Parameter: Organism Value: A. thaliana
  misc_feature: MA Experiment 20001558 PARAMETER Experiment Name: At_Drought_Soil_Dry_P Parameter: Plant Line Value: WS
  misc_feature: MA Experiment 20001558 PARAMETER Experiment Name: At_Drought_Soil_Dry_P Parameter: Post Timepoint (hr) Value: 6
  misc_feature: MA Experiment 20001558 PARAMETER Experiment Name: At_Drought_Soil_Dry_P Parameter: Post-Treatment Value: Re-Water vs. No Drought
  misc_feature: MA Experiment 20001558 PARAMETER Experiment Name: At_Drought_Soil_Dry_P Parameter: Timepoint (day) Value: 13
  misc_feature: MA Experiment 20001558 PARAMETER Experiment Name: At_Drought_Soil_Dry_P Parameter: Treatment Value: Drought vs. No Drought
  misc_feature: MA Experiment ID: 20001559 Result: Down-regulated in Transcription
  misc_feature: MA Experiment 20001559 PARAMETER Experiment Name: At_Drought_Soil_Dry_P Parameter: Age (day) Value: 28
  misc_feature: MA Experiment 20001559 PARAMETER Experiment Name: At_Drought_Soil_Dry_P Parameter: Organism Value: A. thaliana
  misc_feature: MA Experiment 20001559 PARAMETER Experiment Name: At_Drought_Soil_Dry_P Parameter: Plant Line Value: WS
  misc_feature: MA Experiment 20001559 PARAMETER Experiment Name: At_Drought_Soil_Dry_P Parameter: Post Timepoint (hr) Value: 29
  misc_feature: MA Experiment 20001559 PARAMETER Experiment Name: At_Drought_Soil_Dry_P Parameter: Post-Treatment Value: Re-Water vs. No Drought
  misc_feature: MA Experiment 20001559 PARAMETER Experiment Name: At_Drought_Soil_Dry_P Parameter: Timepoint (day) Value: 14
  misc_feature: MA Experiment 20001559 PARAMETER Experiment Name: At_Drought_Soil_Dry_P Parameter: Treatment Value: Drought vs. No Drought
  misc_feature: MA Experiment ID: 20001560 Result: Down-regulated in Transcription
  misc_feature: MA Experiment 20001560 PARAMETER Experiment Name: At_Drought_Soil_Dry_P Parameter: Age (day) Value: 28
  misc_feature: MA Experiment 20001560 PARAMETER Experiment Name: At_Drought_Soil_Dry_P Parameter: Organism Value: A. thaliana
  misc_feature: MA Experiment 20001560 PARAMETER Experiment Name: At_Drought_Soil_Dry_P Parameter: Plant Line Value: WS
  misc_feature: MA Experiment 20001560 PARAMETER Experiment Name: At_Drought_Soil_Dry_P Parameter: Post Timepoint (hr) Value: None
  misc_feature: MA Experiment 20001560 PARAMETER Experiment Name: At_Drought_Soil_Dry_P Parameter: Post-Treatment Value: None
  misc_feature: MA Experiment 20001560 PARAMETER Experiment Name: At_Drought_Soil_Dry_P Parameter: Timepoint (day) Value: 14
  misc_feature: MA Experiment 20001560 PARAMETER Experiment Name: At_Drought_Soil_Dry_P Parameter: Treatment Value: Drought vs. No Drought
  misc_feature: MA Experiment ID: 20001756 Result: Down-regulated in Transcription
  misc_feature: MA Experiment 20001756 PARAMETER Experiment Name: At_50mM_NH4NO3_L-to-H_P Parameter: Timepoint (hr) Value: 4
  misc_feature: MA Experiment 20001756 PARAMETER Experiment Name: At_50mM_NH4NO3_L-to-H_P Parameter: Tissue Value: Leaf
  misc_feature: MA Experiment 20001756 PARAMETER Experiment Name: At_50mM_NH4NO3_L-to-H_P Parameter: Treatment Value: 50mM NH4NO3 vs 100mM Mannitol
  misc_feature: MA Experiment ID: 20001757 Result: Up-regulated in Transcription
  misc_feature: MA Experiment 20001757 PARAMETER Experiment Name: At_50mM_NH4NO3_L-to-H_P Parameter: Timepoint (hr) Value: 6
  misc_feature: MA Experiment 20001757 PARAMETER Experiment Name: At_50mM_NH4NO3_L-to-H_P Parameter: Tissue Value: Leaf
  misc_feature: MA Experiment 20001757 PARAMETER Experiment Name: At_50mM_NH4NO3_L-to-H_P Parameter: Treatment Value: 50mM NH4NO3 vs 100mM Mannitol
  misc_feature: MA Experiment ID: 20001761 Result: Up-regulated in Transcription
  misc_feature: MA Experiment 20001761 PARAMETER Experiment Name: At_50mM_NH4NO3_L-to-H_P Parameter: Timepoint (hr) Value: 4
  misc_feature: MA Experiment 20001761 PARAMETER Experiment Name: At_50mM_NH4NO3_L-to-H_P Parameter: Tissue Value: Siliques
  misc_feature: MA Experiment 20001761 PARAMETER Experiment Name: At_50mM_NH4NO3_L-to-H_P Parameter: Treatment Value: 50mM NH4NO3 vs 100mM Mannitol
  misc_feature: MA Experiment ID: 20001903 Result: Up-regulated in Transcription
  misc_feature: MA Experiment 20001903 PARAMETER Experiment Name: At_Drought_Reproduction_P Parameter: Age (day) Value: 35
  misc_feature: MA Experiment 20001903 PARAMETER Experiment Name: At_Drought_Reproduction_P Parameter: Organism Value: A. thaliana
  misc_feature: MA Experiment 20001903 PARAMETER Experiment Name: At_Drought_Reproduction_P Parameter: Plant Line Value: WS
  misc_feature: MA Experiment 20001903 PARAMETER Experiment Name: At_Drought_Reproduction_P Parameter: Timepoint (day) Value: 5
  misc_feature: MA Experiment 20001903 PARAMETER Experiment Name: At_Drought_Reproduction_P Parameter: Tissue Value: Rosettes
  misc_feature: MA Experiment 20001903 PARAMETER Experiment Name: At_Drought_Reproduction_P Parameter: Treatment Value: Drought vs. No Drought
  misc_feature: MA Experiment ID: 20001904 Result: Down-regulated in Transcription
  misc_feature: MA Experiment 20001904 PARAMETER Experiment Name: At_Drought_Reproduction_P Parameter: Age (day) Value: 37
  misc_feature: MA Experiment 20001904 PARAMETER Experiment Name: At_Drought_Reproduction_P Parameter: Organism Value: A. thaliana
  misc_feature: MA Experiment 20001904 PARAMETER Experiment Name: At_Drought_Reproduction_P Parameter: Plant Line Value: WS
  misc_feature: MA Experiment 20001904 PARAMETER Experiment Name: At_Drought_Reproduction_P Parameter: Timepoint (day) Value: 7
  misc_feature: MA Experiment 20001904 PARAMETER Experiment Name: At_Drought_Reproduction_P Parameter: Tissue Value: Rosettes
  misc_feature: MA Experiment 20001904 PARAMETER Experiment Name: At_Drought_Reproduction_P Parameter: Treatment Value: Drought vs. No Drought
  misc_feature: MA Experiment ID: 20001905 Result: Down-regulated in Transcription
  misc_feature: MA Experiment 20001905 PARAMETER Experiment Name: At_Drought_Reproduction_P Parameter: Age (day) Value: 40
  misc_feature: MA Experiment 20001905 PARAMETER Experiment Name: At_Drought_Reproduction_P Parameter: Organism Value: A. thaliana
  misc_feature: MA Experiment 20001905 PARAMETER Experiment Name: At_Drought_Reproduction_P Parameter: Plant Line Value: WS
  misc_feature: MA Experiment 20001905 PARAMETER Experiment Name: At_Drought_Reproduction_P Parameter: Timepoint (day) Value: 10
  misc_feature: MA Experiment 20001905 PARAMETER Experiment Name: At_Drought_Reproduction_P Parameter: Tissue Value: Rosettes
  misc_feature: MA Experiment 20001905 PARAMETER Experiment Name: At_Drought_Reproduction_P Parameter: Treatment Value: Drought vs. No Drought
  misc_feature: MA Experiment ID: 20001906 Result: Down-regulated in Transcription
  misc_feature: MA Experiment 20001906 PARAMETER Experiment Name: At_Drought_Reproduction_P Parameter: Age (day) Value: 35
  misc_feature: MA Experiment 20001906 PARAMETER Experiment Name: At_Drought_Reproduction_P Parameter: Organism Value: A. thaliana
  misc_feature: MA Experiment 20001906 PARAMETER Experiment Name: At_Drought_Reproduction_P Parameter: Plant Line Value: WS
  misc_feature: MA Experiment 20001906 PARAMETER Experiment Name: At_Drought_Reproduction_P Parameter: Timepoint (day) Value: 5
  misc_feature: MA Experiment 20001906 PARAMETER Experiment Name: At_Drought_Reproduction_P Parameter: Tissue Value: Siliques
  misc_feature: MA Experiment 20001906 PARAMETER Experiment Name: At_Drought_Reproduction_P Parameter: Treatment Value: Drought vs. No Drought
  misc_feature: MA Experiment ID: 20001908 Result: Down-regulated in Transcription
  misc_feature: MA Experiment 20001908 PARAMETER Experiment Name: At_Drought_Reproduction_P Parameter: Age (day) Value: 40
  misc_feature: MA Experiment 20001908 PARAMETER Experiment Name: At_Drought_Reproduction_P Parameter: Organism Value: A. thaliana
  misc_feature: MA Experiment 20001908 PARAMETER Experiment Name: At_Drought_Reproduction_P Parameter: Plant Line Value: WS
  misc_feature: MA Experiment 20001908 PARAMETER Experiment Name: At_Drought_Reproduction_P Parameter: Timepoint (day) Value: 10
  misc_feature: MA Experiment 20001908 PARAMETER Experiment Name: At_Drought_Reproduction_P Parameter: Tissue Value: Siliques
  misc_feature: MA Experiment 20001908 PARAMETER Experiment Name: At_Drought_Reproduction_P Parameter: Treatment Value: Drought vs. No Drought
  misc_feature: MA Experiment ID: 20001910 Result: Down-regulated in Transcription
  misc_feature: MA Experiment 20001910 PARAMETER Experiment Name: At_Drought_Reproduction_P Parameter: Age (day) Value: 37
  misc_feature: MA Experiment 20001910 PARAMETER Experiment Name: At_Drought_Reproduction_P Parameter: Organism Value: A. thaliana
  misc_feature: MA Experiment 20001910 PARAMETER Experiment Name: At_Drought_Reproduction_P Parameter: Plant Line Value: WS
  misc_feature: MA Experiment 20001910 PARAMETER Experiment Name: At_Drought_Reproduction_P Parameter: Timepoint (day) Value: 7
  misc_feature: MA Experiment 20001910 PARAMETER Experiment Name: At_Drought_Reproduction_P Parameter: Tissue Value: Flowers
  misc_feature: MA Experiment 20001910 PARAMETER Experiment Name: At_Drought_Reproduction_P Parameter: Treatment Value: Drought vs. No Drought
  misc_feature: MA Experiment ID: 20001911 Result: Down-regulated in Transcription
  misc_feature: MA Experiment 20001911 PARAMETER Experiment Name: At_Drought_Reproduction_P Parameter: Age (day) Value: 40
  misc_feature: MA Experiment 20001911 PARAMETER Experiment Name: At_Drought_Reproduction_P Parameter: Organism Value: A. thaliana
  misc_feature: MA Experiment 20001911 PARAMETER Experiment Name: At_Drought_Reproduction_P Parameter: Plant Line Value: WS
  misc_feature: MA Experiment 20001911 PARAMETER Experiment Name: At_Drought_Reproduction_P Parameter: Timepoint (day) Value: 10
  misc_feature: MA Experiment 20001911 PARAMETER Experiment Name: At_Drought_Reproduction_P Parameter: Tissue Value: Flowers
  misc_feature: MA Experiment 20001911 PARAMETER Experiment Name: At_Drought_Reproduction_P Parameter: Treatment Value: Drought vs. No Drought

SEQ ID NO: 49674 - protein, 171 aa, Arabidopsis thaliana; identical to SEQ ID NO: 37408
  peptide (1)..(171): Ceres Seq. ID no. 13592501
  misc_feature (34)..(171): Pfam Name: Photosystem I reaction centre subunit N (PSAN or PSI-N) Pfam Description: Photosystem I reaction centre subunit N (PSAN
  misc_feature (34)..(171): Pfam Name: Photosystem I reaction centre subunit N (PSAN or PSI-N) Pfam Description: Photosystem I reaction centre subunit N (PSAN
  misc_feature (34)..(171): Pfam Name: Photosystem I reaction centre subunit N (PSAN or PSI-N) Pfam Description: Photosystem I reaction centre subunit N (PSAN
  misc_feature (87)..(136): Homolog of NCBI NO: 485082 NR Description: photosystem I 9K protein - rice (strain
  misc_feature (74)..(165): Homolog of NCBI NO: 11134150 NR Description: Photosystem I reaction centre subunit N,
  misc_feature (39)..(165): Homolog of NCBI NO: 12744797 NR Description: PsaN precursor [Chlamydomonas reinhardtii]
  misc_feature (81)..(171): Homolog of NCBI NO: 3914466 NR Description: Photosystem I reaction centre subunit N,
  misc_feature (74)..(165): Homolog of NCBI NO: 11134150 NR Description: Photosystem I reaction centre subunit N,
  misc_feature (81)..(171): Homolog of NCBI NO: 3914466 NR Description: Photosystem I reaction centre subunit N,
  misc_feature (1)..(171): Homolog of NCBI NO: 28629385 NR Description: photosystem I-N subunit [Phaseolus vulgaris]
  misc_feature (1)..(171): Homolog of NCBI NO: 15237593 NR Description: photosystem I reaction center subunit PSI-N
  misc_feature (1)..(171): Homolog of NCBI NO: 28629385 NR Description: photosystem I-N subunit [Phaseolus vulgaris]
  misc_feature (30)..(171): Homolog of NCBI NO: 400879 NR Description: Photosystem I reaction centre subunit N,
  misc_feature (81)..(171): Homolog of NCBI NO: 3914466 NR Description: Photosystem I reaction centre subunit N,
  misc_feature (39)..(165): Homolog of NCBI NO: 12744797 NR Description: PsaN precursor [Chlamydomonas reinhardtii]
  misc_feature (74)..(165): Homolog of NCBI NO: 11134150 NR Description: Photosystem I reaction centre subunit N,
  misc_feature (87)..(136): Homolog of NCBI NO: 485082 NR Description: photosystem I 9K protein - rice (strain
  misc_feature (1)..(171): Homolog of NCBI NO: 15237593 NR Description: photosystem I reaction center subunit PSI-N
  misc_feature (30)..(171): Homolog of NCBI NO: 400879 NR Description: Photosystem I reaction centre subunit N,
  misc_feature (39)..(165): Homolog of NCBI NO: 12744797 NR Description: PsaN precursor [Chlamydomonas reinhardtii]
  misc_feature (87)..(136): Homolog of NCBI NO: 485082 NR Description: photosystem I 9K protein - rice (strain
  misc_feature (30)..(171): Homolog of NCBI NO: 400879 NR Description: Photosystem I reaction centre subunit N,
  misc_feature (1)..(171): Homolog of NCBI NO: 28629385 NR Description: photosystem I-N subunit [Phaseolus vulgaris]
  misc_feature (1)..(171): Homolog of NCBI NO: 15237593 NR Description: photosystem I reaction center subunit PSI-N

SEQ ID NO: 49675 - protein, 168 aa, Arabidopsis thaliana; identical to SEQ ID NO: 37409
  peptide (1)..(168): Ceres Seq. ID no. 13592502
  misc_feature (31)..(168): Pfam Name: Photosystem I reaction centre subunit N (PSAN or PSI-N) Pfam Description: Photosystem I reaction centre subunit N (PSAN
  misc_feature (31)..(168): Pfam Name: Photosystem I reaction centre subunit N (PSAN or PSI-N) Pfam Description: Photosystem I reaction centre subunit N (PSAN
  misc_feature (31)..(168): Pfam Name: Photosystem I reaction centre subunit N (PSAN or PSI-N) Pfam Description: Photosystem I reaction centre subunit N (PSAN
  misc_feature (84)..(133): Homolog of NCBI NO: 485082 NR Description: photosystem I 9K protein - rice (strain
  misc_feature (71)..(162): Homolog of NCBI NO: 11134150 NR Description: Photosystem I reaction centre subunit N,
  misc_feature (36)..(162): Homolog of NCBI NO: 12744797 NR Description: PsaN precursor [Chlamydomonas reinhardtii]
  misc_feature (78)..(168): Homolog of NCBI NO: 3914466 NR Description: Photosystem I reaction centre subunit N,
  misc_feature (71)..(162): Homolog of NCBI NO: 11134150 NR Description: Photosystem I reaction centre subunit N,
  misc_feature (78)..(168): Homolog of NCBI NO: 3914466 NR Description: Photosystem I reaction centre subunit N,
  misc_feature (1)..(168): Homolog of NCBI NO: 28629385 NR Description: photosystem I-N subunit [Phaseolus vulgaris]
  misc_feature (1)..(168): Homolog of NCBI NO: 15237593 NR Description: photosystem I reaction center subunit PSI-N
  misc_feature (1)..(168): Homolog of NCBI NO: 28629385 NR Description: photosystem I-N subunit [Phaseolus vulgaris]
  misc_feature (27)..(168): Homolog of NCBI NO: 400879 NR Description: Photosystem I reaction centre subunit N,
  misc_feature (78)..(168): Homolog of NCBI NO: 3914466 NR Description: Photosystem I reaction centre subunit N,
  misc_feature (36)..(162): Homolog of NCBI NO: 12744797 NR Description: PsaN precursor [Chlamydomonas reinhardtii]
  misc_feature (71)..(162): Homolog of NCBI NO: 11134150 NR Description: Photosystem I reaction centre subunit N,
  misc_feature (84)..(133): Homolog of NCBI NO: 485082 NR Description: photosystem I 9K protein - rice (strain
  misc_feature (1)..(168): Homolog of NCBI NO: 15237593 NR Description: photosystem I reaction center subunit PSI-N
  misc_feature (27)..(168): Homolog of NCBI NO: 400879 NR Description: Photosystem I reaction centre subunit N,
  misc_feature (36)..(162): Homolog of NCBI NO: 12744797 NR Description: PsaN precursor [Chlamydomonas reinhardtii]
  misc_feature (84)..(133): Homolog of NCBI NO: 485082 NR Description: photosystem I 9K protein - rice (strain
  misc_feature (27)..(168): Homolog of NCBI NO: 400879 NR Description: Photosystem I reaction centre subunit N,
  misc_feature (1)..(168): Homolog of NCBI NO: 28629385 NR Description: photosystem I-N subunit [Phaseolus vulgaris]
  misc_feature (1)..(168): Homolog of NCBI NO: 15237593 NR Description: photosystem I reaction center subunit PSI-N

SEQ ID NO: 49676 - protein, 130 aa, Arabidopsis thaliana; identical to SEQ ID NO: 37410
  peptide (1)..(130): Ceres Seq. ID no. 13592503
  misc_feature (1)..(130): Pfam Name: Photosystem I reaction centre subunit N (PSAN or PSI-N) Pfam Description: Photosystem I reaction centre subunit N (PSAN
  misc_feature (1)..(130): Pfam Name: Photosystem I reaction centre subunit N (PSAN or PSI-N) Pfam Description: Photosystem I reaction centre subunit N (PSAN
  misc_feature (1)..(130): Pfam Name: Photosystem I reaction centre subunit N (PSAN or PSI-N) Pfam Description: Photosystem I reaction centre subunit N (PSAN
  misc_feature (46)..(95): Homolog of NCBI NO: 485082 NR Description: photosystem I 9K protein - rice (strain
  misc_feature (33)..(124): Homolog of NCBI NO: 11134150 NR Description: Photosystem I reaction centre subunit N,
  misc_feature (1)..(124): Homolog of NCBI NO: 12744797 NR Description: PsaN precursor [Chlamydomonas reinhardtii]
  misc_feature (40)..(130): Homolog of NCBI NO: 3914466 NR Description: Photosystem I reaction centre subunit N,
  misc_feature (33)..(124): Homolog of NCBI NO: 11134150 NR Description: Photosystem I reaction centre subunit N,
  misc_feature (40)..(130): Homolog of NCBI NO: 3914466 NR Description: Photosystem I reaction centre subunit N,
  misc_feature (1)..(130): Homolog of NCBI NO: 28629385 NR Description: photosystem I-N subunit [Phaseolus vulgaris]
  misc_feature (1)..(130): Homolog of NCBI NO: 15237593 NR Description: photosystem I reaction center subunit PSI-N
  misc_feature (1)..(130): Homolog of NCBI NO: 28629385 NR Description: photosystem I-N subunit [Phaseolus vulgaris]
  misc_feature (1)..(130): Homolog of NCBI NO: 400879 NR Description: Photosystem I reaction centre subunit N,
  misc_feature (40)..(130): Homolog of NCBI NO: 3914466 NR Description: Photosystem I reaction centre subunit N,
  misc_feature (1)..(124): Homolog of NCBI NO: 12744797 NR Description: PsaN precursor [Chlamydomonas reinhardtii]
  misc_feature (33)..(124): Homolog of NCBI NO: 11134150 NR Description: Photosystem I reaction centre subunit N,
  misc_feature (46)..(95): Homolog of NCBI NO: 485082 NR Description: photosystem I 9K protein - rice (strain
  misc_feature (1)..(130): Homolog of NCBI NO: 15237593 NR Description: photosystem I reaction center subunit PSI-N
  misc_feature (1)..(130): Homolog of NCBI NO: 400879 NR Description: Photosystem I reaction centre subunit N,
  misc_feature (1)..(124): Homolog of NCBI NO: 12744797 NR Description: PsaN precursor [Chlamydomonas reinhardtii]
  misc_feature (46)..(95): Homolog of NCBI NO: 485082 NR Description: photosystem I 9K protein - rice (strain
  misc_feature (1)..(130): Homolog of NCBI NO: 400879 NR Description: Photosystem I reaction centre subunit N,
  misc_feature (1)..(130): Homolog of NCBI NO: 28629385 NR Description: photosystem I-N subunit [Phaseolus vulgaris]
  misc_feature (1)..(130): Homolog of NCBI NO: 15237593 NR Description: photosystem I reaction center subunit PSI-N

SEQ ID NO: 49677 - DNA, 1172 bp, Arabidopsis thaliana
  misc_feature (1)..(1172): Ceres Seq. ID no. 13648445
  misc_feature: MA Experiment ID: 20000171 Result: Up-regulated in Transcription
  misc_feature: MA Experiment 20000171 PARAMETER Experiment Name: At_42deg_Heat_P Parameter: Age (day) Value: 14
  misc_feature: MA Experiment 20000171 PARAMETER Experiment Name: At_42deg_Heat_P Parameter: Organism Value: A. thaliana
  misc_feature: MA Experiment 20000171 PARAMETER Experiment Name: At_42deg_Heat_P Parameter: Plant Line Value: WS
  misc_feature: MA Experiment 20000171 PARAMETER Experiment Name: At_42deg_Heat_P Parameter: Temperature (deg C) Value: 42 vs. 22
  misc_feature: MA Experiment 20000171 PARAMETER Experiment Name: At_42deg_Heat_P Parameter: Timepoint (hr) Value: 1
  misc_feature: MA Experiment 20000171 PARAMETER Experiment Name: At_42deg_Heat_P Parameter: Tissue Value: Aerial
  misc_feature: MA Experiment ID: 20000173 Result: Up-regulated in Transcription
  misc_feature: MA Experiment 20000173 PARAMETER Experiment Name: At_42deg_Heat_P Parameter: Age (day) Value: 14
  misc_feature: MA Experiment 20000173 PARAMETER Experiment Name: At_42deg_Heat_P Parameter: Organism Value: A. thaliana
  misc_feature: MA Experiment 20000173 PARAMETER Experiment Name: At_42deg_Heat_P Parameter: Plant Line Value: WS
  misc_feature: MA Experiment 20000173 PARAMETER Experiment Name: At_42deg_Heat_P Parameter: Temperature (deg C) Value: 42 vs. 22
  misc_feature: MA Experiment 20000173 PARAMETER Experiment Name: At_42deg_Heat_P Parameter: Timepoint (hr) Value: 6
  misc_feature: MA Experiment 20000173 PARAMETER Experiment Name: At_42deg_Heat_P Parameter: Tissue Value: Aerial
  misc_feature: MA Experiment ID: 20001248 Result: Down-regulated in Transcription
  misc_feature: MA Experiment 20001248 PARAMETER Experiment Name: At_Far-red-induction_P Parameter: Age (day) Value: 7
  misc_feature: MA Experiment 20001248 PARAMETER Experiment Name: At_Far-red-induction_P Parameter: Light Value: Far-red vs. White
  misc_feature: MA Experiment 20001248 PARAMETER Experiment Name: At_Far-red-induction_P Parameter: Organism Value: A. thaliana
  misc_feature: MA Experiment 20001248 PARAMETER Experiment Name: At_Far-red-induction_P Parameter: Plant Line Value: Columbia
  misc_feature: MA Experiment 20001248 PARAMETER Experiment Name: At_Far-red-induction_P Parameter: Timepoint (hr) Value: 4
  misc_feature: MA Experiment 20001248 PARAMETER Experiment Name: At_Far-red-induction_P Parameter: Tissue Value: Whole Plant
  misc_feature: MA Experiment ID: 20001450 Result: Down-regulated in Transcription
  misc_feature: MA Experiment 20001450 PARAMETER Experiment Name: At_Far-red-induction_P Parameter: Age (day) Value: 7
  misc_feature: MA Experiment 20001450 PARAMETER Experiment Name: At_Far-red-induction_P Parameter: Light Value: Far-red vs. White
  misc_feature: MA Experiment 20001450 PARAMETER Experiment Name: At_Far-red-induction_P Parameter: Organism Value: A. thaliana
  misc_feature: MA Experiment 20001450 PARAMETER Experiment Name: At_Far-red-induction_P Parameter: Plant Line Value: Columbia
  misc_feature: MA Experiment 20001450 PARAMETER Experiment Name: At_Far-red-induction_P Parameter: Timepoint (hr) Value: 8
  misc_feature: MA Experiment 20001450 PARAMETER Experiment Name: At_Far-red-induction_P Parameter: Tissue Value: Whole Plant
  misc_feature: MA Experiment ID: 20001451 Result: Down-regulated in Transcription
  misc_feature: MA Experiment 20001451 PARAMETER Experiment Name: At_Far-red-induction_P Parameter: Age (day) Value: 7
  misc_feature: MA Experiment 20001451 PARAMETER Experiment Name: At_Far-red-induction_P Parameter: Light Value: Far-red vs. White
  misc_feature: MA Experiment 20001451 PARAMETER Experiment Name: At_Far-red-induction_P Parameter: Organism Value: A. thaliana
  misc_feature: MA Experiment 20001451 PARAMETER Experiment Name: At_Far-red-induction_P Parameter: Plant Line Value: Columbia
  misc_feature: MA Experiment 20001451 PARAMETER Experiment Name: At_Far-red-induction_P Parameter: Timepoint (hr) Value: 24
  misc_feature: MA Experiment 20001451 PARAMETER Experiment Name: At_Far-red-induction_P Parameter: Tissue Value: Whole Plant
  misc_feature: MA Experiment ID: 20001560 Result: Up-regulated in Transcription
  misc_feature: MA Experiment 20001560 PARAMETER Experiment Name: At_Drought_Soil_Dry_P Parameter: Age (day) Value: 28
  misc_feature: MA Experiment 20001560 PARAMETER Experiment Name: At_Drought_Soil_Dry_P Parameter: Organism Value: A. thaliana
  misc_feature: MA Experiment 20001560 PARAMETER Experiment Name: At_Drought_Soil_Dry_P Parameter: Plant Line Value: WS
  misc_feature: MA Experiment 20001560 PARAMETER Experiment Name: At_Drought_Soil_Dry_P Parameter: Post Timepoint (hr) Value: None
  misc_feature: MA Experiment 20001560 PARAMETER Experiment Name: At_Drought_Soil_Dry_P Parameter: Post-Treatment Value: None
  misc_feature: MA Experiment 20001560 PARAMETER Experiment Name: At_Drought_Soil_Dry_P Parameter: Timepoint (day) Value: 14
  misc_feature: MA Experiment 20001560 PARAMETER Experiment Name: At_Drought_Soil_Dry_P Parameter: Treatment Value: Drought vs. No Drought
agagagctcactagtccccccccccccccccacagagtttcggctcctccgttgtgtttcaggacgacgcaaaggggaaaaaaaattgaattctttctctccaagcgaaactagggtttcgaaagtctctgtctcatcaaagcttcgaaaagaaagtgattgcattaagagaaacattgggataaaagatgagctttactcaggctaattgttttcgaccatcctactatcctgcaaggataacacgaccaaattgcatctccagtgtacctattaggtcttcagtacgctttgatcacttcccgcgtacctcgtttactcttcgagctactgctgcagtgtctactcagttttcgcctcttcttgatcatcgccgtcgtttacctactgggaaatcgaaacaaagttctgctgtgtgcttatttggtgggaaagataaacctgatggtagtgatgagatatcgccatggaaagcaatagagaaagctatggggaagaaatcggttgaagatatgttgcgagagcagatacagaagaaagacttttatgatactgacagtggcggcaacatgcctccacgtggaggaggcagtggtggcggtggtggaaatggtgaggagcgtcctgaagggtcaggaggagaagatggtggtcttgctgggatcgcagatgaaactttgcaagtggttttggcgaccttaggcttcatctttttgtacacatacattatcactggggaggaattggtcaagcttgcaagggattacattaggtttcttatgggaagacctaagactgttcgattgacccgagccatggatagttggaacggattcttggagaagatgtcgaggcaaagagtgtatgatgagtattggctagaaaaggcgatcatcaacacaccaacctggtatgatagccctgagaagtacagacgtgttatcaaggcttatgttgattcaaattctgatgaagcttatgtggaatcaaattctgatgaggtatcttactaggttaggaacaggaagagatccataataacaattgagttttttttcttagtgtttgaaattaagaatcagtttctttgaattagatttatgttcgtacatttgtatggaattggtttatttatacacgatgaacattctcgagggggggcccggtcccaa

SEQ ID NO: 49678 - protein, 274 aa, Arabidopsis thaliana
  peptide (1)..(274): Ceres Seq. ID no. 13648446
  misc_feature (46)..(255): Homolog of NCBI NO: 38345414 NR Description: OSJNBb0091E11.5 [Oryza sativa (japonica
  misc_feature (1)..(232): Homolog of NCBI NO: 15231725 NR Description: glycine-rich protein [Arabidopsis thaliana]
  misc_feature (101)..(274): Homolog of NCBI NO: 25408887 NR Description: hypothetical protein At2g43630 [imported] -
  misc_feature (1)..(274): Homolog of NCBI NO: 30689439 NR Description: expressed protein [Arabidopsis thaliana]
MSFTQANCFRPSYYPARITRPNCISSVPIRSSVRFDHFPRTSFTLRATAAVSTQFSPLLDHRRRLPTGKSKQSSAVCLFGGKDKPDGSDEISPWKAIEKAMGKKSVEDMLREQIQKKDFYDTDSGGNMPPRGGGSGGGGGNGEERPEGSGGEDGGLAGIADETLQVVLATLGFIFLYTYIITGEELVKLARDYIRFLMGRPKTVRLTRAMDSWNGFLEKMSRQRVYDEYWLEKAIINTPTWYDSPEKYRRVIKAYVDSNSDEAYVESNSDEVSY

SEQ ID NO: 49679 - protein, 174 aa, Arabidopsis thaliana
  peptide (1)..(174): Ceres Seq. ID no. 13648447
  misc_feature (1)..(155): Homolog of NCBI NO: 38345414 NR Description: OSJNBb0091E11.5 [Oryza sativa (japonica
  misc_feature (1)..(132): Homolog of NCBI NO: 15231725 NR Description: glycine-rich protein [Arabidopsis thaliana]
  misc_feature (1)..(174): Homolog of NCBI NO: 25408887 NR Description: hypothetical protein At2g43630 [imported] -
  misc_feature (1)..(174): Homolog of NCBI NO: 30689439 NR Description: expressed protein [Arabidopsis thaliana]
MGKKSVEDMLREQIQKKDFYDTDSGGNMPPRGGGSGGGGGNGEERPEGSGGEDGGLAGIADETLQVVLATLGFIFLYTYIITGEELVKLARDYIRFLMGRPKTVRLTRAMDSWNGFLEKMSRQRVYDEYWLEKAIINTPTWYDSPEKYRRVIKAYVDSNSDEAYVESNSDEVSY

SEQ ID NO: 49680 - protein, 166 aa, Arabidopsis thaliana
  peptide (1)..(166): Ceres Seq. ID no. 13648448
  misc_feature (1)..(147): Homolog of NCBI NO: 38345414 NR Description: OSJNBb0091E11.5 [Oryza sativa (japonica
  misc_feature (1)..(124): Homolog of NCBI NO: 15231725 NR Description: glycine-rich protein [Arabidopsis thaliana]
  misc_feature (1)..(166): Homolog of NCBI NO: 25408887 NR Description: hypothetical protein At2g43630 [imported] -
  misc_feature (1)..(166): Homolog of NCBI NO: 30689439 NR Description: expressed protein [Arabidopsis thaliana]
MLREQIQKKDFYDTDSGGNMPPRGGGSGGGGGNGEERPEGSGGEDGGLAGIADETLQVVLATLGFIFLYTYIITGEELVKLARDYIRFLMGRPKTVRLTRAMDSWNGFLEKMSRQRVYDEYWLEKAIINTPTWYDSPEKYRRVIKAYVDSNSDEAYVESNSDEVSY

SEQ ID NO: 49681 - DNA, 1061 bp, Arabidopsis thaliana
  misc_feature (1)..(1061): Ceres Seq. ID no. 13588596
  misc_feature: MA Experiment ID: 20000180 Result: Up-regulated in Transcription
  misc_feature: MA Experiment 20000180 PARAMETER Experiment Name: At_Germinating_Seeds_P Parameter: Age (hr) Value: 24 vs. 0
  misc_feature: MA Experiment 20000180 PARAMETER Experiment Name: At_Germinating_Seeds_P Parameter: Tissue Value: Germinating Seeds
gctcgatcatttttgcagtctctctcccaaccaatcccattctgctcgactctcattgttgcagaggtttaggaagaaaggaatggttcgatcgtgactttgaattgggatattgtgtgtaaaatgtgggtgcctacattgagctcaagctcatgttcaagtgatgagagggatgagagcagtggagaagccgcgcttacgccggtttatctcaatgtctatgatctaacgcctgtcaacaattacctttattggtttgggattggcattttccattctggtattgaggctcataatttggaatattgctatggagctcacgagtatccaacaagtggggtatatgaggtggaacctaggaactgtccagggttcatctttagacggtcggttttactgggaactaccagcatgtcccgttcagatttccgctcatacatggagaagctttcaagaaagtaccatggtgacacttaccatttgattgccaagaactgtaaccatttcactgaagaagtatgcttgcagctaacaggaaagcctattccaggatggattaatcggctggcccgagtaggttccttctgtaattgtcttctgccagaaagcattcagcttacagctgttagtgctcttcccgaacgccttgaattctccgatgaggatgaatcaaactcagaggcatcttctgtgtcagatgaagaaggatcagagcagcatctcataaatgtagcagacagagagattgtgtatctacaaaacaaaccagtgcgacttaccagagaggagatcccctgagaaaccaaccagcgacgacaatgtacttcctcctgaatcaacccaaccaatcatcaaaacttgcagagtgtggtgtgcccatggaagctgaaagggagtaagttatatatctcgttttgtcaccttagtgctgcgttggttctgtcggaaattcgatttggtattcttctcatcattttaggaatgtaaaaacggattcccggattcattttaatcagacaaccctttggcagtaaaaatctaaagatttctccatattttcc

SEQ ID NO: 49682 - protein, 224 aa, Arabidopsis thaliana
  peptide (1)..(224): Ceres Seq. ID no. 13588597
  misc_feature (26)..(149): Pfam Name: Eukaryotic protein of unknown function (DUF862) Pfam Description: Eukaryotic protein of unknown function (DUF862)
  misc_feature (27)..(196): Homolog of NCBI NO: 18412886 NR Description: expressed protein [Arabidopsis thaliana]
  misc_feature (27)..(191): Homolog of NCBI NO: 9802596 NR Description: T2E6.19 [Arabidopsis thaliana]
  misc_feature (27)..(191): Homolog of NCBI NO: 21593644 NR Description: unknown [Arabidopsis thaliana]
  misc_feature (27)..(191): Homolog of NCBI NO: 18401869 NR Description: expressed protein [Arabidopsis thaliana]
  misc_feature (18)..(214): Homolog of NCBI NO: 38346173 NR Description: OSJNBa0079A21.20 [Oryza sativa (japonica
  misc_feature (97)..(224): Homolog of NCBI NO: 11762142 NR Description: AT4g17486 [Arabidopsis thaliana]
  misc_feature (1)..(221): Homolog of NCBI NO: 15238059 NR Description: expressed protein [Arabidopsis thaliana]
  misc_feature (1)..(224): Homolog of NCBI NO: 30684058 NR Description: expressed protein [Arabidopsis thaliana]
  misc_feature (1)..(63): Homolog of NCBI NO: 7488100 NR Description: probable EREBP-4 - Arabidopsis thaliana
  misc_feature (49)..(224): Homolog of NCBI NO: 7488100 NR Description: probable EREBP-4 - Arabidopsis thaliana
MWVPTLSSSSCSSDERDESSGEAALTPVYLNVYDLTPVNNYLYWFGIGIFHSGIEAHNLEYCYGAHEYPTSGVYEVEPRNCPGFIFRRSVLLGTTSMSRSDFRSYMEKLSRKYHGDTYHLIAKNCNHFTEEVCLQLTGKPIPGWINRLARVGSFCNCLLPESIQLTAVSALPERLEFSDEDESNSEASSVSDEEGSEQHLINVADREIVYLQNKPVRLTREEIP

SEQ ID NO: 49683 - protein, 128 aa, Arabidopsis thaliana
  peptide (1)..(128): Ceres Seq. ID no. 13588598
  misc_feature (1)..(53): Pfam Name: Eukaryotic protein of unknown function (DUF862) Pfam Description: Eukaryotic protein of unknown function (DUF862)
  misc_feature (1)..(95): Homolog of NCBI NO: 18420889 NR Description: expressed protein [Arabidopsis thaliana]
  misc_feature (1)..(100): Homolog of NCBI NO: 18412886 NR Description: expressed protein [Arabidopsis thaliana]
  misc_feature (1)..(95): Homolog of NCBI NO: 9802596 NR Description: T2E6.19 [Arabidopsis thaliana]
  misc_feature (1)..(95): Homolog of NCBI NO: 21593644 NR Description: unknown [Arabidopsis thaliana]
  misc_feature (1)..(95): Homolog of NCBI NO: 18401869 NR Description: expressed protein [Arabidopsis thaliana]
  misc_feature (1)..(118): Homolog of NCBI NO: 38346173 NR Description: OSJNBa0079A21.20 [Oryza sativa (japonica
  misc_feature (1)..(128): Homolog of NCBI NO: 11762142 NR Description: AT4g17486 [Arabidopsis thaliana]
  misc_feature (1)..(125): Homolog of NCBI NO: 15238059 NR Description: expressed protein [Arabidopsis thaliana]
  misc_feature (1)..(128): Homolog of NCBI NO: 30684058 NR Description: expressed protein [Arabidopsis thaliana]
  misc_feature (1)..(128): Homolog of NCBI NO: 7488100 NR Description: probable EREBP-4 - Arabidopsis thaliana
MSRSDFRSYMEKLSRKYHGDTYHLIAKNCNHFTEEVCLQLTGKPIPGWINRLARVGSFCNCLLPESIQLTAVSALPERLEFSDEDESNSEASSVSDEEGSEQHLINVADREIVYLQNKPVRLTREEIP

SEQ ID NO: 49684 - protein, 119 aa, Arabidopsis thaliana
  peptide (1)..(119): Ceres Seq. ID no. 13588599
  misc_feature (1)..(86): Homolog of NCBI NO: 18420889 NR Description: expressed protein [Arabidopsis thaliana]
  misc_feature (1)..(91): Homolog of NCBI NO: 18412886 NR Description: expressed protein [Arabidopsis thaliana]
  misc_feature (1)..(86): Homolog of NCBI NO: 9802596 NR Description: T2E6.19 [Arabidopsis thaliana]
  misc_feature (1)..(86): Homolog of NCBI NO: 21593644 NR Description: unknown [Arabidopsis thaliana]
  misc_feature (1)..(86): Homolog of NCBI NO: 18401869 NR Description: expressed protein [Arabidopsis thaliana]
  misc_feature (1)..(109): Homolog of NCBI NO: 38346173 NR Description: OSJNBa0079A21.20 [Oryza sativa (japonica
  misc_feature (1)..(119): Homolog of NCBI NO: 11762142 NR Description: AT4g17486 [Arabidopsis thaliana]
  misc_feature (1)..(116): Homolog of NCBI NO: 15238059 NR Description: expressed protein [Arabidopsis thaliana]
  misc_feature (1)..(119): Homolog of NCBI NO: 30684058 NR Description: expressed protein [Arabidopsis thaliana]
  misc_feature (1)..(119): Homolog of NCBI NO: 7488100 NR Description: probable EREBP-4 - Arabidopsis thaliana
MEKLSRKYHGDTYHLIAKNCNHFTEEVCLQLTGKPIPGWINRLARVGSFCNCLLPESIQLTAVSALPERLEFSDEDESNSEASSVSDEEGSEQHLINVADREIVYLQNKPVRLTREEIP

SEQ ID NO: 49685 - DNA, 1504 bp, Arabidopsis thaliana
  misc_feature (1)..(1504): Ceres Seq. ID no. 12591261
  misc_feature: MA Experiment ID: 20000173 Result: Down-regulated in Transcription
  misc_feature: MA Experiment 20000173 PARAMETER Experiment Name: At_42deg_Heat_P Parameter: Age (day) Value: 14
  misc_feature: MA Experiment 20000173 PARAMETER Experiment Name: At_42deg_Heat_P Parameter: Organism Value: A. thaliana
  misc_feature: MA Experiment 20000173 PARAMETER Experiment Name: At_42deg_Heat_P Parameter: Plant Line Value: WS
  misc_feature: MA Experiment 20000173 PARAMETER Experiment Name: At_42deg_Heat_P Parameter: Temperature (deg C) Value: 42 vs. 22
  misc_feature: MA Experiment 20000173 PARAMETER Experiment Name: At_42deg_Heat_P Parameter: Timepoint (hr) Value: 6
  misc_feature: MA Experiment 20000173 PARAMETER Experiment Name: At_42deg_Heat_P Parameter: Tissue Value: Aerial
  misc_feature: MA Experiment ID: 20000234 Result: Up-regulated in Transcription
  misc_feature: MA Experiment 20000234 PARAMETER Experiment Name: At_Siliques_P Parameter: Age (day) Value: 21
  misc_feature: MA Experiment 20000234 PARAMETER Experiment Name: At_Siliques_P Parameter: Organism Value: A. thaliana
  misc_feature: MA Experiment 20000234 PARAMETER Experiment Name: At_Siliques_P Parameter: Plant Line Value: WS
  misc_feature: MA Experiment 20000234 PARAMETER Experiment Name: At_Siliques_P Parameter: Tissue Value: Less Than 5mm Siliques vs. Whole Plant
  misc_feature: MA Experiment ID: 20000286 Result: Up-regulated in Transcription
  misc_feature: MA Experiment 20000286 PARAMETER Experiment Name: At_Open_Flower_P Parameter: Age (day) Value: 21
  misc_feature: MA Experiment 20000286 PARAMETER Experiment Name: At_Open_Flower_P Parameter: Plant Line Value: WS
  misc_feature: MA Experiment 20000286 PARAMETER Experiment Name: At_Open_Flower_P Parameter: Tissue Value: Half Open vs. Whole Plant
  misc_feature: MA Experiment ID: 20000794 Result: Up-regulated in Transcription
  misc_feature: MA Experiment 20000794 PARAMETER Experiment Name: At_Petals_P Parameter: Age (day) Value: 23-25 days
  misc_feature: MA Experiment 20000794 PARAMETER Experiment Name: At_Petals_P Parameter: Plant Line Value: WS
  misc_feature: MA Experiment 20000794 PARAMETER Experiment Name: At_Petals_P Parameter: Tissue Value: Petals vs. Whole plant
aaacccattgctcaagaaaacttttcagacagatttgtttcgagaaaagatcgcttgcttggcttttcaggataatctgagatctatctgtagaagaagcagatacagaattcagaaacgatgaccgacgtcgatgaatccgttagacgccgtacagccgccgtttccgagtaccggaaaaagctcctccaacataaggaactcgaatcccgtgttcgaacagctagggagaacttaagaggagctaaaaaggaattcaacaaaaccgaggatgatctcaagtctcttcaaagtgttgggcagattattggagaagtgcttcgacccctggataatgaaagattgattgtgaaagcgagcagtggtccacgttatgtggtgggttgccgaagcaaagtggataaggaaaagctaacctccggaactcgagttgttctcgatatgacaacactaacaattatgcgagcccttccccgagaagttgatcctgttgtttataacatgcttcatgaagaccctggcaacattagctactccgctgtcggagggttaggtgatcagatcagagaactcagggaatctattgagctccctctcatgaatcctgagcttttcctcagagtagggatcaaacctccaaagggtgtccttctgtatggacctccaggtactggaaaaactctactagccagggctattgccagcaacatcgatgctaacttcttgaaggttgtatccagtgcaatcatagacaagtacattggagaaagtgctaggctgattcgggagatgtttaactatgcccgtgaacatcagccttgtatcatattcatggatgaaatcgatgctattggtgggcgtcgttttagtgagggaactagtgctgatcgtgaaattcaaagaacgcttatggagttactcaaccagcttgatgggtttgacaacctcggaaaggtgaaaatgataatggccacaaacaggcctgatgtgcttgatcctgcgcttctccgtccgggaaggttagatagaaagattgagatccctttgccaaacgagcagtcaagaatggatattcttaagatccatgcagctggtatcgccaaacatggtgaaatcgattacgaggctattgtcaaacttgcagagggattcaatggtgctgatctgcgtaacatatgcacggaagctggaatgtttgcaatccgagcagagcgggattatgtgatccatgaagatttcatgaaggcggtgagaaagctgagtgaggccaagaaactggagtccagttcgcactataacgctgattttggaaaagagtgagagagtacacactctttcttgtgctttagggatgaagaaaggacattgcaatgactgtctcgtattctttattagcaatgtgaaacttgtttttttaactctttcaaaagcaaagcttgttgtgaagtgtgtgcttagttactacgtttcagtaatttagtgcttcaaacaagcatttacctct

SEQ ID NO: 49686 - protein, 399 aa, Arabidopsis thaliana
  peptide (1)..(399): Ceres Seq. ID no. 12591262
  misc_feature (175)..(362): Pfam Name: ATPase family associated with various cellular Pfam Description: ATPase family associated with various cellular
  misc_feature (11)..(392): Homolog of NCBI NO: 2960216 NR Description: 26S proteasome regulatory ATPase subunit 10b
  misc_feature (11)..(392): Homolog of NCBI NO: 6434958 NR Description: 26S proteasome regulatory complex subunit p42D
  misc_feature (1)..(392): Homolog of NCBI NO: 17945503 NR Description: RE23388p [Drosophila melanogaster]
  misc_feature (11)..(392): Homolog of NCBI NO: 24640100 NR Description: CG3455-PA [Drosophila melanogaster]
  misc_feature (1)..(392): Homolog of NCBI NO: 31242591 NR Description: ENSANGP00000017473 [Anopheles gambiae]
  misc_feature (26)..(399): Homolog of NCBI NO: 17298147 NR Description: 26S proteasome regulatory particle triple-A
  misc_feature (5)..(399): Homolog of NCBI NO: 11094192 NR Description: 26S proteasome regulatory particle triple-A
  misc_feature (1)..(399): Homolog of NCBI NO: 24745880 NR Description: 26S proteasome AAA-ATPase subunit RPT4a [Solanum
  misc_feature (1)..(399): Homolog of NCBI NO: 15219503 NR Description: 26S proteasome regulatory particle triple-A
  misc_feature (1)..(399): Homolog of NCBI NO: 15239140 NR Description: 26S proteasome AAA-ATPase subunit RPT4a
MTDVDESVRRRTAAVSEYRKKLLQHKELESRVRTARENLRGAKKEFNKTEDDLKSLQSVGQIIGEVLRPLDNERLIVKASSGPRYVVGCRSKVDKEKLTSGTRVVLDMTTLTIMRALPREVDPVVYNMLHEDPGNISYSAVGGLGDQIRELRESIELPLMNPELFLRVGIKPPKGVLLYGPPGTGKTLLARAIASNIDANFLKVVSSAIIDKYIGESARLIREMFNYAREHQPCIIFMDEIDAIGGRRFSEGTSADREIQRTLMELLNQLDGFDNLGKVKMIMATNRPDVLDPALLRPGRLDRKIEIPLPNEQSRMDILKIHAAGIAKHGEIDYEAIVKLAEGFNGADLRNICTEAGMFAIRAERDYVIHEDFMKAVRKLSEAKKLESSSHYNADFGKE

SEQ ID NO: 49687 - protein, 292 aa, Arabidopsis thaliana
  peptide (1)..(292): Ceres Seq. ID no. 12591263
  misc_feature (68)..(255): Pfam Name: ATPase family associated with various cellular Pfam Description: ATPase family associated with various cellular
  misc_feature (1)..(285): Homolog of NCBI NO: 2960216 NR Description: 26S proteasome regulatory ATPase subunit 10b
  misc_feature (1)..(285): Homolog of NCBI NO: 6434958 NR Description: 26S proteasome regulatory complex subunit p42D
  misc_feature (1)..(285): Homolog of NCBI NO: 17945503 NR Description: RE23388p [Drosophila melanogaster]
  misc_feature (1)..(285): Homolog of NCBI NO: 24640100 NR Description: CG3455-PA [Drosophila melanogaster]
  misc_feature (1)..(285): Homolog of NCBI NO: 31242591 NR Description: ENSANGP00000017473 [Anopheles gambiae]
  misc_feature (1)..(292): Homolog of NCBI NO: 17298147 NR Description: 26S proteasome regulatory particle triple-A
  misc_feature (1)..(292): Homolog of NCBI NO: 11094192 NR Description: 26S proteasome regulatory particle triple-A
  misc_feature (1)..(292): Homolog of NCBI NO: 24745880 NR Description: 26S proteasome AAA-ATPase subunit RPT4a [Solanum
  misc_feature (1)..(292): Homolog of NCBI NO: 15219503 NR Description: 26S proteasome regulatory particle triple-A
  misc_feature (1)..(292): Homolog of NCBI NO: 15239140 NR Description: 26S proteasome AAA-ATPase subunit RPT4a
MTTLTIMRALPREVDPVVYNMLHEDPGNISYSAVGGLGDQIRELRESIELPLMNPELFLRVGIKPPKGVLLYGPPGTGKTLLARAIASNIDANFLKVVSSAIIDKYIGESARLIREMFNYAREHQPCIIFMDEIDAIGGRRFSEGTSADREIQRTLMELLNQLDGFDNLGKVKMIMATNRPDVLDPALLRPGRLDRKIEIPLPNEQSRMDILKIHAAGIAKHGEIDYEAIVKLAEGFNGADLRNICTEAGMFAIRAERDYVIHEDFMKAVRKLSEAKKLESSSHYNADFGKE

SEQ ID NO: 49688 - protein, 286 aa, Arabidopsis thaliana
  peptide (1)..(286): Ceres Seq. ID no. 12591264
  misc_feature (62)..(249): Pfam Name: ATPase family associated with various cellular Pfam Description: ATPase family associated with various cellular
  misc_feature (1)..(279): Homolog of NCBI NO: 2960216 NR Description: 26S proteasome regulatory ATPase subunit 10b
  misc_feature (1)..(279): Homolog of NCBI NO: 6434958 NR Description: 26S proteasome regulatory complex subunit p42D
  misc_feature (1)..(279): Homolog of NCBI NO: 17945503 NR Description: RE23388p [Drosophila melanogaster]
  misc_feature (1)..(279): Homolog of NCBI NO: 24640100 NR Description: CG3455-PA [Drosophila melanogaster]
  misc_feature (1)..(279): Homolog of NCBI NO: 31242591 NR Description: ENSANGP00000017473 [Anopheles gambiae]
  misc_feature (1)..(286): Homolog of NCBI NO: 17298147 NR Description: 26S proteasome regulatory particle triple-A
  misc_feature (1)..(286): Homolog of NCBI NO: 11094192 NR Description: 26S proteasome regulatory particle triple-A
  misc_feature (1)..(286): Homolog of NCBI NO: 24745880 NR Description: 26S proteasome AAA-ATPase subunit RPT4a [Solanum
  misc_feature (1)..(286): Homolog of NCBI NO: 15219503 NR Description: 26S proteasome regulatory particle triple-A
  misc_feature (1)..(286): Homolog of NCBI NO: 15239140 NR Description: 26S proteasome AAA-ATPase subunit RPT4a
MRALPREVDPVVYNMLHEDPGNISYSAVGGLGDQIRELRESIELPLMNPELFLRVGIKPPKGVLLYGPPGTGKTLLARAIASNIDANFLKVVSSAIIDKYIGESARLIREMFNYAREHQPCIIFMDEIDAIGGRRFSEGTSADREIQRTLMELLNQLDGFDNLGKVKMIMATNRPDVLDPALLRPGRLDRKIEIPLPNEQSRMDILKIHAAGIAKHGEIDYEAIVKLAEGFNGADLRNICTEAGMFAIRAERDYVIHEDFMKAVRKLSEAKKLESSSHYNADFGKE

SEQ ID NO: 49689 - DNA, 1180 bp, Arabidopsis thaliana
  misc_feature (1)..(1180): Ceres Seq. ID no. 13648107
  misc_feature: MA Experiment ID: 20000179 Result: Up-regulated in Transcription
  misc_feature: MA Experiment 20000179 PARAMETER Experiment Name: At_Germinating_Seeds_P Parameter: Age (hr) Value: 6 vs. 0
  misc_feature: MA Experiment 20000179 PARAMETER Experiment Name: At_Germinating_Seeds_P Parameter: Tissue Value: Germinating Seeds
  misc_feature: MA Experiment ID: 20000180 Result: Up-regulated in Transcription
  misc_feature: MA Experiment 20000180 PARAMETER Experiment Name: At_Germinating_Seeds_P Parameter: Age (hr) Value: 24 vs. 0
  misc_feature: MA Experiment 20000180 PARAMETER Experiment Name: At_Germinating_Seeds_P Parameter: Tissue Value: Germinating Seeds
  misc_feature: MA Experiment ID: 20000227 Result: Up-regulated in Transcription
  misc_feature: MA Experiment 20000227 PARAMETER Experiment Name: At_Root-Tips-vs-Tops_P Parameter: Tissue Value: Root Tips vs. Root Tops
  misc_feature: MA Experiment ID: 20000234 Result: Up-regulated in Transcription
  misc_feature: MA Experiment 20000234 PARAMETER Experiment Name: At_Siliques_P Parameter: Age (day) Value: 21
  misc_feature: MA Experiment 20000234 PARAMETER Experiment Name: At_Siliques_P Parameter: Organism Value: A. thaliana
  misc_feature: MA Experiment 20000234 PARAMETER Experiment Name: At_Siliques_P Parameter: Plant Line Value: WS
  misc_feature: MA Experiment 20000234 PARAMETER Experiment Name: At_Siliques_P Parameter: Tissue Value: Less Than 5mm Siliques vs. Whole Plant
  misc_feature: MA Experiment ID: 20000264 Result: Up-regulated in Transcription
  misc_feature: MA Experiment 20000264 PARAMETER Experiment Name: At_Open_Flower_P Parameter: Age (day) Value: 21
  misc_feature: MA Experiment 20000264 PARAMETER Experiment Name: At_Open_Flower_P Parameter: Plant Line Value: WS
  misc_feature: MA Experiment 20000264 PARAMETER Experiment Name: At_Open_Flower_P Parameter: Tissue Value: Open Flower vs. Whole Plant
  misc_feature: MA Experiment ID: 20000265 Result: Up-regulated in Transcription
  misc_feature: MA Experiment 20000265 PARAMETER Experiment Name: At_Open_Flower_P Parameter: Age (day) Value: 21
  misc_feature: MA Experiment 20000265 PARAMETER Experiment Name: At_Open_Flower_P Parameter: Plant Line Value: WS
  misc_feature: MA Experiment 20000265 PARAMETER Experiment Name: At_Open_Flower_P Parameter: Tissue Value: Closed Flower vs. Whole Plant
  misc_feature: MA Experiment ID: 20000286 Result: Up-regulated in Transcription
  misc_feature: MA Experiment 20000286 PARAMETER Experiment Name: At_Open_Flower_P Parameter: Age (day) Value: 21
  misc_feature: MA Experiment 20000286 PARAMETER Experiment Name: At_Open_Flower_P Parameter: Plant Line Value: WS
  misc_feature: MA Experiment 20000286 PARAMETER Experiment Name: At_Open_Flower_P Parameter: Tissue Value: Half Open vs. Whole Plant
  misc_feature: MA Experiment ID: 20000495 Result: Up-regulated in Transcription
  misc_feature: MA Experiment 20000495 PARAMETER Experiment Name: At_Guard_Cells_P Parameter: Harvest Date Value: 8/2/2002
  misc_feature: MA Experiment 20000495 PARAMETER Experiment Name: At_Guard_Cells_P Parameter: Organism Value: A. thaliana
  misc_feature: MA Experiment 20000495 PARAMETER Experiment Name: At_Guard_Cells_P Parameter: Tissue Value: Guard Cells vs. Leaves
aacaaggtgatgacgtggtttttacatttttcaaaaatctcttttgcccagagagagaagaagagacagatcggaaggagttgagtaagaatggcgaagctggtgctcttcaccgccgtaattatcgctattttctcccatggatcctccgtcgatgacaaatgcgccgcttgcaacgccgtcgctgaggaattagagttacagcttttaaaggaaaagccacgaaaccatcttgatatgagaaaccggctcaattctaaaggccagcgtgaaggaaaggtcattgattacagaataagcgacctgagggtggttgatttgttggacggtctgtgtgatagaatgcaggactatactctacaaaaggtggaacctaagaatagacaatgggtgaaagtaggaaattttgacaatctaacaagtaatgtgttctttcctttccttttaaaatttgcgctccgtgacatatttgcaattgttcatcacatagctgcttcaatacttacgttatttgataagtacgcttaggtgcatcgtttaatgagtcaatggaagctgtctacttgatcacactgtcaccgtgtctgctgtccgctttatctgtttataacttctgttgagcaaatgagtaactgttagagagctttcatgatgctgaaaattctagaacaagtgcagtgacggttttaaagttctagaataagctgtgaaattctcatctctagttatattagtggtttagagacttgtttgggatttaatgtttcatctgtgtgtgtgttgtcatatagataaacaggaagcgaaagcgcatgcaaatgacatttcaacttattgtggaagattgctggaggaaactgaagatgagctaggtgaggtgataaagaatggctccctaaaagcaggagaagtccgaaaggttctgtgtcaaactttgagtaaccactgccgacaatcaagtgaaacagactcagaggatgaggaggacgacgatgcagatgaattataactcaatccaatgaaaagttcacgtcaaattaagatcccatcttagtagctatgttatagatacatccatccacaactcatatgtaacttaagacacctttcactttttaagttatgtcgaaactcgggtctagattcttatttatattgtggcaattgttcgttttccctc

SEQ ID NO: 49690 - protein, 145 aa, Arabidopsis thaliana
  peptide (1)..(145): Ceres Seq. ID no. 13648108
  misc_feature (1)..(111): Homolog of NCBI NO: 21593763 NR Description: unknown [Arabidopsis thaliana]
  misc_feature (1)..(111): Homolog of NCBI NO: 18400653 NR Description: expressed protein [Arabidopsis thaliana]
  misc_feature (73)..(110): Homolog of NCBI NO: 25373216 NR Description: unknown protein [imported] - Arabidopsis thaliana
  misc_feature (1)..(64): Homolog of NCBI NO: 25373216 NR Description: unknown protein [imported] - Arabidopsis thaliana
MAKLVLFTAVIIAIFSHGSSVDDKCAACNAVAEELELQLLKEKPRNHLDMRNRLNSKGQREGKVIDYRISDLRVVDLLDGLCDRMQDYTLQKVEPKNRQWVKVGNFDNLTSNVFFPFLLKFALRDIFAIVHHIAASILTLFDKYA

SEQ ID NO: 49691 - protein, 96 aa, Arabidopsis thaliana
  peptide (1)..(96): Ceres Seq. ID no. 13648109
  misc_feature (1)..(62): Homolog of NCBI NO: 21593763 NR Description: unknown [Arabidopsis thaliana]
  misc_feature (1)..(62): Homolog of NCBI NO: 18400653 NR Description: expressed protein [Arabidopsis thaliana]
  misc_feature (24)..(61): Homolog of NCBI NO: 25373216 NR Description: unknown protein [imported] - Arabidopsis thaliana
  misc_feature (1)..(15): Homolog of NCBI NO: 25373216 NR Description: unknown protein [imported] - Arabidopsis thaliana
MRNRLNSKGQREGKVIDYRISDLRVVDLLDGLCDRMQDYTLQKVEPKNRQWVKVGNFDNLTSNVFFPFLLKFALRDIFAIVHHIAASILTLFDKYA

SEQ ID NO: 49692 - protein, 82 aa, Arabidopsis thaliana
  peptide (1)..(82): Ceres Seq. ID no. 13648110
  misc_feature (11)..(82): Homolog of NCBI NO: 21593763 NR Description: unknown [Arabidopsis thaliana]
  misc_feature (11)..(82): Homolog of NCBI NO: 18400653 NR Description: expressed protein [Arabidopsis thaliana]
  misc_feature (12)..(82): Homolog of NCBI NO: 25373216 NR Description: unknown protein [imported] - Arabidopsis thaliana
MFHLCVCCHIDKQEAKAHANDISTYCGRLLEETEDELGEVIKNGSLKAGEVRKVLCQTLSNHCRQSSETDSEDEEDDDADEL

SEQ ID NO: 49693 - DNA, 2045 bp, Arabidopsis thaliana; identical to SEQ ID NO: 44129
  misc_feature (1)..(2045): Ceres Seq. ID no. 13504748
  misc_feature: MA Experiment ID: 20000069 Result: Down-regulated in Transcription
  misc_feature: MA Experiment 20000069 PARAMETER Experiment Name: At_100uM_ABA_Mutants_cDNA_P Parameter: Plant Line Value: CS23
  misc_feature: MA Experiment 20000069 PARAMETER Experiment Name: At_100uM_ABA_Mutants_cDNA_P Parameter: Timepoint (hr) Value: 6
  misc_feature: MA Experiment 20000069 PARAMETER Experiment Name: At_100uM_ABA_Mutants_cDNA_P Parameter: Tissue Value: Aerial
  misc_feature: MA Experiment 20000069 PARAMETER Experiment Name: At_100uM_ABA_Mutants_cDNA_P Parameter: Treatment Value: 100uM ABA vs. No Treatment
  misc_feature: MA Experiment ID: 20000070 Result: Down-regulated in Transcription
  misc_feature: MA Experiment 20000070 PARAMETER Experiment Name: At_100uM_ABA_Mutants_cDNA_P Parameter: Plant Line Value: CS24
  misc_feature: MA Experiment 20000070 PARAMETER Experiment Name: At_100uM_ABA_Mutants_cDNA_P Parameter: Timepoint (hr) Value: 6
  misc_feature: MA Experiment 20000070 PARAMETER Experiment Name: At_100uM_ABA_Mutants_cDNA_P Parameter: Tissue Value: Aerial
  misc_feature: MA Experiment 20000070 PARAMETER Experiment Name: At_100uM_ABA_Mutants_cDNA_P Parameter: Treatment Value: 100uM ABA vs. No Treatment
  misc_feature: MA Experiment ID: 20000071 Result: Down-regulated in Transcription
  misc_feature: MA Experiment 20000071 PARAMETER Experiment Name: At_100uM_ABA_Mutants_cDNA_P Parameter: Plant Line Value: CS8104
  misc_feature: MA Experiment 20000071 PARAMETER Experiment Name: At_100uM_ABA_Mutants_cDNA_P Parameter: Timepoint (hr) Value: 6
  misc_feature: MA Experiment 20000071 PARAMETER Experiment Name: At_100uM_ABA_Mutants_cDNA_P Parameter: Tissue Value: Aerial
  misc_feature: MA Experiment 20000071 PARAMETER Experiment Name: At_100uM_ABA_Mutants_cDNA_P Parameter: Treatment Value: 100uM ABA vs. No Treatment
  misc_feature: MA Experiment ID: 20000086 Result: Down-regulated in Transcription
  misc_feature: MA Experiment 20000086 PARAMETER Experiment Name: At_100uM_ABA_Mutants_cDNA_P Parameter: Plant Line Value: CS22
  misc_feature: MA Experiment 20000086 PARAMETER Experiment Name: At_100uM_ABA_Mutants_cDNA_P Parameter: Timepoint (hr) Value: 6
  misc_feature: MA Experiment 20000086 PARAMETER Experiment Name: At_100uM_ABA_Mutants_cDNA_P Parameter: Tissue Value: Aerial
  misc_feature: MA Experiment 20000086 PARAMETER Experiment Name: At_100uM_ABA_Mutants_cDNA_P Parameter: Treatment Value: 100uM ABA vs. No Treatment
  misc_feature: MA Experiment ID: 20000089 Result: Down-regulated in Transcription
  misc_feature: MA Experiment ID: 20000090 Result: Down-regulated in Transcription
  misc_feature: MA Experiment ID: 20000117 Result: Down-regulated in Transcription
  misc_feature: MA Experiment 20000117 PARAMETER Experiment Name: At_100uM_ABA_Mutants_cDNA_P Parameter: Plant Line Value: Columbia
  misc_feature: MA Experiment 20000117 PARAMETER Experiment Name: At_100uM_ABA_Mutants_cDNA_P Parameter: Timepoint (hr) Value: 6
  misc_feature: MA Experiment 20000117 PARAMETER Experiment Name: At_100uM_ABA_Mutants_cDNA_P Parameter: Tissue Value: Aerial
  misc_feature: MA Experiment 20000117 PARAMETER Experiment Name: At_100uM_ABA_Mutants_cDNA_P Parameter: Treatment Value: 100uM ABA vs. No Treatment
  misc_feature: MA Experiment ID: 20000438 Result: Up-regulated in Transcription
  misc_feature: MA Experiment 20000438 PARAMETER Experiment Name: At_Shoots__P Parameter: Age (day) Value: 14
  misc_feature: MA Experiment 20000438 PARAMETER Experiment Name: At_Shoots__P Parameter: Tissue Value: Shoots vs. Whole Plant
  misc_feature: MA Experiment ID: 20001911 Result: Up-regulated in Transcription
  misc_feature: MA Experiment 20001911 PARAMETER Experiment Name: At_Drought_Reproduction_P Parameter: Age (day) Value: 40
  misc_feature: MA Experiment 20001911 PARAMETER Experiment Name: At_Drought_Reproduction_P Parameter: Organism Value: A. thaliana
  misc_feature: MA Experiment 20001911 PARAMETER Experiment Name: At_Drought_Reproduction_P Parameter: Plant Line Value: WS
  misc_feature: MA Experiment 20001911 PARAMETER Experiment Name: At_Drought_Reproduction_P Parameter: Timepoint (day) Value: 10
  misc_feature: MA Experiment 20001911 PARAMETER Experiment Name: At_Drought_Reproduction_P Parameter: Tissue Value: Flowers
  misc_feature: MA Experiment 20001911 PARAMETER Experiment Name: At_Drought_Reproduction_P Parameter: Treatment Value: Drought vs. No Drought

SEQ ID NO: 49694 - protein, 578 aa, Arabidopsis thaliana; identical to SEQ ID NO: 44130
  peptide (1)..(578): Ceres Seq. ID no. 13504749
  misc_feature (102)..(419): Pfam Name: Pyridine nucleotide-disulphide oxidoreductase Pfam Description: Pyridine nucleotide-disulphide oxidoreductase
  misc_feature (102)..(419): Pfam Name: Pyridine nucleotide-disulphide oxidoreductase Pfam Description: Pyridine nucleotide-disulphide oxidoreductase
  misc_feature (102)..(419): Pfam Name: Pyridine nucleotide-disulphide oxidoreductase Pfam Description: Pyridine nucleotide-disulphide oxidoreductase
  misc_feature (16)..(578): Homolog of NCBI NO: 1708059 NR Description: Glutathione reductase, chloroplast precursor (GR)
  misc_feature (16)..(578): Homolog of NCBI NO: 2425107 NR Description: glutathione reductase (NADPH) [Vitis vinifera]
  misc_feature (14)..(575): Homolog of NCBI NO: 4704611 NR Description: glutathione reductase [Brassica juncea]
  misc_feature (16)..(578): Homolog of NCBI NO: 1708059 NR Description: Glutathione reductase, chloroplast precursor (GR)
  misc_feature (14)..(575): Homolog of NCBI NO: 4704611 NR Description: glutathione reductase [Brassica juncea]
  misc_feature (14)..(578): Homolog of NCBI NO: 15451194 NR Description: Gluthatione reductase, chloroplast precursor
  misc_feature (16)..(578): Homolog of NCBI NO: 2425107 NR Description: glutathione reductase (NADPH) [Vitis vinifera]
  misc_feature (14)..(578): Homolog of NCBI NO: 15232559 NR Description: gluthatione reductase, chloroplast [Arabidopsis
  misc_feature (14)..(578): Homolog of NCBI NO: 15451194 NR Description: Gluthatione reductase, chloroplast precursor
  misc_feature (14)..(575): Homolog of NCBI NO: 13448672 NR Description: glutathione reductase [Brassica juncea]
  misc_feature (14)..(575): Homolog of NCBI NO: 4704611 NR Description: glutathione reductase [Brassica juncea]
  misc_feature (16)..(578): Homolog of NCBI NO: 1708059 NR Description: Glutathione reductase, chloroplast precursor (GR)
  misc_feature (14)..(578): Homolog of NCBI NO: 15232559 NR Description: gluthatione reductase, chloroplast [Arabidopsis
  misc_feature (14)..(575): Homolog of NCBI NO: 13448672 NR Description: glutathione reductase [Brassica juncea]
  misc_feature (16)..(578): Homolog of NCBI NO: 2425107 NR Description: glutathione reductase (NADPH) [Vitis vinifera]
  misc_feature (14)..(575): Homolog of NCBI NO: 13448672 NR Description: glutathione reductase [Brassica juncea]
  misc_feature (14)..(578): Homolog of NCBI NO: 15451194 NR Description: Gluthatione reductase, chloroplast precursor
  misc_feature (14)..(578): Homolog of NCBI NO: 15232559 NR Description: gluthatione reductase, chloroplast [Arabidopsis

SEQ ID NO: 49695 - protein, 565 aa, Arabidopsis thaliana; identical to SEQ ID NO: 44131
  peptide (1)..(565): Ceres Seq. ID no. 13504750
  misc_feature (89)..(406): Pfam Name: Pyridine nucleotide-disulphide oxidoreductase Pfam Description: Pyridine nucleotide-disulphide oxidoreductase
  misc_feature (89)..(406): Pfam Name: Pyridine nucleotide-disulphide oxidoreductase Pfam Description: Pyridine nucleotide-disulphide oxidoreductase
  misc_feature (89)..(406): Pfam Name: Pyridine nucleotide-disulphide oxidoreductase Pfam Description: Pyridine nucleotide-disulphide oxidoreductase
  misc_feature (3)..(565): Homolog of NCBI NO: 1708059 NR Description: Glutathione reductase, chloroplast precursor (GR)
  misc_feature (3)..(565): Homolog of NCBI NO: 2425107 NR Description: glutathione reductase (NADPH) [Vitis vinifera]
  misc_feature (1)..(562): Homolog of NCBI NO: 4704611 NR Description: glutathione reductase [Brassica juncea]
  misc_feature (3)..(565): Homolog of NCBI NO: 1708059 NR Description: Glutathione reductase, chloroplast precursor (GR)
  misc_feature (1)..(562): Homolog of NCBI NO: 4704611 NR Description: glutathione reductase [Brassica juncea]
  misc_feature (1)..(565): Homolog of NCBI NO: 15451194 NR Description: Gluthatione reductase, chloroplast precursor
  misc_feature (3)..(565): Homolog of NCBI NO: 2425107 NR Description: glutathione reductase (NADPH) [Vitis vinifera]
  misc_feature (1)..(565): Homolog of NCBI NO: 15232559 NR Description: gluthatione reductase, chloroplast [Arabidopsis
  misc_feature (1)..(565): Homolog of NCBI NO: 15451194 NR Description: Gluthatione reductase, chloroplast precursor
  misc_feature (1)..(562): Homolog of NCBI NO: 13448672 NR Description: glutathione reductase [Brassica juncea]
  misc_feature (1)..(562): Homolog of NCBI NO: 4704611 NR Description: glutathione reductase [Brassica juncea]
  misc_feature (3)..(565): Homolog of NCBI NO: 1708059 NR Description: Glutathione reductase, chloroplast precursor (GR)
  misc_feature (1)..(565): Homolog of NCBI NO: 15232559 NR Description: gluthatione reductase, chloroplast [Arabidopsis
  misc_feature (1)..(562): Homolog of NCBI NO: 13448672 NR Description: glutathione reductase [Brassica juncea]
  misc_feature (3)..(565): Homolog of NCBI NO: 2425107 NR Description: glutathione reductase (NADPH) [Vitis vinifera]
  misc_feature (1)..(562): Homolog of NCBI NO: 13448672 NR Description: glutathione reductase [Brassica juncea]
  misc_feature (1)..(565): Homolog of NCBI NO: 15451194 NR Description: Gluthatione reductase, chloroplast precursor
  misc_feature (1)..(565): Homolog of NCBI NO: 15232559 NR Description: gluthatione reductase, chloroplast [Arabidopsis

SEQ ID NO: 49696 - DNA, 1701 bp, Arabidopsis thaliana
  misc_feature (1)..(1701): Ceres Seq. ID no. 13593470
  misc_feature: MA Experiment ID: 20000173 Result: Down-regulated in Transcription
  misc_feature: MA Experiment 20000173 PARAMETER Experiment Name: At_42deg_Heat_P Parameter: Age (day) Value: 14
  misc_feature: MA Experiment 20000173 PARAMETER Experiment Name: At_42deg_Heat_P Parameter: Organism Value: A. thaliana
  misc_feature: MA Experiment 20000173 PARAMETER Experiment Name: At_42deg_Heat_P Parameter: Plant Line Value: WS
  misc_feature: MA Experiment 20000173 PARAMETER Experiment Name: At_42deg_Heat_P Parameter: Temperature (deg C) Value: 42 vs. 22
  misc_feature: MA Experiment 20000173 PARAMETER Experiment Name: At_42deg_Heat_P Parameter: Timepoint (hr) Value: 6
  misc_feature: MA Experiment 20000173 PARAMETER Experiment Name: At_42deg_Heat_P Parameter: Tissue Value: Aerial
  misc_feature: MA Experiment ID: 20000180 Result: Up-regulated in Transcription
  misc_feature: MA Experiment 20000180 PARAMETER Experiment Name: At_Germinating_Seeds_P Parameter: Age (hr) Value: 24 vs. 0
  misc_feature: MA Experiment 20000180 PARAMETER Experiment Name: At_Germinating_Seeds_P Parameter: Tissue Value: Germinating Seeds
  misc_feature: MA Experiment ID: 20000185 Result: Down-regulated in Transcription
  misc_feature: MA Experiment 20000185 PARAMETER Experiment Name: At_Roots__P Parameter: Age (day) Value: 7 vs. 21
  misc_feature: MA Experiment 20000185 PARAMETER Experiment Name: At_Roots__P Parameter: Organism Value: A. thaliana
  misc_feature: MA Experiment 20000185 PARAMETER Experiment Name: At_Roots__P Parameter: Tissue Value: Roots vs. Whole Plant
  misc_feature: MA Experiment ID: 20000437 Result: Down-regulated in Transcription
  misc_feature: MA Experiment 20000437 PARAMETER Experiment Name: At_Drought_P Parameter: Age (day) Value: 8
  misc_feature: MA Experiment 20000437 PARAMETER Experiment Name: At_Drought_P Parameter: Organism Value: A. thaliana
  misc_feature: MA Experiment 20000437 PARAMETER Experiment Name: At_Drought_P Parameter: Plant Line Value: WS
  misc_feature: MA Experiment 20000437 PARAMETER Experiment Name: At_Drought_P Parameter: Timepoint (hr) Value: 24
  misc_feature: MA Experiment 20000437 PARAMETER Experiment Name: At_Drought_P Parameter: Tissue Value: Whole Plant
  misc_feature: MA Experiment 20000437 PARAMETER Experiment Name: At_Drought_P Parameter: Treatment Value: Drought vs. No Drought
  misc_feature: MA Experiment ID: 20000439 Result: Down-regulated in Transcription
  misc_feature: MA Experiment 20000439 PARAMETER Experiment Name: At_Roots__P Parameter: Age (day) Value: 14 vs. 21
  misc_feature: MA Experiment 20000439 PARAMETER Experiment Name: At_Roots__P Parameter: Organism Value: A. thaliana
  misc_feature: MA Experiment 20000439 PARAMETER Experiment Name: At_Roots__P Parameter: Tissue Value: Roots vs. Whole Plant
  misc_feature: MA Experiment ID: 20000794 Result: Down-regulated in Transcription
  misc_feature: MA Experiment 20000794 PARAMETER Experiment Name: At_Petals_P Parameter: Age (day) Value: 23-25 days
  misc_feature: MA Experiment 20000794 PARAMETER Experiment Name: At_Petals_P Parameter: Plant Line Value: WS
  misc_feature: MA Experiment 20000794 PARAMETER Experiment Name: At_Petals_P Parameter: Tissue Value: Petals vs. Whole plant
  misc_feature: MA Experiment ID: 20001450 Result: Down-regulated in Transcription
  misc_feature: MA Experiment 20001450 PARAMETER Experiment Name: At_Far-red-induction_P Parameter: Age (day) Value: 7
  misc_feature: MA Experiment 20001450 PARAMETER Experiment Name: At_Far-red-induction_P Parameter: Light Value: Far-red vs. White
  misc_feature: MA Experiment 20001450 PARAMETER Experiment Name: At_Far-red-induction_P Parameter: Organism Value: A. thaliana
  misc_feature: MA Experiment 20001450 PARAMETER Experiment Name: At_Far-red-induction_P Parameter: Plant Line Value: Columbia
  misc_feature: MA Experiment 20001450 PARAMETER Experiment Name: At_Far-red-induction_P Parameter: Timepoint (hr) Value: 8
  misc_feature: MA Experiment 20001450 PARAMETER Experiment Name: At_Far-red-induction_P Parameter: Tissue Value: Whole Plant
  misc_feature: MA Experiment ID: 20001451 Result: Down-regulated in Transcription
  misc_feature: MA Experiment 20001451 PARAMETER Experiment Name: At_Far-red-induction_P Parameter: Age (day) Value: 7
  misc_feature: MA Experiment 20001451 PARAMETER Experiment Name: At_Far-red-induction_P Parameter: Light Value: Far-red vs. White
  misc_feature: MA Experiment 20001451 PARAMETER Experiment Name: At_Far-red-induction_P Parameter: Organism Value: A. thaliana
  misc_feature: MA Experiment 20001451 PARAMETER Experiment Name: At_Far-red-induction_P Parameter: Plant Line Value: Columbia
  misc_feature: MA Experiment 20001451 PARAMETER Experiment Name: At_Far-red-induction_P Parameter: Timepoint (hr) Value: 24
  misc_feature: MA Experiment 20001451 PARAMETER Experiment Name: At_Far-red-induction_P Parameter: Tissue Value: Whole Plant
  misc_feature: MA Experiment ID: 20001555 Result: Down-regulated in Transcription
  misc_feature: MA Experiment 20001555 PARAMETER Experiment Name: At_Drought_Soil_Dry_P Parameter: Age (day) Value: 24
  misc_feature: MA Experiment 20001555 PARAMETER Experiment Name: At_Drought_Soil_Dry_P Parameter: Organism Value: A. thaliana
  misc_feature: MA Experiment 20001555 PARAMETER Experiment Name: At_Drought_Soil_Dry_P Parameter: Plant Line Value: WS
  misc_feature: MA Experiment 20001555 PARAMETER Experiment Name: At_Drought_Soil_Dry_P Parameter: Post Timepoint (hr) Value: None
  misc_feature: MA Experiment 20001555 PARAMETER Experiment Name: At_Drought_Soil_Dry_P Parameter: Post-Treatment Value: None
  misc_feature: MA Experiment 20001555 PARAMETER Experiment Name: At_Drought_Soil_Dry_P Parameter: Timepoint (day) Value: 10
  misc_feature: MA Experiment 20001555 PARAMETER Experiment Name: At_Drought_Soil_Dry_P Parameter: Treatment Value: Drought vs. No Drought
  misc_feature: MA Experiment ID: 20001560 Result: Up-regulated in Transcription
  misc_feature: MA Experiment 20001560 PARAMETER Experiment Name: At_Drought_Soil_Dry_P Parameter: Age (day) Value: 28
  misc_feature: MA Experiment 20001560 PARAMETER Experiment Name: At_Drought_Soil_Dry_P Parameter: Organism Value: A. thaliana
  misc_feature: MA Experiment 20001560 PARAMETER Experiment Name: At_Drought_Soil_Dry_P Parameter: Plant Line Value: WS
  misc_feature: MA Experiment 20001560 PARAMETER Experiment Name: At_Drought_Soil_Dry_P Parameter: Post Timepoint (hr) Value: None
  misc_feature: MA Experiment 20001560 PARAMETER Experiment Name: At_Drought_Soil_Dry_P Parameter: Post-Treatment Value: None
  misc_feature: MA Experiment 20001560 PARAMETER Experiment Name: At_Drought_Soil_Dry_P Parameter: Timepoint (day) Value: 14
  misc_feature: MA Experiment 20001560 PARAMETER Experiment Name: At_Drought_Soil_Dry_P Parameter: Treatment Value: Drought vs. No Drought
  misc_feature: MA Experiment ID: 20001905 Result: Down-regulated in Transcription
  misc_feature: MA Experiment 20001905 PARAMETER Experiment Name: At_Drought_Reproduction_P Parameter: Age (day) Value: 40
  misc_feature: MA Experiment 20001905 PARAMETER Experiment Name: At_Drought_Reproduction_P Parameter: Organism Value: A. thaliana
  misc_feature: MA Experiment 20001905 PARAMETER Experiment Name: At_Drought_Reproduction_P Parameter: Plant Line Value: WS
  misc_feature: MA Experiment 20001905 PARAMETER Experiment Name: At_Drought_Reproduction_P Parameter: Timepoint (day) Value: 10
  misc_feature: MA Experiment 20001905 PARAMETER Experiment Name: At_Drought_Reproduction_P Parameter: Tissue Value: Rosettes
  misc_feature: MA Experiment 20001905 PARAMETER Experiment Name: At_Drought_Reproduction_P Parameter: Treatment Value: Drought vs. No Drought
  misc_feature: MA Experiment ID: 20001906 Result: Down-regulated in Transcription
  misc_feature: MA Experiment 20001906 PARAMETER Experiment Name: At_Drought_Reproduction_P Parameter: Age (day) Value: 35
  misc_feature: MA Experiment 20001906 PARAMETER Experiment Name: At_Drought_Reproduction_P Parameter: Organism Value: A. thaliana
  misc_feature: MA Experiment 20001906 PARAMETER Experiment Name: At_Drought_Reproduction_P Parameter: Plant Line Value: WS
  misc_feature: MA Experiment 20001906 PARAMETER Experiment Name: At_Drought_Reproduction_P Parameter: Timepoint (day) Value: 5
  misc_feature: MA Experiment 20001906 PARAMETER Experiment Name: At_Drought_Reproduction_P Parameter: Tissue Value: Siliques
  misc_feature: MA Experiment 20001906 PARAMETER Experiment Name: At_Drought_Reproduction_P Parameter: Treatment Value: Drought vs. No Drought
  misc_feature: MA Experiment ID: 20001908 Result: Down-regulated in Transcription
  misc_feature: MA Experiment 20001908 PARAMETER Experiment Name: At_Drought_Reproduction_P Parameter: Age (day) Value: 40
  misc_feature: MA Experiment 20001908 PARAMETER Experiment Name: At_Drought_Reproduction_P Parameter: Organism Value: A. thaliana
  misc_feature: MA Experiment 20001908 PARAMETER Experiment Name: At_Drought_Reproduction_P Parameter: Plant Line Value: WS
  misc_feature: MA Experiment 20001908 PARAMETER Experiment Name: At_Drought_Reproduction_P Parameter: Timepoint (day) Value: 10
  misc_feature: MA Experiment 20001908 PARAMETER Experiment Name: At_Drought_Reproduction_P Parameter: Tissue Value: Siliques
  misc_feature: MA Experiment 20001908 PARAMETER Experiment Name: At_Drought_Reproduction_P Parameter: Treatment Value: Drought vs. No Drought
  misc_feature: MA Experiment ID: 20001911 Result: Down-regulated in Transcription
  misc_feature: MA Experiment 20001911 PARAMETER Experiment Name: At_Drought_Reproduction_P Parameter: Age (day) Value: 40
  misc_feature: MA Experiment 20001911 PARAMETER Experiment Name: At_Drought_Reproduction_P Parameter: Organism Value: A. thaliana
  misc_feature: MA Experiment 20001911 PARAMETER Experiment Name: At_Drought_Reproduction_P Parameter: Plant Line Value: WS
  misc_feature: MA Experiment 20001911 PARAMETER Experiment Name: At_Drought_Reproduction_P Parameter: Timepoint (day) Value: 10
  misc_feature: MA Experiment 20001911 PARAMETER Experiment Name: At_Drought_Reproduction_P Parameter: Tissue Value: Flowers
  misc_feature: MA Experiment 20001911 PARAMETER Experiment Name: At_Drought_Reproduction_P Parameter: Treatment Value: Drought vs. No Drought
tcggcgataaggaaatatctaaccagaccggcccaaggagcgggcaaaatcagaaagcatttgatcttcaaactcttgggttcttctctgattgaaaatgagcttatcatcgccaaccagtgcttgtagctcgtccagatgttactcctcgggattatcgtttccgattggatttggatcgaatcccatcaatgtgggattggtttgttacccaaaaagatacagtattgctgctcggaagttcgtagtggcttgctcctcctcctcttccgatccacttttggttaaggctgcaaaagggcaagccataagtcgtcctccagcttggatgatgaggcaagcaggaaggtatatggctgtttaccaaaagctcgccaagaaacatccgtccttcagagagagatcagagaacactgatctaatagtggaaatctctttgcagccttggcaagcattcagaccagacggtgtcatcattttctctgacatcctcacccctttacctgcattcggtgtcccttttgatattgaagaggtaaaaggtcctgtaatccaatctcctatccgaactgaagaagatatgaagagattacatcccattgatttcgagaaactacagtttgttggagattctctcaagattttgagacgagaggttggggaacatgctgcggtgttgggtttcgttggagcgccttggacaattgcaacatatattgttgaaggaggaacaactcgaacatatacagtcataaagaatatgtgccacactgcaccagatgtattgagagctctattatctcatttaaccaaggccattaccgagtatgtggtttaccaagttgagcacggagctcactgcatacaaatattcgattcctggggtggccaactgactccggagatgtgggagcgctggtccaaaccatacattgaagagatcatacatgctgtaaagaaaagatgtccagatacgccgatagttttctacatcaatggaaatggtggccttcttgagcgaatgaaaggaactggagctgatgttattggacttgactggactgtagatatggctgatggaaggaggcgattgggaagcgaggtaagtgtgcagggaaatgttgatccagcttacctattctctccgcttcctgctttgaccgaagaaattgaaagagttgtgaagtgtgctggaccaaaagggcatattctcaatctaggacacggtgtcttggtagggacaccagaggaagccgtggctcatttctttgaaaccgctagaaacttggattaccaaacacttttccaaaatcatgttcctgcagaaaaagctgaacctgaattggttgtctgagaaatggtgactagacaagtgcctacgccgaagaatttgctgtttaagttttgtgaacatatgtctgaatctcttaaacttggtgcaggaatgagagaaaaagttccatgtctgacccttaatcgatgctagagttggtaacttgctatgagatatatgcgaagctgtccagtttttgtttggcttgcttgaggatttccaatcttctggaccaagctctgcttaacgtttaacaatgtattgagttgctcctaggcttcaaatgttgctgcttcttttggagatatgactctggttaaagtttaaccaaacattcatttatctggttaatctcaaacctttgctat

SEQ ID NO: 49697 - protein, 418 aa, Arabidopsis thaliana
  peptide (1)..(418): Ceres Seq. ID no. 13593471
  misc_feature (78)..(397): Pfam Name: Uroporphyrinogen decarboxylase (URO-D) Pfam Description: Uroporphyrinogen decarboxylase (URO-D)
  misc_feature (56)..(399): Homolog of NCBI NO: 23130482 NR Description: hypothetical protein [Nostoc punctiforme]
  misc_feature (55)..(399): Homolog of NCBI NO: 14334768 NR Description: putative uroporphyrinogen decarboxylase
  misc_feature (56)..(399): Homolog of NCBI NO: 16975230 NR Description: Chain A, Crystal Structure And Substrate Binding Of The Uroporphyrinogen-Iii Decarboxylase From Nicotiana Tabacum:
  misc_feature (55)..(399): Homolog of NCBI NO: 15226690 NR Description: uroporphyrinogen decarboxylase (UPD), putative
  misc_feature (3)..(399): Homolog of NCBI NO: 2501647 NR Description: Uroporphyrinogen decarboxylase, chloroplast
  misc_feature (60)..(398): Homolog of NCBI NO: 16332025 NR Description: uroporphyrinogen decarboxylase [Synechocystis sp.
  misc_feature (40)..(414): Homolog of NCBI NO: 34912796 NR Description: putative uroporphyrinogen decarboxylase
  misc_feature (78)..(418): Homolog of NCBI NO: 8777476 NR Description: uroporphyrinogen decarboxylase [Arabidopsis
  misc_feature (1)..(418): Homolog of NCBI NO: 16323119 NR Description: AT3g14930/K15M2_7 [Arabidopsis thaliana]
  misc_feature (1)..(418): Homolog of NCBI NO: 18400577 NR Description: uroporphyrinogen decarboxylase (UPD), putative
MSLSSPTSACSSSRCYSSGLSFPIGFGSNPINVGLVCYPKRYSIAARKFVVACSSSSSDPLLVKAAKGQAISRPPAWMMRQAGRYMAVYQKLAKKHPSFRERSENTDLIVEISLQPWQAFRPDGVIIFSDILTPLPAFGVPFDIEEVKGPVIQSPIRTEEDMKRLHPIDFEKLQFVGDSLKILRREVGEHAAVLGFVGAPWTIATYIVEGGTTRTYTVIKNMCHTAPDVLRALLSHLTKAITEYVVYQVEHGAHCIQIFDSWGGQLTPEMWERWSKPYIEEIIHAVKKRCPDTPIVFYINGNGGLLERMKGTGADVIGLDWTVDMADGRRRLGSEVSVQGNVDPAYLFSPLPALTEEIERVVKCAGPKGHILNLGHGVLVGTPEEAVAHFFETARNLDYQTLFQNHVPAEKAEPELVV

SEQ ID NO: 49698 - protein, 341 aa, Arabidopsis thaliana
  peptide (1)..(341): Ceres Seq. ID no. 13593472
  misc_feature (1)..(320): Pfam Name: Uroporphyrinogen decarboxylase (URO-D) Pfam Description: Uroporphyrinogen decarboxylase (URO-D)
  misc_feature (1)..(322): Homolog of NCBI NO: 23130482 NR Description: hypothetical protein [Nostoc punctiforme]
  misc_feature (1)..(322): Homolog of NCBI NO: 14334768 NR Description: putative uroporphyrinogen decarboxylase
  misc_feature (1)..(322): Homolog of NCBI NO: 16975230 NR Description: Chain A, Crystal Structure And Substrate Binding Of The Uroporphyrinogen-Iii Decarboxylase From Nicotiana Tabacum:
  misc_feature (1)..(322): Homolog of NCBI NO: 15226690 NR Description: uroporphyrinogen decarboxylase (UPD), putative
  misc_feature (1)..(322): Homolog of NCBI NO: 2501647 NR Description: Uroporphyrinogen decarboxylase, chloroplast
  misc_feature (1)..(321): Homolog of NCBI NO: 16332025 NR Description: uroporphyrinogen decarboxylase [Synechocystis sp.
  misc_feature (1)..(337): Homolog of NCBI NO: 34912796 NR Description: putative uroporphyrinogen decarboxylase
  misc_feature (1)..(341): Homolog of NCBI NO: 8777476 NR Description: uroporphyrinogen decarboxylase [Arabidopsis
  misc_feature (1)..(341): Homolog of NCBI NO: 16323119 NR Description: AT3g14930/K15M2_7 [Arabidopsis thaliana]
  misc_feature (1)..(341): Homolog of NCBI NO: 18400577 NR Description: uroporphyrinogen decarboxylase (UPD), putative
MMRQAGRYMAVYQKLAKKHPSFRERSENTDLIVEISLQPWQAFRPDGVIIFSDILTPLPAFGVPFDIEEVKGPVIQSPIRTEEDMKRLHPIDFEKLQFVGDSLKILRREVGEHAAVLGFVGAPWTIATYIVEGGTTRTYTVIKNMCHTAPDVLRALLSHLTKAITEYVVYQVEHGAHCIQIFDSWGGQLTPEMWERWSKPYIEEIIHAVKKRCPDTPIVFYINGNGGLLERMKGTGADVIGLDWTVDMADGRRRLGSEVSVQGNVDPAYLFSPLPALTEEIERVVKCAGPKGHILNLGHGVLVGTPEEAVAHFFETARNLDYQTLFQNHVPAEKAEPELVV

SEQ ID NO: 49699 - protein, 340 aa, Arabidopsis thaliana
  peptide (1)..(340): Ceres Seq. ID no. 13593473
  misc_feature (1)..(319): Pfam Name: Uroporphyrinogen decarboxylase (URO-D) Pfam Description: Uroporphyrinogen decarboxylase (URO-D)
  misc_feature (1)..(321): Homolog of NCBI NO: 23130482 NR Description: hypothetical protein [Nostoc punctiforme]
  misc_feature (1)..(321): Homolog of NCBI NO: 14334768 NR Description: putative uroporphyrinogen decarboxylase
  misc_feature (1)..(321): Homolog of NCBI NO: 16975230 NR Description: Chain A, Crystal Structure And Substrate Binding Of The Uroporphyrinogen-Iii Decarboxylase From Nicotiana Tabacum:
  misc_feature (1)..(321): Homolog of NCBI NO: 15226690 NR Description: uroporphyrinogen decarboxylase (UPD), putative
  misc_feature (1)..(321): Homolog of NCBI NO: 2501647 NR Description: Uroporphyrinogen decarboxylase, chloroplast
  misc_feature (1)..(320): Homolog of NCBI NO: 16332025 NR Description: uroporphyrinogen decarboxylase [Synechocystis sp.
  misc_feature (1)..(336): Homolog of NCBI NO: 34912796 NR Description: putative uroporphyrinogen decarboxylase
  misc_feature (1)..(340): Homolog of NCBI NO: 8777476 NR Description: uroporphyrinogen decarboxylase [Arabidopsis
  misc_feature (1)..(340): Homolog of NCBI NO: 16323119 NR Description: AT3g14930/K15M2_7 [Arabidopsis thaliana]
  misc_feature (1)..(340): Homolog of NCBI NO: 18400577 NR Description: uroporphyrinogen decarboxylase (UPD), putative
MRQAGRYMAVYQKLAKKHPSFRERSENTDLIVEISLQPWQAFRPDGVIIFSDILTPLPAFGVPFDIEEVKGPVIQSPIRTEEDMKRLHPIDFEKLQFVGDSLKILRREVGEHAAVLGFVGAPWTIATYIVEGGTTRTYTVIKNMCHTAPDVLRALLSHLTKAITEYVVYQVEHGAHCIQIFDSWGGQLTPEMWERWSKPYIEEIIHAVKKRCPDTPIVFYINGNGGLLERMKGTGADVIGLDWTVDMADGRRRLGSEVSVQGNVDPAYLFSPLPALTEEIERVVKCAGPKGHILNLGHGVLVGTPEEAVAHFFETARNLDYQTLFQNHVPAEKAEPELVV

SEQ ID NO: 49700 - DNA, 2392 bp, Arabidopsis thaliana
  misc_feature (1)..(2392): Ceres Seq. ID no. 13575487
  misc_feature: MA Experiment ID: 20000328 Result: Up-regulated in Transcription
  misc_feature: MA Experiment 20000328 PARAMETER Experiment Name: At_42deg_Heat_Sub_P Parameter: Age (day) Value: 14
  misc_feature: MA Experiment 20000328 PARAMETER Experiment Name: At_42deg_Heat_Sub_P Parameter: Organism Value: A. thaliana
  misc_feature: MA Experiment 20000328 PARAMETER Experiment Name: At_42deg_Heat_Sub_P Parameter: Plant Line Value: WS
  misc_feature: MA Experiment 20000328 PARAMETER Experiment Name: At_42deg_Heat_Sub_P Parameter: Temperature (deg C) Value: 42 vs. 22
  misc_feature: MA Experiment 20000328 PARAMETER Experiment Name: At_42deg_Heat_Sub_P Parameter: Timepoint (hr) Value: 6
  misc_feature: MA Experiment 20000328 PARAMETER Experiment Name: At_42deg_Heat_Sub_P Parameter: Tissue Value: Aerial
tggcatcartacttctctctgctctcaagataattttgttctctcaatttcattcttaaaccctarttcttcgatttttatccgatctacgamaatggcggacgcagaaacctttgctttccaagctgagatcaaccagttgctctccctcatcatcaataccttttactctaacaaggagatcttccttcgtgaactcatcagtaactcttctgatgctttggacaagattaggtttgagtccttgacagacaagagcaagctcgatggtcagccagagctcttcattcacatcattcccgacaagactaacaacaccttgacgattatcgatagtggtattgggatgaccaaggctgatctggtgaacaaccttggaacaattgcaagatctggaaccaaagaattcatggaggcgttggctgctggagctgatgttagcatgattggacagtttggtgttggtttctactctgcttacttggttgctgacaaggttgttgttactaccaagcacaatgacgatgagcagtacgtgtgggagtctcaggccggtggatctttcaccgtcaccagagacacctctggtgaggctcttggtagaggaactaagatggtcctttacctcaaggaagaccagatggagtacattgaggagcgaaggcttaaggatttggtgaagaagcactctgagttcatcagctacccaatctctctctggattgagaagaccattgagaaggagatctctgatgatgaagaggaggaagagaagaaggatgaggaaggcaaggttgaggaagttgatgaggagaaagaaaaggaggagaagaaaaagaagaagattaaggaggtttctcatgagtgggatttggtgaacaagcagaaaccgatttggatgaggaagccagaggagatcaacaaggaggagtacgctgctttctacaagagtttgagcaatgactgggaagagcatttggctgtgaagcatttctcagttgaaggacagcttgagttcaaagctatcctctttgttcccaagagagctccttttgatctctttgacactaagaagaagcccaacaacatcaagctctatgtccgtcgtgtcttcatcatggacaactgtgaagacatcattcctgagtaccttgggtttgtcaagggtattgttgactctgaagatcttcctctcaacatctcaagagaaacattgcagcagaacaagatcctcaaggtcatccgcaagaaccttgtgaagaagtgtcttgagctcttctttgagattgctgagaacaaggaggactacaacaagttctatgaggctttctctaagaacctgaagctcggtatccatgaggactcccaaaacagaaccaagattgctgagttgctccgttaccactcaaccaagagcggtgatgaattgaccagtctcaaggactacgtgacaaggatgaaggaaggtcagaacgatatcttctatatcactggtgagagcaagaaggctgttgagaactctccattccttgagaagctcaagaagaagggtattgaagttctctacatggttgacgctatcgatgagtatgctattggtcagctcaaggaattcgaaggaaagaagcttgtctctgcaaccaaggaaggtctgaaactggatgagactgaagacgagaagaagaagaaagaagagctcaaggagaagtttgagggactctgcaaagtgatcaaggacgttttgggagacaaggttgagaaggttatcgtctctgaccgtgttgtggactcaccctgctgtcttgtaacaggcgagtatggctggactgcaaacatggagaggatcatgaaagctcaagccttgagagacagcagcatgggtggctacatgtcgagcaagaagacaatggagattaacccagagaactccatcatggatgagctgagaaagagagctgatgcagacaagaacgacaagtctgtgaaggaccttgtacttcttctctttgagaccgctcttctcacttctggtttcagcctcgatgagcccaacactttcgggagcaggattcacaggatgttgaagcttggattgagcattgatgacgatgatgttgttgaagccgatgctgacatgcctccacttgaagatgatgccgatgctgaaggtagcaagatggaggaagttgactaawttatcacacaraagtcgactwaatyattagcggtkttwtaagactmtggttttctttttwtctttttcgttaaaacttmtgttattttggtgatyatcttcacgaattttttctatggtttyatttgttgtgaagatatttcyctgaactcggttttatgacaaagattctattatgcycaagagactgattcttac

SEQ ID NO: 49701 - protein, 730 aa, Arabidopsis thaliana
  peptide (1)..(730): Ceres Seq. ID no. 15222620
  misc_feature (58)..(212): Pfam Name: Histidine kinase-, DNA gyrase B-, and HSP90-like ATPase Pfam Description: Histidine kinase-, DNA gyrase B-, and
  misc_feature (35)..(730): Homolog of NCBI NO: 17865698 NR Description: Endoplasmin precursor (94 kDa glucose-regulated
  misc_feature (35)..(730): Homolog of NCBI NO: 2239253 NR Description: gp96/GRP94 [Sus scrofa]
  misc_feature (35)..(730): Homolog of NCBI NO: 7441885 NR Description: protein kinase ppk98 (EC 2.7.1.-) precursor,
  misc_feature (35)..(730): Homolog of NCBI NO: 4507677 NR Description: tumor rejection antigen (gp96) 1
  misc_feature (35)..(730): Homolog of NCBI NO: 27807263 NR Description: tumor rejection antigen (gp96) 1 [Bos taurus]
  misc_feature (35)..(728): Homolog of NCBI NO: 14714615 NR Description: tumor rejection antigen gp96 [Mus musculus]
  misc_feature (35)..(728): Homolog of NCBI NO: 6755863 NR Description: tumor rejection antigen gp96; tumor rejection
  misc_feature (30)..(730): Homolog of NCBI NO: 12005809 NR Description: 90-kDa heat shock protein HSP83 [Spodoptera
  misc_feature (34)..(311): Homolog of NCBI NO: 29145077 NR Description: Hspca protein [Mus musculus]
  misc_feature (242)..(730): Homolog of NCBI NO: 29145077 NR Description: Hspca protein [Mus musculus]
  misc_feature (3)..(3): Xaa is any aa, unknown or other
  misc_feature (22)..(22): Xaa is any aa, unknown or other
  misc_feature (31)..(31): Xaa is any aa, unknown or other
GIXTSLCSQDNFVLSISFLNPXSSIFIRSTXMADAETFAFQAEINQLLSLIINTFYSNKEIFLRELISNSSDALDKIRFESLTDKSKLDGQPELFIHIIPDKTNNTLTIIDSGIGMTKADLVNNLGTIARSGTKEFMEALAAGADVSMIGQFGVGFYSAYLVADKVVVTTKHNDDEQYVWESQAGGSFTVTRDTSGEALGRGTKMVLYLKEDQMEYIEERRLKDLVKKHSEFISYPISLWIEKTIEKEISDDEEEEEKKDEEGKVEEVDEEKEKEEKKKKKIKEVSHEWDLVNKQKPIWMRKPEEINKEEYAAFYKSLSNDWEEHLAVKHFSVEGQLEFKAILFVPKRAPFDLFDTKKKPNNIKLYVRRVFIMDNCEDIIPEYLGFVKGIVDSEDLPLNISRETLQQNKILKVIRKNLVKKCLELFFEIAENKEDYNKFYEAFSKNLKLGIHEDSQNRTKIAELLRYHSTKSGDELTSLKDYVTRMKEGQNDIFYITGESKKAVENSPFLEKLKKKGIEVLYMVDAIDEYAIGQLKEFEGKKLVSATKEGLKLDETEDEKKKKEELKEKFEGLCKVIKDVLGDKVEKVIVSDRVVDSPCCLVTGEYGWTANMERIMKAQALRDSSMGGYMSSKKTMEINPENSIMDELRKRADADKNDKSVKDLVLLLFETALLTSGFSLDEPNTFGSRIHRMLKLGLSIDDDDVVEADADMPPLEDDADAEGSKMEEVD

SEQ ID NO: 49702 - protein, 699 aa, Arabidopsis thaliana
  peptide (1)..(699): Ceres Seq. ID no. 15222621
  misc_feature (27)..(181): Pfam Name: Histidine kinase-, DNA gyrase B-, and HSP90-like ATPase Pfam Description: Histidine kinase-, DNA gyrase B-, and
  misc_feature (4)..(699): Homolog of NCBI NO: 17865698 NR Description: Endoplasmin precursor (94 kDa glucose-regulated
  misc_feature (4)..(699): Homolog of NCBI NO: 2239253 NR Description: gp96/GRP94 [Sus scrofa]
  misc_feature (4)..(699): Homolog of NCBI NO: 7441885 NR Description: protein kinase ppk98 (EC 2.7.1.-) precursor,
  misc_feature (4)..(699): Homolog of NCBI NO: 4507677 NR Description: tumor rejection antigen (gp96) 1
  misc_feature (4)..(699): Homolog of NCBI NO: 27807263 NR Description: tumor rejection antigen (gp96) 1 [Bos taurus]
  misc_feature (4)..(697): Homolog of NCBI NO: 14714615 NR Description: tumor rejection antigen gp96 [Mus musculus]
  misc_feature (4)..(697): Homolog of NCBI NO: 6755863 NR Description: tumor rejection antigen gp96; tumor rejection
  misc_feature (1)..(699): Homolog of NCBI NO: 12005809 NR Description: 90-kDa heat shock protein HSP83 [Spodoptera
  misc_feature (3)..(280): Homolog of NCBI NO: 29145077 NR Description: Hspca protein [Mus musculus]
  misc_feature (211)..(699): Homolog of NCBI NO: 29145077 NR Description: Hspca protein [Mus musculus]
MADAETFAFQAEINQLLSLIINTFYSNKEIFLRELISNSSDALDKIRFESLTDKSKLDGQPELFIHIIPDKTNNTLTIIDSGIGMTKADLVNNLGTIARSGTKEFMEALAAGADVSMIGQFGVGFYSAYLVADKVVVTTKHNDDEQYVWESQAGGSFTVTRDTSGEALGRGTKMVLYLKEDQMEYIEERRLKDLVKKHSEFISYPISLWIEKTIEKEISDDEEEEEKKDEEGKVEEVDEEKEKEEKKKKKIKEVSHEWDLVNKQKPIWMRKPEEINKEEYAAFYKSLSNDWEEHLAVKHFSVEGQLEFKAILFVPKRAPFDLFDTKKKPNNIKLYVRRVFIMDNCEDIIPEYLGFVKGIVDSEDLPLNISRETLQQNKILKVIRKNLVKKCLELFFEIAENKEDYNKFYEAFSKNLKLGIHEDSQNRTKIAELLRYHSTKSGDELTSLKDYVTRMKEGQNDIFYITGESKKAVENSPFLEKLKKKGIEVLYMVDAIDEYAIGQLKEFEGKKLVSATKEGLKLDETEDEKKKKEELKEKFEGLCKVIKDVLGDKVEKVIVSDRVVDSPCCLVTGEYGWTANMERIMKAQALRDSSMGGYMSSKKTMEINPENSIMDELRKRADADKNDKSVKDLVLLLFETALLTSGFSLDEPNTFGSRIHRMLKLGLSIDDDDVVEADADMPPLEDDADAEGSKMEEVD

SEQ ID NO: 49703 - protein, 615 aa, Arabidopsis thaliana
  peptide (1)..(615): Ceres Seq. ID no. 15222622
  misc_feature (1)..(97): Pfam Name: Histidine kinase-, DNA gyrase B-, and HSP90-like ATPase Pfam Description: Histidine kinase-, DNA gyrase B-, and
  misc_feature (1)..(615): Homolog of NCBI NO: 17865698 NR Description: Endoplasmin precursor (94 kDa glucose-regulated
  misc_feature (1)..(615): Homolog of NCBI NO: 2239253 NR Description: gp96/GRP94 [Sus scrofa]
  misc_feature (1)..(615): Homolog of NCBI NO: 7441885 NR Description: protein kinase ppk98 (EC 2.7.1.-) precursor,
  misc_feature (1)..(615): Homolog of NCBI NO: 4507677 NR Description: tumor rejection antigen (gp96) 1
  misc_feature (1)..(615): Homolog of NCBI NO: 27807263 NR Description: tumor rejection antigen (gp96) 1 [Bos taurus]
  misc_feature (1)..(613): Homolog of NCBI NO: 14714615 NR Description: tumor rejection antigen gp96 [Mus musculus]
  misc_feature (1)..(613): Homolog of NCBI NO: 6755863 NR Description: tumor rejection antigen gp96; tumor rejection
  misc_feature (1)..(615): Homolog of NCBI NO: 12005809 NR Description: 90-kDa heat shock protein HSP83 [Spodoptera
  misc_feature (1)..(196): Homolog of NCBI NO: 29145077 NR Description: Hspca protein [Mus musculus]
  misc_feature (127)..(615): Homolog of NCBI NO: 29145077 NR Description: Hspca protein [Mus musculus]
MTKADLVNNLGTIARSGTKEFMEALAAGADVSMIGQFGVGFYSAYLVADKVVVTTKHNDDEQYVWESQAGGSFTVTRDTSGEALGRGTKMVLYLKEDQMEYIEERRLKDLVKKHSEFISYPISLWIEKTIEKEISDDEEEEEKKDEEGKVEEVDEEKEKEEKKKKKIKEVSHEWDLVNKQKPIWMRKPEEINKEEYAAFYKSLSNDWEEHLAVKHFSVEGQLEFKAILFVPKRAPFDLFDTKKKPNNIKLYVRRVFIMDNCEDIIPEYLGFVKGIVDSEDLPLNISRETLQQNKILKVIRKNLVKKCLELFFEIAENKEDYNKFYEAFSKNLKLGIHEDSQNRTKIAELLRYHSTKSGDELTSLKDYVTRMKEGQNDIFYITGESKKAVENSPFLEKLKKKGIEVLYMVDAIDEYAIGQLKEFEGKKLVSATKEGLKLDETEDEKKKKEELKEKFEGLCKVIKDVLGDKVEKVIVSDRVVDSPCCLVTGEYGWTANMERIMKAQALRDSSMGGYMSSKKTMEINPENSIMDELRKRADADKNDKSVKDLVLLLFETALLTSGFSLDEPNTFGSRIHRMLKLGLSIDDDDVVEADADMPPLEDDADAEGSKMEEVD

SEQ ID NO: 49704 - DNA, 1288 bp, Arabidopsis thaliana; identical to SEQ ID NO: 46902
  misc_feature (1)..(1288): Ceres Seq. ID no. 13646915
  misc_feature: MA Experiment ID: 20000307 Result: Up-regulated in Transcription
  misc_feature: MA Experiment 20000307 PARAMETER Experiment Name: At_Germinating_Seeds_Sub_P Parameter: Age (hr) Value: 24 vs. 0
  misc_feature: MA Experiment 20000307 PARAMETER Experiment Name: At_Germinating_Seeds_Sub_P Parameter: Organism Value: A. thaliana
  misc_feature: MA Experiment 20000307 PARAMETER Experiment Name: At_Germinating_Seeds_Sub_P Parameter: Plant Line Value: WS
  misc_feature: MA Experiment 20000307 PARAMETER Experiment Name: At_Germinating_Seeds_Sub_P Parameter: Tissue Value: Germinating Seeds
  misc_feature: MA Experiment ID: 20000314 Result: Up-regulated in Transcription
  misc_feature: MA Experiment 20000314 PARAMETER Experiment Name: At_14day_Shoots-Roots_Sub_P Parameter: Age (day) Value: 14
  misc_feature: MA Experiment 20000314 PARAMETER Experiment Name: At_14day_Shoots-Roots_Sub_P Parameter: Organism Value: A. thaliana
  misc_feature: MA Experiment 20000314 PARAMETER Experiment Name: At_14day_Shoots-Roots_Sub_P Parameter: Plant Line Value: WS
  misc_feature: MA Experiment 20000314 PARAMETER Experiment Name: At_14day_Shoots-Roots_Sub_P Parameter: Tissue Value: Roots vs. Whole Plant
  misc_feature: MA Experiment ID: 20000347 Result: Up-regulated in Transcription
  misc_feature: MA Experiment 20000347 PARAMETER Experiment Name: At_2mM_SA_Sub_P Parameter: Age (day) Value: 14
  misc_feature: MA Experiment 20000347 PARAMETER Experiment Name: At_2mM_SA_Sub_P Parameter: Organism Value: A. thaliana
  misc_feature: MA Experiment 20000347 PARAMETER Experiment Name: At_2mM_SA_Sub_P Parameter: Plant Line Value: WS
  misc_feature: MA Experiment 20000347 PARAMETER Experiment Name: At_2mM_SA_Sub_P Parameter: Timepoint (hr) Value: 6
  misc_feature: MA Experiment 20000347 PARAMETER Experiment Name: At_2mM_SA_Sub_P Parameter: Tissue Value: Aerial
  misc_feature: MA Experiment 20000347 PARAMETER Experiment Name: At_2mM_SA_Sub_P Parameter: Treatment Value: 2mM SA vs. No Treatment
  misc_feature: MA Experiment ID: 20000355 Result: Up-regulated in Transcription
  misc_feature: MA Experiment 20000355 PARAMETER Experiment Name: At_Siliques_Sub_P Parameter: Age (day) Value: 21
  misc_feature: MA Experiment 20000355 PARAMETER Experiment Name: At_Siliques_Sub_P Parameter: Organism Value: A. thaliana
  misc_feature: MA Experiment 20000355 PARAMETER Experiment Name: At_Siliques_Sub_P Parameter: Plant Line Value: WS
  misc_feature: MA Experiment 20000355 PARAMETER Experiment Name: At_Siliques_Sub_P Parameter: Tissue Value: Less Than 5mm Siliques vs. Whole Plant

SEQ ID NO: 49705 - protein, 394 aa, Arabidopsis thaliana; identical to SEQ ID NO: 46903
  peptide (1)..(394): Ceres Seq. ID no. 13646916
  misc_feature (13)..(394): Homolog of NCBI NO: 7705215 NR Description: alcohol dehydrogenase ADH [Lycopersicon
  misc_feature (9)..(393): Homolog of NCBI NO: 34906828 NR Description: contains EST C99136(E10204)~similar to alcohol
  misc_feature (18)..(392): Homolog of NCBI NO: 15238330 NR Description: alcohol dehydrogenase (ADH), putative
  misc_feature (17)..(394): Homolog of NCBI NO: 1076579 NR Description: probable alcohol dehydrogenase (EC 1.1.1.1) ADH3a
  misc_feature (17)..(394): Homolog of NCBI NO: 7705214 NR Description: alcohol dehydrogenase ADH [Lycopersicon
  misc_feature (13)..(394): Homolog of NCBI NO: 11250327 NR Description: probable alcohol dehydrogenase (EC 1.1.1.1)
  misc_feature (13)..(394): Homolog of NCBI NO: 18415840 NR Description: alcohol dehydrogenase (ADH), putative
  misc_feature (13)..(394): Homolog of NCBI NO: 21618210 NR Description: alcohol dehydrogenase like protein [Arabidopsis
  misc_feature (9)..(394): Homolog of NCBI NO: 15219882 NR Description: alcohol dehydrogenase (ADH), putative
  misc_feature (9)..(394): Homolog of NCBI NO: 15219884 NR Description: alcohol dehydrogenase (ADH), putative
  misc_feature (13)..(394): Homolog of NCBI NO: 7705215 NR Description: alcohol dehydrogenase ADH [Lycopersicon
  misc_feature (9)..(393): Homolog of NCBI NO: 34906828 NR Description: contains EST C99136(E10204)~similar to alcohol
  misc_feature (18)..(392): Homolog of NCBI NO: 15238330 NR Description: alcohol dehydrogenase (ADH), putative
  misc_feature (17)..(394): Homolog of NCBI NO: 1076579 NR Description: probable alcohol dehydrogenase (EC 1.1.1.1) ADH3a
  misc_feature (17)..(394): Homolog of NCBI NO: 7705214 NR Description: alcohol dehydrogenase ADH [Lycopersicon
  misc_feature (13)..(394): Homolog of NCBI NO: 11250327 NR Description: probable alcohol dehydrogenase (EC 1.1.1.1)
  misc_feature (13)..(394): Homolog of NCBI NO: 18415840 NR Description: alcohol dehydrogenase (ADH), putative
  misc_feature (13)..(394): Homolog of NCBI NO: 21618210 NR Description: alcohol dehydrogenase like protein [Arabidopsis
  misc_feature (9)..(394): Homolog of NCBI NO: 15219882 NR Description: alcohol dehydrogenase (ADH), putative
  misc_feature (9)..(394): Homolog of NCBI NO: 15219884 NR Description: alcohol dehydrogenase (ADH), putative

SEQ ID NO: 49706 - protein, 386 aa, Arabidopsis thaliana; identical to SEQ ID NO: 46904
  peptide (1)..(386): Ceres Seq. ID no. 13646917
  misc_feature (5)..(386): Homolog of NCBI NO: 7705215 NR Description: alcohol dehydrogenase ADH [Lycopersicon
  misc_feature (1)..(385): Homolog of NCBI NO: 34906828 NR Description: contains EST C99136(E10204)~similar to alcohol
  misc_feature (10)..(384): Homolog of NCBI NO: 15238330 NR Description: alcohol dehydrogenase (ADH), putative
  misc_feature (9)..(386): Homolog of NCBI NO: 1076579 NR Description: probable alcohol dehydrogenase (EC 1.1.1.1) ADH3a
  misc_feature (9)..(386): Homolog of NCBI NO: 7705214 NR Description: alcohol dehydrogenase ADH [Lycopersicon
  misc_feature (5)..(386): Homolog of NCBI NO: 11250327 NR Description: probable alcohol dehydrogenase (EC 1.1.1.1)
  misc_feature (5)..(386): Homolog of NCBI NO: 18415840 NR Description: alcohol dehydrogenase (ADH), putative
  misc_feature (5)..(386): Homolog of NCBI NO: 21618210 NR Description: alcohol dehydrogenase like protein [Arabidopsis
  misc_feature (1)..(386): Homolog of NCBI NO: 15219882 NR Description: alcohol dehydrogenase (ADH), putative
  misc_feature (1)..(386): Homolog of NCBI NO: 15219884 NR Description: alcohol dehydrogenase (ADH), putative
  misc_feature (5)..(386): Homolog of NCBI NO: 7705215 NR Description: alcohol dehydrogenase ADH [Lycopersicon
  misc_feature (1)..(385): Homolog of NCBI NO: 34906828 NR Description: contains EST C99136(E10204)~similar to alcohol
  misc_feature (10)..(384): Homolog of NCBI NO: 15238330 NR Description: alcohol dehydrogenase (ADH), putative
  misc_feature (9)..(386): Homolog of NCBI NO: 1076579 NR Description: probable alcohol dehydrogenase (EC 1.1.1.1) ADH3a
  misc_feature (9)..(386): Homolog of NCBI NO: 7705214 NR Description: alcohol dehydrogenase ADH [Lycopersicon
  misc_feature (5)..(386): Homolog of NCBI NO: 11250327 NR Description: probable alcohol dehydrogenase (EC 1.1.1.1)
  misc_feature (5)..(386): Homolog of NCBI NO: 18415840 NR Description: alcohol dehydrogenase (ADH), putative
  misc_feature (5)..(386): Homolog of NCBI NO: 21618210 NR Description: alcohol dehydrogenase like protein [Arabidopsis
  misc_feature (1)..(386): Homolog of NCBI NO: 15219882 NR Description: alcohol dehydrogenase (ADH), putative
  misc_feature (1)..(386): Homolog of NCBI NO: 15219884 NR Description: alcohol dehydrogenase (ADH), putative

SEQ ID NO: 49707 - protein, 253 aa, Arabidopsis thaliana; identical to SEQ ID NO: 46905
  peptide (1)..(253): Ceres Seq. ID no. 13646918
  misc_feature (1)..(253): Homolog of NCBI NO: 7705215 NR Description: alcohol dehydrogenase ADH [Lycopersicon
  misc_feature (1)..(252): Homolog of NCBI NO: 34906828 NR Description: contains EST C99136(E10204)~similar to alcohol
  misc_feature (1)..(251): Homolog of NCBI NO: 15238330 NR Description: alcohol dehydrogenase (ADH), putative
  misc_feature (1)..(253): Homolog of NCBI NO: 1076579 NR Description: probable alcohol dehydrogenase (EC 1.1.1.1) ADH3a
  misc_feature (1)..(253): Homolog of NCBI NO: 7705214 NR Description: alcohol dehydrogenase ADH [Lycopersicon
  misc_feature (1)..(253): Homolog of NCBI NO: 11250327 NR Description: probable alcohol dehydrogenase (EC 1.1.1.1)
  misc_feature (1)..(253): Homolog of NCBI NO: 18415840 NR Description: alcohol dehydrogenase (ADH), putative
  misc_feature (1)..(253): Homolog of NCBI NO: 21618210 NR Description: alcohol dehydrogenase like protein [Arabidopsis
  misc_feature (1)..(253): Homolog of NCBI NO: 15219882 NR Description: alcohol dehydrogenase (ADH), putative
  misc_feature (1)..(253): Homolog of NCBI NO: 15219884 NR Description: alcohol dehydrogenase (ADH), putative
  misc_feature (1)..(253): Homolog of NCBI NO: 7705215 NR Description: alcohol dehydrogenase ADH [Lycopersicon
  misc_feature (1)..(252): Homolog of NCBI NO: 34906828 NR Description: contains EST C99136(E10204)~similar to alcohol
  misc_feature (1)..(251): Homolog of NCBI NO: 15238330 NR Description: alcohol dehydrogenase (ADH), putative
  misc_feature (1)..(253): Homolog of NCBI NO: 1076579 NR Description: probable alcohol dehydrogenase (EC 1.1.1.1) ADH3a
  misc_feature (1)..(253): Homolog of NCBI NO: 7705214 NR Description: alcohol dehydrogenase ADH [Lycopersicon
  misc_feature (1)..(253): Homolog of NCBI NO: 11250327 NR Description: probable alcohol dehydrogenase (EC 1.1.1.1)
  misc_feature (1)..(253): Homolog of NCBI NO: 18415840 NR Description: alcohol dehydrogenase (ADH), putative
  misc_feature (1)..(253): Homolog of NCBI NO: 21618210 NR Description: alcohol dehydrogenase like protein [Arabidopsis
  misc_feature (1)..(253): Homolog of NCBI NO: 15219882 NR Description: alcohol dehydrogenase (ADH), putative
  misc_feature (1)..(253): Homolog of NCBI NO: 15219884 NR Description: alcohol dehydrogenase (ADH), putative

SEQ ID NO: 49708 - DNA, 2532 bp, Arabidopsis thaliana
  misc_feature (1)..(2532): Ceres Seq. ID no. 12592245
  misc_feature: MA Experiment ID: 20000173 Result: Down-regulated in Transcription
  misc_feature: MA Experiment 20000173 PARAMETER Experiment Name: At_42deg_Heat_P Parameter: Age (day) Value: 14
  misc_feature: MA Experiment 20000173 PARAMETER Experiment Name: At_42deg_Heat_P Parameter: Organism Value: A. thaliana
  misc_feature: MA Experiment 20000173 PARAMETER Experiment Name: At_42deg_Heat_P Parameter: Plant Line Value: WS
  misc_feature: MA Experiment 20000173 PARAMETER Experiment Name: At_42deg_Heat_P Parameter: Temperature (deg C) Value: 42 vs. 22
  misc_feature: MA Experiment 20000173 PARAMETER Experiment Name: At_42deg_Heat_P Parameter: Timepoint (hr) Value: 6
  misc_feature: MA Experiment 20000173 PARAMETER Experiment Name: At_42deg_Heat_P Parameter: Tissue Value: Aerial
  misc_feature: MA Experiment ID: 20000184 Result: Down-regulated in Transcription
  misc_feature: MA Experiment 20000184 PARAMETER Experiment Name: At_Shoots__P Parameter: Age (day) Value: 7
  misc_feature: MA Experiment 20000184 PARAMETER Experiment Name: At_Shoots__P Parameter: Tissue Value: Shoots vs. Whole Plant
ctacaaaagtgagcaaataaacttgcctcttcgtctgcttcgtgagatttcagatcctgtaaagaaattttattagctcaaaagaatcatttttgggtttctgaaccataaaagcttctctcgactttcaaaaactctctcctttttccttttagccatttcaagcagagagattgatcgaagaagataaaaacctcgtctttcttcaatctcagtgattctcaaattacccatcgcttccttcttttgatctctttgatttcacttcaaaaagcaaagaaatctcgattaggttattccttgtttcaccccataaatttgcctccttttttttggtctcgggaactactctgatttgtttcaatcgattctggatttcgggatttggatatagagctctctgtttttgacattgcctttggaactaaaattctcagtctttgcatttttttgattcaaaagctcactaagtttgggtttcagaagctattacatttggtcttcgtaagcgtcctttgaatgccctgtagctgaagatgcagcctgatcaccgcaaaaagtcatcagttgaggtagatttcttcacggaatatggtgaaggaagcagatacagaatagaggaagtgattggtaaaggaagttatggagttgtctgttctgcttacgatacacataccggagagaaagttgcgattaagaaaatcaatgatatctttgagcatgtttcggatgcaactcgcattcttcgtgagatcaaacttcttagactcttacgccatcctgacattgttgagatcaaacacatcttgttgccgccttcaagaagagagtttcgagacatttacgtggttttcgagcttatggaatctgatttgcatcaggttattaaggcaaatgatgatttgactcctgagcattatcagtttttcctctatcagcttcttcgtggcctcaagtatatacacacagctaatgtctttcatcgggatcttaaacccaaaaacatattggcaaatgctgattgcaaactcaagatctgtgattttggacttgcaagagtcgcattcaatgatacaccgactgcgatattctggactgattatgtagctactcgatggtacagggctccagaactatgtggatcttttttctcaaagtatacaccggcaatagatatatggagcatcgggtgcatttttgcagaactcttaacagggaaacctcttttccccgggaaaaatgtggtccatcaattggatctgatgacggatatgctgggaactccatctgctgaagccattggaagggttaggaacgagaaagctcgaagatacttgagcagcatgaggaagaagaagcctattcctttttcacataagttcccacatactgatcctcttgctcttcgtcttctagaaaagatgttgtcttttgaacccaaggaccggcctacagctgaagaggcgcttgcagatgtgtacttcaagggtttagctaaggttgaaagagagccttctgctcaacctgtcacaaagttggaatttgagtttgaaaggcggaggatcacaaaagaagacgtccgagagctcatatacagagagtctctggagtaccacccaaagatgctgaaagaatacttggatggatcagagccaactaactttatgtacccgagtgcggtggaacatttcaagaaacaatttgcttacctcgaggaacactacaagaatggtacttctcataatccccctgagaggcaacagcatgcatcattaccaagggcttgcgtattgtactctgataacaatcatccggtggcacaacagagttcagctgaagtcactgatggactctccaagtgtagcattagagacgagagacctcggggtgcagacaggaatgcccagatgccaatgtcgagaattcctatcaacgtccctcaaacaatccaaggtgctgcagtagctaggcctggtaaagtagttggatcagtgttacgctataacaactgcggcgcagccacaggcgttgaagctcttgaacaacaacagagaaggatggtcagaaatccagctgctgcgtctcaatacccaaagaggactcaaccttgcaaaagcaacagaggagatgaagattgcgccaccgctgctgaaggtccaagtagattgaagccaaacactcagtatataccacaaaaagtgtctgcagcacaagatactgcaatgagtcgctggtattaaacatgatgttatggttctagttttagctttaccacctcacgtctcagggagagctaaaaagagtatccctttgagtcatccattgtgttatcaagagccgaaacgtgaagacatgcttaagagcgaaatgagagaaggaagcgtgagaagataaaagaagttcttacagatcctgtcatgtaatttgtcttcatagttttgtattcttaaaacaacctttgtttatctacgttgtaacacttacactgtctacgattcttatatcccatgaactcaatctgtttcacctaat

SEQ ID NO: 49709 - protein, 567 aa, Arabidopsis thaliana
  peptide (1)..(567): Ceres Seq. ID no. 12592246
  misc_feature (25)..(316): Pfam Name: Protein kinase domain Pfam Description: Protein kinase domain
  misc_feature (1)..(496): Homolog of NCBI NO: 4732123 NR Description: mitogen-activated protein kinase homologue
  misc_feature (13)..(491): Homolog of NCBI NO: 25408817 NR Description: probable MAP kinase [imported] - Arabidopsis
  misc_feature (1)..(432): Homolog of NCBI NO: 15220976 NR Description: mitogen-activated protein kinase, putative
  misc_feature (1)..(491): Homolog of NCBI NO: 18406088 NR Description: putative MAP kinase
  misc_feature (4)..(455): Homolog of NCBI NO: 7106544 NR Description: ATMPK9 [Arabidopsis thaliana]
  misc_feature (4)..(504): Homolog of NCBI NO: 18401750 NR Description: putative MAP kinase
  misc_feature (4)..(504): Homolog of NCBI NO: 9294059 NR Description: MAP kinase [Arabidopsis thaliana]
  misc_feature (1)..(566): Homolog of NCBI NO: 37594657 NR Description: mitogen activated protein kinase 6 [Zea mays]
  misc_feature (1)..(567): Homolog of NCBI NO: 17064906 NR Description: Unknown protein [Arabidopsis thaliana]
  misc_feature (1)..(567): Homolog of NCBI NO: 15239634 NR Description: MAP kinase -like protein
MQPDHRKKSSVEVDFFTEYGEGSRYRIEEVIGKGSYGVVCSAYDTHTGEKVAIKKINDIFEHVSDATRILREIKLLRLLRHPDIVEIKHILLPPSRREFRDIYVVFELMESDLHQVIKANDDLTPEHYQFFLYQLLRGLKYIHTANVFHRDLKPKNILANADCKLKICDFGLARVAFNDTPTAIFWTDYVATRWYRAPELCGSFFSKYTPAIDIWSIGCIFAELLTGKPLFPGKNVVHQLDLMTDMLGTPSAEAIGRVRNEKARRYLSSMRKKKPIPFSHKFPHTDPLALRLLEKMLSFEPKDRPTAEEALADVYFKGLAKVEREPSAQPVTKLEFEFERRRITKEDVRELIYRESLEYHPKMLKEYLDGSEPTNFMYPSAVEHFKKQFAYLEEHYKNGTSHNPPERQQHASLPRACVLYSDNNHPVAQQSSAEVTDGLSKCSIRDERPRGADRNAQMPMSRIPINVPQTIQGAAVARPGKVVGSVLRYNNCGAATGVEALEQQQRRMVRNPAAASQYPKRTQPCKSNRGDEDCATAAEGPSRLKPNTQYIPQKVSAAQDTAMSRWY

SEQ ID NO: 49710 - protein, 459 aa, Arabidopsis thaliana
  peptide (1)..(459): Ceres Seq. ID no. 12592247
  misc_feature (1)..(208): Pfam Name: Protein kinase domain Pfam Description: Protein kinase domain
  misc_feature (1)..(388): Homolog of NCBI NO: 4732123 NR Description: mitogen-activated protein kinase homologue
  misc_feature (1)..(383): Homolog of NCBI NO: 25408817 NR Description: probable MAP kinase [imported] - Arabidopsis
  misc_feature (1)..(324): Homolog of NCBI NO: 15220976 NR Description: mitogen-activated protein kinase, putative
  misc_feature (1)..(383): Homolog of NCBI NO: 18406088 NR Description: putative MAP kinase
  misc_feature (1)..(347): Homolog of NCBI NO: 7106544 NR Description: ATMPK9 [Arabidopsis thaliana]
  misc_feature (1)..(396): Homolog of NCBI NO: 18401750 NR Description: putative MAP kinase
  misc_feature (1)..(396): Homolog of NCBI NO: 9294059 NR Description: MAP kinase [Arabidopsis thaliana]
  misc_feature (1)..(458): Homolog of NCBI NO: 37594657 NR Description: mitogen activated protein kinase 6 [Zea mays]
  misc_feature (1)..(459): Homolog of NCBI NO: 17064906 NR Description: Unknown protein [Arabidopsis thaliana]
  misc_feature (1)..(459): Homolog of NCBI NO: 15239634 NR Description: MAP kinase -like protein
MESDLHQVIKANDDLTPEHYQFFLYQLLRGLKYIHTANVFHRDLKPKNILANADCKLKICDFGLARVAFNDTPTAIFWTDYVATRWYRAPELCGSFFSKYTPAIDIWSIGCIFAELLTGKPLFPGKNVVHQLDLMTDMLGTPSAEAIGRVRNEKARRYLSSMRKKKPIPFSHKFPHTDPLALRLLEKMLSFEPKDRPTAEEALADVYFKGLAKVEREPSAQPVTKLEFEFERRRITKEDVRELIYRESLEYHPKMLKEYLDGSEPTNFMYPSAVEHFKKQFAYLEEHYKNGTSHNPPERQQHASLPRACVLYSDNNHPVAQQSSAEVTDGLSKCSIRDERPRGADRNAQMPMSRIPINVPQTIQGAAVARPGKVVGSVLRYNNCGAATGVEALEQQQRRMVRNPAAASQYPKRTQPCKSNRGDEDCATAAEGPSRLKPNTQYIPQKVSAAQDTAMSRWY

SEQ ID NO: 49711 - protein, 325 aa, Arabidopsis thaliana
  peptide (1)..(325): Ceres Seq. ID no. 12592248
  misc_feature (1)..(74): Pfam Name: Protein kinase domain Pfam Description: Protein kinase domain
  misc_feature (1)..(254): Homolog of NCBI NO: 4732123 NR Description: mitogen-activated protein kinase homologue
  misc_feature (1)..(249): Homolog of NCBI NO: 25408817 NR Description: probable MAP kinase [imported] - Arabidopsis
  misc_feature (1)..(190): Homolog of NCBI NO: 15220976 NR Description: mitogen-activated protein kinase, putative
  misc_feature (1)..(249): Homolog of NCBI NO: 18406088 NR Description: putative MAP kinase
  misc_feature (1)..(213): Homolog of NCBI NO: 7106544 NR Description: ATMPK9 [Arabidopsis thaliana]
  misc_feature (1)..(262): Homolog of NCBI NO: 18401750 NR Description: putative MAP kinase
  misc_feature (1)..(262): Homolog of NCBI NO: 9294059 NR Description: MAP kinase [Arabidopsis thaliana]
  misc_feature (1)..(324): Homolog of NCBI NO: 37594657 NR Description: mitogen activated protein kinase 6 [Zea mays]
  misc_feature (1)..(325): Homolog of NCBI NO: 17064906 NR Description: Unknown protein [Arabidopsis thaliana]
  misc_feature (1)..(325): Homolog of NCBI NO: 15239634 NR Description: MAP kinase -like protein
MTDMLGTPSAEAIGRVRNEKARRYLSSMRKKKPIPFSHKFPHTDPLALRLLEKMLSFEPKDRPTAEEALADVYFKGLAKVEREPSAQPVTKLEFEFERRRITKEDVRELIYRESLEYHPKMLKEYLDGSEPTNFMYPSAVEHFKKQFAYLEEHYKNGTSHNPPERQQHASLPRACVLYSDNNHPVAQQSSAEVTDGLSKCSIRDERPRGADRNAQMPMSRIPINVPQTIQGAAVARPGKVVGSVLRYNNCGAATGVEALEQQQRRMVRNPAAASQYPKRTQPCKSNRGDEDCATAAEGPSRLKPNTQYIPQKVSAAQDTAMSRWY

SEQ ID NO: 49712 - DNA, 1226 bp, Arabidopsis thaliana; identical to SEQ ID NO: 49519
  misc_feature (1)..(1226): Ceres Seq. ID no. 13588641
  misc_feature: MA Experiment ID: 108435 Result: Down-regulated in Transcription
  misc_feature: MA Experiment 108435 PARAMETER Experiment Name: At_stm_Mutants_cDNA_P Parameter: Plant Line Value: wt Landsburg vs stm
  misc_feature: MA Experiment 108435 PARAMETER Experiment Name: At_stm_Mutants_cDNA_P Parameter: Tissue Value: Shoot Apical Meristem Region
  misc_feature: MA Experiment ID: 108462 Result: Down-regulated in Transcription
  misc_feature: MA Experiment 108462 PARAMETER Experiment Name: At_Germinating_Seeds_cDNA_P Parameter: Age (day) Value: 2 vs. 0
  misc_feature: MA Experiment 108462 PARAMETER Experiment Name: At_Germinating_Seeds_cDNA_P Parameter: Tissue Value: Germinating Seeds
  misc_feature: MA Experiment ID: 108488 Result: Up-regulated in Transcription
  misc_feature: MA Experiment ID: 108573 Result: Down-regulated in Transcription
  misc_feature: MA Experiment 108573 PARAMETER Experiment Name: At_Drought_cDNA_P Parameter: Timepoint (hr) Value: 6
  misc_feature: MA Experiment 108573 PARAMETER Experiment Name: At_Drought_cDNA_P Parameter: Tissue Value: Aerial
  misc_feature: MA Experiment 108573 PARAMETER Experiment Name: At_Drought_cDNA_P Parameter: Treatment Value: Drought vs. No Drought
  misc_feature: MA Experiment ID: 108594 Result: Up-regulated in Transcription
  misc_feature: MA Experiment 108594 PARAMETER Experiment Name: At_Ler-rhl_Root_cDNA_P Parameter: Plant Line Value: null
  misc_feature: MA Experiment ID: 108595 Result: Down-regulated in Transcription
  misc_feature: MA Experiment 108595 PARAMETER Experiment Name: At_Ler-pi_Ovule_cDNA_P Parameter: Plant Line Value: null
  misc_feature: MA Experiment ID: 20000069 Result: Down-regulated in Transcription
  misc_feature: MA Experiment 20000069 PARAMETER Experiment Name: At_100uM_ABA_Mutants_cDNA_P Parameter: Plant Line Value: CS23
  misc_feature: MA Experiment 20000069 PARAMETER Experiment Name: At_100uM_ABA_Mutants_cDNA_P Parameter: Timepoint (hr) Value: 6
  misc_feature: MA Experiment 20000069 PARAMETER Experiment Name: At_100uM_ABA_Mutants_cDNA_P Parameter: Tissue Value: Aerial
  misc_feature: MA Experiment 20000069 PARAMETER Experiment Name: At_100uM_ABA_Mutants_cDNA_P Parameter: Treatment Value: 100uM ABA vs. No Treatment
  misc_feature: MA Experiment ID: 20000070 Result: Down-regulated in Transcription
  misc_feature: MA Experiment 20000070 PARAMETER Experiment Name: At_100uM_ABA_Mutants_cDNA_P Parameter: Plant Line Value: CS24
  misc_feature: MA Experiment 20000070 PARAMETER Experiment Name: At_100uM_ABA_Mutants_cDNA_P Parameter: Timepoint (hr) Value: 6
  misc_feature: MA Experiment 20000070 PARAMETER Experiment Name: At_100uM_ABA_Mutants_cDNA_P Parameter: Tissue Value: Aerial
  misc_feature: MA Experiment 20000070 PARAMETER Experiment Name: At_100uM_ABA_Mutants_cDNA_P Parameter: Treatment Value: 100uM ABA vs. No Treatment
  misc_feature: MA Experiment ID: 20000071 Result: Down-regulated in Transcription
  misc_feature: MA Experiment 20000071 PARAMETER Experiment Name: At_100uM_ABA_Mutants_cDNA_P Parameter: Plant Line Value: CS8104
  misc_feature: MA Experiment 20000071 PARAMETER Experiment Name: At_100uM_ABA_Mutants_cDNA_P Parameter: Timepoint (hr) Value: 6
  misc_feature: MA Experiment 20000071 PARAMETER Experiment Name: At_100uM_ABA_Mutants_cDNA_P Parameter: Tissue Value: Aerial
  misc_feature: MA Experiment 20000071 PARAMETER Experiment Name: At_100uM_ABA_Mutants_cDNA_P Parameter: Treatment Value: 100uM ABA vs. No Treatment
  misc_feature: MA Experiment ID: 20000072 Result: Down-regulated in Transcription
  misc_feature: MA Experiment 20000072 PARAMETER Experiment Name: At_100uM_ABA_Mutants_cDNA_P Parameter: Plant Line Value: CS8105
  misc_feature: MA Experiment 20000072 PARAMETER Experiment Name: At_100uM_ABA_Mutants_cDNA_P Parameter: Timepoint (hr) Value: 6
  misc_feature: MA Experiment 20000072 PARAMETER Experiment Name: At_100uM_ABA_Mutants_cDNA_P Parameter: Tissue Value: Aerial
  misc_feature: MA Experiment 20000072 PARAMETER Experiment Name: At_100uM_ABA_Mutants_cDNA_P Parameter: Treatment Value: 100uM ABA vs. No Treatment
  misc_feature: MA Experiment ID: 20000086 Result: Down-regulated in Transcription
  misc_feature: MA Experiment 20000086 PARAMETER Experiment Name: At_100uM_ABA_Mutants_cDNA_P Parameter: Plant Line Value: CS22
  misc_feature: MA Experiment 20000086 PARAMETER Experiment Name: At_100uM_ABA_Mutants_cDNA_P Parameter: Timepoint (hr) Value: 6
  misc_feature: MA Experiment 20000086 PARAMETER Experiment Name: At_100uM_ABA_Mutants_cDNA_P Parameter: Tissue Value: Aerial
  misc_feature: MA Experiment 20000086 PARAMETER Experiment Name: At_100uM_ABA_Mutants_cDNA_P Parameter: Treatment Value: 100uM ABA vs. No Treatment
  misc_feature: MA Experiment ID: 20000087 Result: Down-regulated in Transcription
  misc_feature: MA Experiment 20000087 PARAMETER Experiment Name: At_100uM_ABA_Mutants_cDNA_P Parameter: Plant Line Value: WS
  misc_feature: MA Experiment 20000087 PARAMETER Experiment Name: At_100uM_ABA_Mutants_cDNA_P Parameter: Timepoint (hr) Value: 6
  misc_feature: MA Experiment 20000087 PARAMETER Experiment Name: At_100uM_ABA_Mutants_cDNA_P Parameter: Tissue Value: Aerial
  misc_feature: MA Experiment 20000087 PARAMETER Experiment Name: At_100uM_ABA_Mutants_cDNA_P Parameter: Treatment Value: 100uM ABA vs. No Treatment
  misc_feature: MA Experiment ID: 20000088 Result: Down-regulated in Transcription
  misc_feature: MA Experiment 20000088 PARAMETER Experiment Name: At_100uM_ABA_Mutants_cDNA_P Parameter: Plant Line Value: Landsberg
  misc_feature: MA Experiment 20000088 PARAMETER Experiment Name: At_100uM_ABA_Mutants_cDNA_P Parameter: Timepoint (hr) Value: 6
  misc_feature: MA Experiment 20000088 PARAMETER Experiment Name: At_100uM_ABA_Mutants_cDNA_P Parameter: Tissue Value: Aerial
  misc_feature: MA Experiment 20000088 PARAMETER Experiment Name: At_100uM_ABA_Mutants_cDNA_P Parameter: Treatment Value: 100uM ABA vs. No Treatment
  misc_feature: MA Experiment ID: 20000089 Result: Down-regulated in Transcription
  misc_feature: MA Experiment ID: 20000090 Result: Down-regulated in Transcription
  misc_feature: MA Experiment ID: 20000117 Result: Down-regulated in Transcription
  misc_feature: MA Experiment 20000117 PARAMETER Experiment Name: At_100uM_ABA_Mutants_cDNA_P Parameter: Plant Line Value: Columbia
  misc_feature: MA Experiment 20000117 PARAMETER Experiment Name: At_100uM_ABA_Mutants_cDNA_P Parameter: Timepoint (hr) Value: 6
  misc_feature: MA Experiment 20000117 PARAMETER Experiment Name: At_100uM_ABA_Mutants_cDNA_P Parameter: Tissue Value: Aerial
  misc_feature: MA Experiment 20000117 PARAMETER Experiment Name: At_100uM_ABA_Mutants_cDNA_P Parameter: Treatment Value: 100uM ABA vs. No Treatment
  misc_feature: MA Experiment ID: 20000184 Result: Up-regulated in Transcription
  misc_feature: MA Experiment 20000184 PARAMETER Experiment Name: At_Shoots__P Parameter: Age (day) Value: 7
  misc_feature: MA Experiment 20000184 PARAMETER Experiment Name: At_Shoots__P Parameter: Tissue Value: Shoots vs. Whole Plant
  misc_feature: MA Experiment ID: 20000185 Result: Down-regulated in Transcription
  misc_feature: MA Experiment 20000185 PARAMETER Experiment Name: At_Roots__P Parameter: Age (day) Value: 7 vs. 21
  misc_feature: MA Experiment 20000185 PARAMETER Experiment Name: At_Roots__P Parameter: Organism Value: A. thaliana
  misc_feature: MA Experiment 20000185 PARAMETER Experiment Name: At_Roots__P Parameter: Tissue Value: Roots vs. Whole Plant
  misc_feature: MA Experiment ID: 20000224 Result: Down-regulated in Transcription
  misc_feature: MA Experiment ID: 20000234 Result: Down-regulated in Transcription
  misc_feature: MA Experiment 20000234 PARAMETER Experiment Name: At_Siliques_P Parameter: Age (day) Value: 21
  misc_feature: MA Experiment 20000234 PARAMETER Experiment Name: At_Siliques_P Parameter: Organism Value: A. thaliana
  misc_feature: MA Experiment 20000234 PARAMETER Experiment Name: At_Siliques_P Parameter: Plant Line Value: WS
  misc_feature: MA Experiment 20000234 PARAMETER Experiment Name: At_Siliques_P Parameter: Tissue Value: Less Than 5mm Siliques vs. Whole Plant
  misc_feature: MA Experiment ID: 20000264 Result: Down-regulated in Transcription
  misc_feature: MA Experiment 20000264 PARAMETER Experiment Name: At_Open_Flower_P Parameter: Age (day) Value: 21
  misc_feature: MA Experiment 20000264 PARAMETER Experiment Name: At_Open_Flower_P Parameter: Plant Line Value: WS
  misc_feature: MA Experiment 20000264 PARAMETER Experiment Name: At_Open_Flower_P Parameter: Tissue Value: Open Flower vs. Whole Plant
  misc_feature: MA Experiment ID: 20000286 Result: Down-regulated in Transcription
  misc_feature: MA Experiment 20000286 PARAMETER Experiment Name: At_Open_Flower_P Parameter: Age (day) Value: 21
  misc_feature: MA Experiment 20000286 PARAMETER Experiment Name: At_Open_Flower_P Parameter: Plant Line Value: WS
  misc_feature: MA Experiment 20000286 PARAMETER Experiment Name: At_Open_Flower_P Parameter: Tissue Value: Half Open vs. Whole Plant
  misc_feature: MA Experiment ID: 20000437 Result: Down-regulated in Transcription
  misc_feature: MA Experiment 20000437 PARAMETER Experiment Name: At_Drought_P Parameter: Age (day) Value: 8
  misc_feature: MA Experiment 20000437 PARAMETER Experiment Name: At_Drought_P Parameter: Organism Value: A. thaliana
  misc_feature: MA Experiment 20000437 PARAMETER Experiment Name: At_Drought_P Parameter: Plant Line Value: WS
  misc_feature: MA Experiment 20000437 PARAMETER Experiment Name: At_Drought_P Parameter: Timepoint (hr) Value: 24
  misc_feature: MA Experiment 20000437 PARAMETER Experiment Name: At_Drought_P Parameter: Tissue Value: Whole Plant
  misc_feature: MA Experiment 20000437 PARAMETER Experiment Name: At_Drought_P Parameter: Treatment Value: Drought vs. No Drought
  misc_feature: MA Experiment ID: 20000439 Result: Down-regulated in Transcription
  misc_feature: MA Experiment 20000439 PARAMETER Experiment Name: At_Roots__P Parameter: Age (day) Value: 14 vs. 21
  misc_feature: MA Experiment 20000439 PARAMETER Experiment Name: At_Roots__P Parameter: Organism Value: A. thaliana
  misc_feature: MA Experiment 20000439 PARAMETER Experiment Name: At_Roots__P Parameter: Tissue Value: Roots vs. Whole Plant
  misc_feature: MA Experiment ID: 20000527 Result: Up-regulated in Transcription
  misc_feature: MA Experiment 20000527 PARAMETER Experiment Name: At_10percent_PEG_P Parameter: Age (day) Value: 20
  misc_feature: MA Experiment 20000527 PARAMETER Experiment Name: At_10percent_PEG_P Parameter: Organism Value: A. thaliana
  misc_feature: MA Experiment 20000527 PARAMETER Experiment Name: At_10percent_PEG_P Parameter: Plant Line Value: WS
  misc_feature: MA Experiment 20000527 PARAMETER Experiment Name: At_10percent_PEG_P Parameter: Timepoint (day) Value: 20
  misc_feature: MA Experiment 20000527 PARAMETER Experiment Name: At_10percent_PEG_P Parameter: Tissue Value: Whole Plant
  misc_feature: MA Experiment 20000527 PARAMETER Experiment Name: At_10percent_PEG_P Parameter: Treatment Value: 10percent PEG vs. No Treatment
  misc_feature: MA Experiment ID: 20000794 Result: Down-regulated in Transcription
  misc_feature: MA Experiment 20000794 PARAMETER Experiment Name: At_Petals_P Parameter: Age (day) Value: 23-25 days
  misc_feature: MA Experiment 20000794 PARAMETER Experiment Name: At_Petals_P Parameter: Plant Line Value: WS
  misc_feature: MA Experiment 20000794 PARAMETER Experiment Name: At_Petals_P Parameter: Tissue Value: Petals vs. Whole plant
  misc_feature: MA Experiment ID: 20001450 Result: Up-regulated in Transcription
  misc_feature: MA Experiment 20001450 PARAMETER Experiment Name: At_Far-red-induction_P Parameter: Age (day) Value: 7
  misc_feature: MA Experiment 20001450 PARAMETER Experiment Name: At_Far-red-induction_P Parameter: Light Value: Far-red vs. White
  misc_feature: MA Experiment 20001450 PARAMETER Experiment Name: At_Far-red-induction_P Parameter: Organism Value: A. thaliana
  misc_feature: MA Experiment 20001450 PARAMETER Experiment Name: At_Far-red-induction_P Parameter: Plant Line Value: Columbia
  misc_feature: MA Experiment 20001450 PARAMETER Experiment Name: At_Far-red-induction_P Parameter: Timepoint (hr) Value: 8
  misc_feature: MA Experiment 20001450 PARAMETER Experiment Name: At_Far-red-induction_P Parameter: Tissue Value: Whole Plant
  misc_feature: MA Experiment ID: 20001451 Result: Up-regulated in Transcription
  misc_feature: MA Experiment 20001451 PARAMETER Experiment Name: At_Far-red-induction_P Parameter: Age (day) Value: 7
  misc_feature: MA Experiment 20001451 PARAMETER Experiment Name: At_Far-red-induction_P Parameter: Light Value: Far-red vs. White
  misc_feature: MA Experiment 20001451 PARAMETER Experiment Name: At_Far-red-induction_P Parameter: Organism Value: A. thaliana
  misc_feature: MA Experiment 20001451 PARAMETER Experiment Name: At_Far-red-induction_P Parameter: Plant Line Value: Columbia
  misc_feature: MA Experiment 20001451 PARAMETER Experiment Name: At_Far-red-induction_P Parameter: Timepoint (hr) Value: 24
  misc_feature: MA Experiment 20001451 PARAMETER Experiment Name: At_Far-red-induction_P Parameter: Tissue Value: Whole Plant
  misc_feature: MA Experiment ID: 20001905 Result: Down-regulated in Transcription
  misc_feature: MA Experiment 20001905 PARAMETER Experiment Name: At_Drought_Reproduction_P Parameter: Age (day) Value: 40
  misc_feature: MA Experiment 20001905 PARAMETER Experiment Name: At_Drought_Reproduction_P Parameter: Organism Value: A. thaliana
  misc_feature: MA Experiment 20001905 PARAMETER Experiment Name: At_Drought_Reproduction_P Parameter: Plant Line Value: WS
  misc_feature: MA Experiment 20001905 PARAMETER Experiment Name: At_Drought_Reproduction_P Parameter: Timepoint (day) Value: 10
  misc_feature: MA Experiment 20001905 PARAMETER Experiment Name: At_Drought_Reproduction_P Parameter: Tissue Value: Rosettes
  misc_feature: MA Experiment 20001905 PARAMETER Experiment Name: At_Drought_Reproduction_P Parameter: Treatment Value: Drought vs. No Drought

SEQ ID NO: 49713 - protein, 309 aa, Arabidopsis thaliana; identical to SEQ ID NO: 49520
  peptide (1)..(309): Ceres Seq. ID no. 13588642
  misc_feature (23)..(229): Pfam Name: SOR/SNZ family Pfam Description: SOR/SNZ family
  misc_feature (23)..(229): Pfam Name: SOR/SNZ family Pfam Description: SOR/SNZ family
  misc_feature (21)..(307): Homolog of NCBI NO: 19115894 NR Description: putative stress-induced protein
  misc_feature (20)..(298): Homolog of NCBI NO: 22970419 NR Description: hypothetical protein [Chloroflexus aurantiacus]
  misc_feature (3)..(309): Homolog of NCBI NO: 37530308 NR Description: putative pyridoxine/pyridoxal 5-phosphate
  misc_feature (1)..(309): Homolog of NCBI NO: 13310484 NR Description: Sor-like protein [Ginkgo biloba]
  misc_feature (3)..(309): Homolog of NCBI NO: 34394152 NR Description: putative ethylene-inducible protein
  misc_feature (21)..(307): Homolog of NCBI NO: 19115894 NR Description: putative stress-induced protein
  misc_feature (3)..(309): Homolog of NCBI NO: 37530308 NR Description: putative pyridoxine/pyridoxal 5-phosphate
  misc_feature (3)..(309): Homolog of NCBI NO: 34394152 NR Description: putative ethylene-inducible protein
  misc_feature (1)..(309): Homolog of NCBI NO: 15224470 NR Description: SOR1 from the fungus Cercospora nicotianae
  misc_feature (1)..(309): Homolog of NCBI NO: 15240972 NR Description: pyridoxine biosynthesis protein - like
  misc_feature (1)..(309): Homolog of NCBI NO: 2501578 NR Description: ETHYLENE-INDUCIBLE PROTEIN HEVER
  misc_feature (1)..(309): Homolog of NCBI NO: 21617922 NR Description: pyridoxine biosynthesis protein-like [Arabidopsis
  misc_feature (3)..(309): Homolog of NCBI NO: 10719739 NR Description: putative pyridoxine biosynthetic enzyme
  misc_feature (1)..(309): Homolog of NCBI NO: 13310484 NR Description: Sor-like protein [Ginkgo biloba]
  misc_feature (20)..(298): Homolog of NCBI NO: 22970419 NR Description: hypothetical protein [Chloroflexus aurantiacus]
  misc_feature (3)..(309): Homolog of NCBI NO: 10719739 NR Description: putative pyridoxine biosynthetic enzyme
  misc_feature (1)..(309): Homolog of NCBI NO: 21617922 NR Description: pyridoxine biosynthesis protein-like [Arabidopsis
  misc_feature (1)..(309): Homolog of NCBI NO: 2501578 NR Description: ETHYLENE-INDUCIBLE PROTEIN HEVER
  misc_feature (1)..(309): Homolog of NCBI NO: 15240972 NR Description: pyridoxine biosynthesis protein - like
  misc_feature (1)..(309): Homolog of NCBI NO: 15224470 NR Description: SOR1 from the fungus Cercospora nicotianae

SEQ ID NO: 49714 - protein, 295 aa, Arabidopsis thaliana; identical to SEQ ID NO: 49521
  peptide (1)..(295): Ceres Seq. ID no. 13588643
  misc_feature (9)..(215): Pfam Name: SOR/SNZ family Pfam Description: SOR/SNZ family
  misc_feature (9)..(215): Pfam Name: SOR/SNZ family Pfam Description: SOR/SNZ family
  misc_feature (7)..(293): Homolog of NCBI NO: 19115894 NR Description: putative stress-induced protein
  misc_feature (6)..(284): Homolog of NCBI NO: 22970419 NR Description: hypothetical protein [Chloroflexus aurantiacus]
  misc_feature (1)..(295): Homolog of NCBI NO: 37530308 NR Description: putative pyridoxine/pyridoxal 5-phosphate
  misc_feature (1)..(295): Homolog of NCBI NO: 13310484 NR Description: Sor-like protein [Ginkgo biloba]
  misc_feature (1)..(295): Homolog of NCBI NO: 34394152 NR Description: putative ethylene-inducible protein
  misc_feature (7)..(293): Homolog of NCBI NO: 19115894 NR Description: putative stress-induced protein
  misc_feature (1)..(295): Homolog of NCBI NO: 37530308 NR Description: putative pyridoxine/pyridoxal 5-phosphate
  misc_feature (1)..(295): Homolog of NCBI NO: 34394152 NR Description: putative ethylene-inducible protein
  misc_feature (1)..(295): Homolog of NCBI NO: 15224470 NR Description: SOR1 from the fungus Cercospora nicotianae
  misc_feature (1)..(295): Homolog of NCBI NO: 15240972 NR Description: pyridoxine biosynthesis protein - like
  misc_feature (1)..(295): Homolog of NCBI NO: 2501578 NR Description: ETHYLENE-INDUCIBLE PROTEIN HEVER
  misc_feature (1)..(295): Homolog of NCBI NO: 21617922 NR Description: pyridoxine biosynthesis protein-like [Arabidopsis
  misc_feature (1)..(295): Homolog of NCBI NO: 10719739 NR Description: putative pyridoxine biosynthetic enzyme
  misc_feature (1)..(295): Homolog of NCBI NO: 13310484 NR Description: Sor-like protein [Ginkgo biloba]
  misc_feature (6)..(284): Homolog of NCBI NO: 22970419 NR Description: hypothetical protein [Chloroflexus aurantiacus]
  misc_feature (1)..(295): Homolog of NCBI NO: 10719739 NR Description: putative pyridoxine biosynthetic enzyme
  misc_feature (1)..(295): Homolog of NCBI NO: 21617922 NR Description: pyridoxine biosynthesis protein-like [Arabidopsis
  misc_feature (1)..(295): Homolog of NCBI NO: 2501578 NR Description: ETHYLENE-INDUCIBLE PROTEIN HEVER
  misc_feature (1)..(295): Homolog of NCBI NO: 15240972 NR Description: pyridoxine biosynthesis protein - like
  misc_feature (1)..(295): Homolog of NCBI NO: 15224470 NR Description: SOR1 from the fungus Cercospora nicotianae

SEQ ID NO: 49715 - protein, 277 aa, Arabidopsis thaliana; identical to SEQ ID NO: 49522
  peptide (1)..(277): Ceres Seq. ID no. 13588644
  misc_feature (1)..(197): Pfam Name: SOR/SNZ family Pfam Description: SOR/SNZ family
  misc_feature (1)..(197): Pfam Name: SOR/SNZ family Pfam Description: SOR/SNZ family
  misc_feature (1)..(275): Homolog of NCBI NO: 19115894 NR Description: putative stress-induced protein
  misc_feature (1)..(266): Homolog of NCBI NO: 22970419 NR Description: hypothetical protein [Chloroflexus aurantiacus]
  misc_feature (1)..(277): Homolog of NCBI NO: 37530308 NR Description: putative pyridoxine/pyridoxal 5-phosphate
  misc_feature (1)..(277): Homolog of NCBI NO: 13310484 NR Description: Sor-like protein [Ginkgo biloba]
  misc_feature (1)..(277): Homolog of NCBI NO: 34394152 NR Description: putative ethylene-inducible protein
  misc_feature (1)..(275): Homolog of NCBI NO: 19115894 NR Description: putative stress-induced protein
  misc_feature (1)..(277): Homolog of NCBI NO: 37530308 NR Description: putative pyridoxine/pyridoxal 5-phosphate
  misc_feature (1)..(277): Homolog of NCBI NO: 34394152 NR Description: putative ethylene-inducible protein
  misc_feature (1)..(277): Homolog of NCBI NO: 15224470 NR Description: SOR1 from the fungus Cercospora nicotianae
  misc_feature (1)..(277): Homolog of NCBI NO: 15240972 NR Description: pyridoxine biosynthesis protein - like
  misc_feature (1)..(277): Homolog of NCBI NO: 2501578 NR Description: ETHYLENE-INDUCIBLE PROTEIN HEVER
  misc_feature (1)..(277): Homolog of NCBI NO: 21617922 NR Description: pyridoxine biosynthesis protein-like [Arabidopsis
  misc_feature (1)..(277): Homolog of NCBI NO: 10719739 NR Description: putative pyridoxine biosynthetic enzyme
  misc_feature (1)..(277): Homolog of NCBI NO: 13310484 NR Description: Sor-like protein [Ginkgo biloba]
  misc_feature (1)..(266): Homolog of NCBI NO: 22970419 NR Description: hypothetical protein [Chloroflexus aurantiacus]
  misc_feature (1)..(277): Homolog of NCBI NO: 10719739 NR Description: putative pyridoxine biosynthetic enzyme
  misc_feature (1)..(277): Homolog of NCBI NO: 21617922 NR Description: pyridoxine biosynthesis protein-like [Arabidopsis
  misc_feature (1)..(277): Homolog of NCBI NO: 2501578 NR Description: ETHYLENE-INDUCIBLE PROTEIN HEVER
  misc_feature (1)..(277): Homolog of NCBI NO: 15240972 NR Description: pyridoxine biosynthesis protein - like
  misc_feature (1)..(277): Homolog of NCBI NO: 15224470 NR Description: SOR1 from the fungus Cercospora nicotianae

SEQ ID NO: 49716 - DNA, 830 bp, Arabidopsis thaliana
  misc_feature (1)..(830): Ceres Seq. ID no. 13592298
  misc_feature: MA Experiment ID: 20000234 Result: Up-regulated in Transcription
  misc_feature: MA Experiment 20000234 PARAMETER Experiment Name: At_Siliques_P Parameter: Age (day) Value: 21
  misc_feature: MA Experiment 20000234 PARAMETER Experiment Name: At_Siliques_P Parameter: Organism Value: A. thaliana
  misc_feature: MA Experiment 20000234 PARAMETER Experiment Name: At_Siliques_P Parameter: Plant Line Value: WS
  misc_feature: MA Experiment 20000234 PARAMETER Experiment Name: At_Siliques_P Parameter: Tissue Value: Less Than 5mm Siliques vs. Whole Plant
  misc_feature: MA Experiment ID: 20000437 Result: Down-regulated in Transcription
  misc_feature: MA Experiment 20000437 PARAMETER Experiment Name: At_Drought_P Parameter: Age (day) Value: 8
  misc_feature: MA Experiment 20000437 PARAMETER Experiment Name: At_Drought_P Parameter: Organism Value: A. thaliana
  misc_feature: MA Experiment 20000437 PARAMETER Experiment Name: At_Drought_P Parameter: Plant Line Value: WS
  misc_feature: MA Experiment 20000437 PARAMETER Experiment Name: At_Drought_P Parameter: Timepoint (hr) Value: 24
  misc_feature: MA Experiment 20000437 PARAMETER Experiment Name: At_Drought_P Parameter: Tissue Value: Whole Plant
  misc_feature: MA Experiment 20000437 PARAMETER Experiment Name: At_Drought_P Parameter: Treatment Value: Drought vs. No Drought
  misc_feature: MA Experiment ID: 20000794 Result: Down-regulated in Transcription
  misc_feature: MA Experiment 20000794 PARAMETER Experiment Name: At_Petals_P Parameter: Age (day) Value: 23-25 days
  misc_feature: MA Experiment 20000794 PARAMETER Experiment Name: At_Petals_P Parameter: Plant Line Value: WS
  misc_feature: MA Experiment 20000794 PARAMETER Experiment Name: At_Petals_P Parameter: Tissue Value: Petals vs. Whole plant
  misc_feature: MA Experiment ID: 20001557 Result: Up-regulated in Transcription
  misc_feature: MA Experiment 20001557 PARAMETER Experiment Name: At_Drought_Soil_Dry_P Parameter: Age (day) Value: 27
  misc_feature: MA Experiment 20001557 PARAMETER Experiment Name: At_Drought_Soil_Dry_P Parameter: Organism Value: A. thaliana
  misc_feature: MA Experiment 20001557 PARAMETER Experiment Name: At_Drought_Soil_Dry_P Parameter: Plant Line Value: WS
  misc_feature: MA Experiment 20001557 PARAMETER Experiment Name: At_Drought_Soil_Dry_P Parameter: Post Timepoint (hr) Value: 3
  misc_feature: MA Experiment 20001557 PARAMETER Experiment Name: At_Drought_Soil_Dry_P Parameter: Post-Treatment Value: Re-Water vs. No Drought
  misc_feature: MA Experiment 20001557 PARAMETER Experiment Name: At_Drought_Soil_Dry_P Parameter: Timepoint (day) Value: 13
  misc_feature: MA Experiment 20001557 PARAMETER Experiment Name: At_Drought_Soil_Dry_P Parameter: Treatment Value: Drought vs. No Drought
  misc_feature: MA Experiment ID: 20001558 Result: Up-regulated in Transcription
  misc_feature: MA Experiment 20001558 PARAMETER Experiment Name: At_Drought_Soil_Dry_P Parameter: Age (day) Value: 27
  misc_feature: MA Experiment 20001558 PARAMETER Experiment Name: At_Drought_Soil_Dry_P Parameter: Organism Value: A. thaliana
  misc_feature: MA Experiment 20001558 PARAMETER Experiment Name: At_Drought_Soil_Dry_P Parameter: Plant Line Value: WS
  misc_feature: MA Experiment 20001558 PARAMETER Experiment Name: At_Drought_Soil_Dry_P Parameter: Post Timepoint (hr) Value: 6
  misc_feature: MA Experiment 20001558 PARAMETER Experiment Name: At_Drought_Soil_Dry_P Parameter: Post-Treatment Value: Re-Water vs. No Drought
  misc_feature: MA Experiment 20001558 PARAMETER Experiment Name: At_Drought_Soil_Dry_P Parameter: Timepoint (day) Value: 13
  misc_feature: MA Experiment 20001558 PARAMETER Experiment Name: At_Drought_Soil_Dry_P Parameter: Treatment Value: Drought vs. No Drought
  misc_feature: MA Experiment ID: 20001560 Result: Up-regulated in Transcription
  misc_feature: MA Experiment 20001560 PARAMETER Experiment Name: At_Drought_Soil_Dry_P Parameter: Age (day) Value: 28
  misc_feature: MA Experiment 20001560 PARAMETER Experiment Name: At_Drought_Soil_Dry_P Parameter: Organism Value: A. thaliana
  misc_feature: MA Experiment 20001560 PARAMETER Experiment Name: At_Drought_Soil_Dry_P Parameter: Plant Line Value: WS
  misc_feature: MA Experiment 20001560 PARAMETER Experiment Name: At_Drought_Soil_Dry_P Parameter: Post Timepoint (hr) Value: None
  misc_feature: MA Experiment 20001560 PARAMETER Experiment Name: At_Drought_Soil_Dry_P Parameter: Post-Treatment Value: None
  misc_feature: MA Experiment 20001560 PARAMETER Experiment Name: At_Drought_Soil_Dry_P Parameter: Timepoint (day) Value: 14
  misc_feature: MA Experiment 20001560 PARAMETER Experiment Name: At_Drought_Soil_Dry_P Parameter: Treatment Value: Drought vs. No Drought
  misc_feature: MA Experiment ID: 20001757 Result: Up-regulated in Transcription
  misc_feature: MA Experiment 20001757 PARAMETER Experiment Name: At_50mM_NH4NO3_L-to-H_P Parameter: Timepoint (hr) Value: 6
  misc_feature: MA Experiment 20001757 PARAMETER Experiment Name: At_50mM_NH4NO3_L-to-H_P Parameter: Tissue Value: Leaf
  misc_feature: MA Experiment 20001757 PARAMETER Experiment Name: At_50mM_NH4NO3_L-to-H_P Parameter: Treatment Value: 50mM NH4NO3 vs 100mM Mannitol
gaagctgctcacttttaatcaccccggagtagtaagcttgcggctgatcagagctgagtgaaaaatggtgtctggatcaggaatttgcgcgaagcgcgtggtggttgatgctcgtcaccacatgctaggtcgcttggcttcggttgtagcaaaggatctgctcaatggccagaatattgtggttgtccggtgcgaggagatttgtctctccggcggacttgttcgtcagaagatgaagtacatgaggtttctccgtaagcgtatgaacactaaaccttctcacggacctattcacttccgtgctccctccaagatcttctggcgtaccgttcgcggtatgattccacacaagactaagcgtggagctaatgcacttgcccgcttgaaggtctttgaaggagttcctactccatatgacaagatcaagaggatggtcgttcctgatgctctcaaggtcttgaggctgcaggctggacacaaatactgtctgttgggtcgcctttcttctgaagtcgggtggaaccactacgacaccatcaaggagctggagaacaagagaaaggaaagagctcaagctgtttatgagagaaagaagcaacttagcaaactcagagctaaggccgagaaggttgctgaagagaagcttggatctcaattggatgttcttgcacccgtcaagtactgaattcaatcagtttatcgtatttgaatgtttttgcaagttttgctcagacattatactattatattacgaggttttgttgtatgcgattttgacttagtttatttcttgaattcgactttacttagtttatttcttgaattcgtct

SEQ ID NO: 49717 - protein, 206 aa, Arabidopsis thaliana [sequence omitted]

SEQ ID NO: 49718 - protein, 187 aa, Arabidopsis thaliana
  peptide (1)..(187): Ceres Seq. ID no. 13592300
  misc_feature (1)..(108): Pfam Name: Ribosomal protein L13 Pfam Description: Ribosomal protein L13
  misc_feature (1)..(140): Homolog of NCBI NO: 34899414 NR Description: putative 60S ribosomal protein
  misc_feature (1)..(187): Homolog of NCBI NO: 33146452 NR Description: putative 60S ribosomal protein
  misc_feature (1)..(187): Homolog of NCBI NO: 37718812 NR Description: putative ribosomal protein L13a
  misc_feature (1)..(187): Homolog of NCBI NO: 3914535 NR Description: 60S RIBOSOMAL PROTEIN L13A
  misc_feature (1)..(187): Homolog of NCBI NO: 21326116 NR Description: putative 60S ribosomal protein [Sorghum bicolor]
  misc_feature (1)..(187): Homolog of NCBI NO: 15235617 NR Description: 60S ribosomal protein L13A (RPL13aC) [Arabidopsis
  misc_feature (1)..(187): Homolog of NCBI NO: 15230197 NR Description: 60S ribosomal protein L13A (RPL13aB) [Arabidopsis
  misc_feature (1)..(187): Homolog of NCBI NO: 19423912 NR Description: putative 60S ribosomal protein [Arabidopsis
  misc_feature (1)..(187): Homolog of NCBI NO: 15239698 NR Description: 60S ribosomal protein L13A (RPL13aD) [Arabidopsis
  misc_feature (1)..(187): Homolog of NCBI NO: 15231394 NR Description: 60S ribosomal protein L13A (RPL13aA) [Arabidopsis
MLGRLASVVAKDLLNGQNIVVVRCEEICLSGGLVRQKMKYMRFLRKRMNTKPSHGPIHFRAPSKIFWRTVRGMIPHKTKRGANALARLKVFEGVPTPYDKIKRMVVPDALKVLRLQAGHKYCLLGRLSSEVGWNHYDTIKELENKRKERAQAVYERKKQLSKLRAKAEKVAEEKLGSQLDVLAPVKY

SEQ ID NO: 49719 - protein, 150 aa, Arabidopsis thaliana
  peptide (1)..(150): Ceres Seq. ID no. 13592301
  misc_feature (1)..(71): Pfam Name: Ribosomal protein L13 Pfam Description: Ribosomal protein L13
  misc_feature (1)..(103): Homolog of NCBI NO: 34899414 NR Description: putative 60S ribosomal protein
  misc_feature (1)..(150): Homolog of NCBI NO: 33146452 NR Description: putative 60S ribosomal protein
  misc_feature (1)..(150): Homolog of NCBI NO: 37718812 NR Description: putative ribosomal protein L13a
  misc_feature (1)..(150): Homolog of NCBI NO: 3914535 NR Description: 60S RIBOSOMAL PROTEIN L13A
  misc_feature (1)..(150): Homolog of NCBI NO: 21326116 NR Description: putative 60S ribosomal protein [Sorghum bicolor]
  misc_feature (1)..(150): Homolog of NCBI NO: 15235617 NR Description: 60S ribosomal protein L13A (RPL13aC) [Arabidopsis
  misc_feature (1)..(150): Homolog of NCBI NO: 15230197 NR Description: 60S ribosomal protein L13A (RPL13aB) [Arabidopsis
  misc_feature (1)..(150): Homolog of NCBI NO: 19423912 NR Description: putative 60S ribosomal protein [Arabidopsis
  misc_feature (1)..(150): Homolog of NCBI NO: 15239698 NR Description: 60S ribosomal protein L13A (RPL13aD) [Arabidopsis
  misc_feature (1)..(150): Homolog of NCBI NO: 15231394 NR Description: 60S ribosomal protein L13A (RPL13aA) [Arabidopsis
MKYMRFLRKRMNTKPSHGPIHFRAPSKIFWRTVRGMIPHKTKRGANALARLKVFEGVPTPYDKIKRMVVPDALKVLRLQAGHKYCLLGRLSSEVGWNHYDTIKELENKRKERAQAVYERKKQLSKLRAKAEKVAEEKLGSQLDVLAPVKY

SEQ ID NO: 49720 - DNA, 1750 bp, Arabidopsis thaliana
  misc_feature (1)..(1750): Ceres Seq. ID no. 13647686
  misc_feature: MA Experiment ID: 20000327 Result: Up-regulated in Transcription
  misc_feature: MA Experiment 20000327 PARAMETER Experiment Name: At_42deg_Heat_Sub_P Parameter: Age (day) Value: 14
  misc_feature: MA Experiment 20000327 PARAMETER Experiment Name: At_42deg_Heat_Sub_P Parameter: Organism Value: A. thaliana
  misc_feature: MA Experiment 20000327 PARAMETER Experiment Name: At_42deg_Heat_Sub_P Parameter: Plant Line Value: WS
  misc_feature: MA Experiment 20000327 PARAMETER Experiment Name: At_42deg_Heat_Sub_P Parameter: Temperature (deg C) Value: 42 vs. 22
  misc_feature: MA Experiment 20000327 PARAMETER Experiment Name: At_42deg_Heat_Sub_P Parameter: Timepoint (hr) Value: 1
  misc_feature: MA Experiment 20000327 PARAMETER Experiment Name: At_42deg_Heat_Sub_P Parameter: Tissue Value: Aerial
attttgatttcttcctctcttctctctagaaacatctttcatgcgttatcttctccaaaagctctgattctgattctgaatcatcctgaaaaaaaacctagaaaaatttatatcccacaaaatcttctaagatccatggccgtaattatccctcgttcagatccaccttcacgaatccatccggaaccaccacaaaccctagaaatcgaccatttcgatcatcttcctgactcaatcctcctcctcgttttcaacaaaatcggcgacgtcaaagctctcggaagatgctgtgtcgtttccagaagattccattctctcgttcctcaagtcgataacgtcgttgttcgtgtcgattgcgtaatctccgacgacgattcgtcatctttgtcatctatcaaatctcgctccggttcttccgctggttcgttctcggctatatttcgtcttgttgttggtggcattgttaagccgttacaagctttaggtcaattccttggtacgaagagatcatcatcatcatgtggtggttctggatcttcttcttcttcgttgtctattagtggagatgatgatggtggagagatcgaacaaggcggtgttacgcatcattcacctactcaggttttgaaaaacttcgatgagattcgttacttaagaattgagcttcctagtggtgaattagggattgatgatggagttttgttgaaatggagagctgaatttggttctactcttgataattgtgtgattctcggtgcttcttcagtgattccaccaaatccaatgagagtttctcaagcttgtgatactactacagtcgttgaagctcccggttctggctccgatgataatgggagtataccggaatcgttttacacaaacggaggtttgaaattgcgtgttgtatggacgattagctctttgattgctgcatcagcacgacattacttgttacaaccgataatcgcggagcataagacgcttgatagtttagtgctcactgattcagatgggcaaggtgtgctctgtatgaacagagatcagctagaagagcttagggtgaaaccattagcagcttcatcggcttcgaagaggacacttgtgcctgctctgaatatgagactatggtatgctccaaccttggaattgcctgatggaactgtgttaaaaggtgcgactttggttgcgataagaccgagtgaatcgaaaaaggaagtgtctgatatctcttgggtgtcttcggcttttgaggagccttatgagacggctgctaagatgctggttaaaagaaggacttactgtcttgaaatgaactcgttctagcttgaatggtttcagtcggaatctgagagaactggcaaccctgtggcgaattcaggaaattacaattaaaagcatataatggggagaagcagagaatgaaataaaatcgaagttttgatgaatcaagaaacaagttttgctgcctactactactgcatctgctagctagttttttcattgaagcatatgcctttgcaggatctcgcaatcatatataatatatatcaacaaattacagatatcatgtaagagtttttcttttcttttttctgtctttttcttctcctttgcttgctcttctctatttatgtgaatattgtaggtattgcttattcccctgtcattatacaagttatttaagattgtagttaaaaaaaaaaaaaaaaaaaaaaaaaactcgagggggggcccggtacccaattcgctg

SEQ ID NO: 49721 - protein, 440 aa, Arabidopsis thaliana
  peptide (1)..(440): Ceres Seq. ID no. 13647687
  misc_feature (204)..(440): Homolog of NCBI NO: 18411823 NR Description: F-box protein family [Arabidopsis thaliana]
  misc_feature (69)..(123): Homolog of NCBI NO: 15219845 NR Description: F-box protein family [Arabidopsis thaliana]
  misc_feature (205)..(273): Homolog of NCBI NO: 15219845 NR Description: F-box protein family [Arabidopsis thaliana]
  misc_feature (285)..(440): Homolog of NCBI NO: 15219845 NR Description: F-box protein family [Arabidopsis thaliana]
  misc_feature (57)..(169): Homolog of NCBI NO: 34909194 NR Description: P0425G02.20 [Oryza sativa (japonica
  misc_feature (200)..(438): Homolog of NCBI NO: 34909194 NR Description: P0425G02.20 [Oryza sativa (japonica
  misc_feature (70)..(440): Homolog of NCBI NO: 34909910 NR Description: P0665A11.15 [Oryza sativa (japonica
  misc_feature (52)..(440): Homolog of NCBI NO: 18397400 NR Description: expressed protein [Arabidopsis thaliana]
  misc_feature (46)..(440): Homolog of NCBI NO: 15236865 NR Description: F-box protein family [Arabidopsis thaliana]
  misc_feature (46)..(440): Homolog of NCBI NO: 15237391 NR Description: F-box protein family [Arabidopsis thaliana]
ILISSSLLSRNIFHALSSPKALILILNHPEKKPRKIYIPQNLLRSMAVIIPRSDPPSRIHPEPPQTLEIDHFDHLPDSILLLVFNKIGDVKALGRCCVVSRRFHSLVPQVDNVVVRVDCVISDDDSSSLSSIKSRSGSSAGSFSAIFRLVVGGIVKPLQALGQFLGTKRSSSSCGGSGSSSSSLSISGDDDGGEIEQGGVTHHSPTQVLKNFDEIRYLRIELPSGELGIDDGVLLKWRAEFGSTLDNCVILGASSVIPPNPMRVSQACDTTTVVEAPGSGSDDNGSIPESFYTNGGLKLRVVWTISSLIAASARHYLLQPIIAEHKTLDSLVLTDSDGQGVLCMNRDQLEELRVKPLAASSASKRTLVPALNMRLWYAPTLELPDGTVLKGATLVAIRPSESKKEVSDISWVSSAFEEPYETAAKMLVKRRTYCLEMNSF

SEQ ID NO: 49722 - protein, 395 aa, Arabidopsis thaliana
  peptide (1)..(395): Ceres Seq. ID no. 13647688
  misc_feature (159)..(395): Homolog of NCBI NO: 18411823 NR Description: F-box protein family [Arabidopsis thaliana]
  misc_feature (24)..(78): Homolog of NCBI NO: 15219845 NR Description: F-box protein family [Arabidopsis thaliana]
  misc_feature (160)..(228): Homolog of NCBI NO: 15219845 NR Description: F-box protein family [Arabidopsis thaliana]
  misc_feature (240)..(395): Homolog of NCBI NO: 15219845 NR Description: F-box protein family [Arabidopsis thaliana]
  misc_feature (12)..(124): Homolog of NCBI NO: 34909194 NR Description: P0425G02.20 [Oryza sativa (japonica
  misc_feature (155)..(393): Homolog of NCBI NO: 34909194 NR Description: P0425G02.20 [Oryza sativa (japonica
  misc_feature (25)..(395): Homolog of NCBI NO: 34909910 NR Description: P0665A11.15 [Oryza sativa (japonica
  misc_feature (7)..(395): Homolog of NCBI NO: 18397400 NR Description: expressed protein [Arabidopsis thaliana]
  misc_feature (1)..(395): Homolog of NCBI NO: 15236865 NR Description: F-box protein family [Arabidopsis thaliana]
  misc_feature (1)..(395): Homolog of NCBI NO: 15237391 NR Description: F-box protein family [Arabidopsis thaliana]
MAVIIPRSDPPSRIHPEPPQTLEIDHFDHLPDSILLLVFNKIGDVKALGRCCVVSRRFHSLVPQVDNVVVRVDCVISDDDSSSLSSIKSRSGSSAGSFSAIFRLVVGGIVKPLQALGQFLGTKRSSSSCGGSGSSSSSLSISGDDDGGEIEQGGVTHHSPTQVLKNFDEIRYLRIELPSGELGIDDGVLLKWRAEFGSTLDNCVILGASSVIPPNPMRVSQACDTTTVVEAPGSGSDDNGSIPESFYTNGGLKLRVVWTISSLIAASARHYLLQPIIAEHKTLDSLVLTDSDGQGVLCMNRDQLEELRVKPLAASSASKRTLVPALNMRLWYAPTLELPDGTVLKGATLVAIRPSESKKEVSDISWVSSAFEEPYETAAKMLVKRRTYCLEMNSF

SEQ ID NO: 49723 - DNA, 1426 bp, Arabidopsis thaliana
  misc_feature (1)..(1426): Ceres Seq. ID no. 13588718
  misc_feature: MA Experiment ID: 108462 Result: Up-regulated in Transcription
  misc_feature: MA Experiment 108462 PARAMETER Experiment Name: At_Germinating_Seeds_cDNA_P Parameter: Age (day) Value: 2 vs. 0
  misc_feature: MA Experiment 108462 PARAMETER Experiment Name: At_Germinating_Seeds_cDNA_P Parameter: Tissue Value: Germinating Seeds
  misc_feature: MA Experiment ID: 108463 Result: Up-regulated in Transcription
  misc_feature: MA Experiment 108463 PARAMETER Experiment Name: At_Germinating_Seeds_cDNA_P Parameter: Age (day) Value: 3 vs. 0
  misc_feature: MA Experiment 108463 PARAMETER Experiment Name: At_Germinating_Seeds_cDNA_P Parameter: Tissue Value: Germinating Seeds
  misc_feature: MA Experiment ID: 108464 Result: Up-regulated in Transcription
  misc_feature: MA Experiment 108464 PARAMETER Experiment Name: At_Germinating_Seeds_cDNA_P Parameter: Age (day) Value: 4 vs. 0
  misc_feature: MA Experiment 108464 PARAMETER Experiment Name: At_Germinating_Seeds_cDNA_P Parameter: Tissue Value: Germinating Seeds
  misc_feature: MA Experiment ID: 108573 Result: Up-regulated in Transcription
  misc_feature: MA Experiment 108573 PARAMETER Experiment Name: At_Drought_cDNA_P Parameter: Timepoint (hr) Value: 6
  misc_feature: MA Experiment 108573 PARAMETER Experiment Name: At_Drought_cDNA_P Parameter: Tissue Value: Aerial
  misc_feature: MA Experiment 108573 PARAMETER Experiment Name: At_Drought_cDNA_P Parameter: Treatment Value: Drought vs. No Drought
  misc_feature: MA Experiment ID: 108595 Result: Down-regulated in Transcription
  misc_feature: MA Experiment 108595 PARAMETER Experiment Name: At_Ler-pi_Ovule_cDNA_P Parameter: Plant Line Value: null
  misc_feature: MA Experiment ID: 20000087 Result: Down-regulated in Transcription
  misc_feature: MA Experiment 20000087 PARAMETER Experiment Name: At_100uM_ABA_Mutants_cDNA_P Parameter: Plant Line Value: WS
  misc_feature: MA Experiment 20000087 PARAMETER Experiment Name: At_100uM_ABA_Mutants_cDNA_P Parameter: Timepoint (hr) Value: 6
  misc_feature: MA Experiment 20000087 PARAMETER Experiment Name: At_100uM_ABA_Mutants_cDNA_P Parameter: Tissue Value: Aerial
  misc_feature: MA Experiment 20000087 PARAMETER Experiment Name: At_100uM_ABA_Mutants_cDNA_P Parameter: Treatment Value: 100uM ABA vs. No Treatment
  misc_feature: MA Experiment ID: 20000090 Result: Down-regulated in Transcription
  misc_feature: MA Experiment ID: 20000224 Result: Down-regulated in Transcription
  misc_feature: MA Experiment ID: 20000234 Result: Down-regulated in Transcription
  misc_feature: MA Experiment 20000234 PARAMETER Experiment Name: At_Siliques_P Parameter: Age (day) Value: 21
  misc_feature: MA Experiment 20000234 PARAMETER Experiment Name: At_Siliques_P Parameter: Organism Value: A. thaliana
  misc_feature: MA Experiment 20000234 PARAMETER Experiment Name: At_Siliques_P Parameter: Plant Line Value: WS
  misc_feature: MA Experiment 20000234 PARAMETER Experiment Name: At_Siliques_P Parameter: Tissue Value: Less Than 5mm Siliques vs. Whole Plant
  misc_feature: MA Experiment ID: 20000495 Result: Down-regulated in Transcription
  misc_feature: MA Experiment 20000495 PARAMETER Experiment Name: At_Guard_Cells_P Parameter: Harvest Date Value: 8/2/2002
  misc_feature: MA Experiment 20000495 PARAMETER Experiment Name: At_Guard_Cells_P Parameter: Organism Value: A. thaliana
  misc_feature: MA Experiment 20000495 PARAMETER Experiment Name: At_Guard_Cells_P Parameter: Tissue Value: Guard Cells vs. Leaves
  misc_feature: MA Experiment ID: 20000794 Result: Down-regulated in Transcription
  misc_feature: MA Experiment 20000794 PARAMETER Experiment Name: At_Petals_P Parameter: Age (day) Value: 23-25 days
  misc_feature: MA Experiment 20000794 PARAMETER Experiment Name: At_Petals_P Parameter: Plant Line Value: WS
  misc_feature: MA Experiment 20000794 PARAMETER Experiment Name: At_Petals_P Parameter: Tissue Value: Petals vs. Whole plant
  misc_feature: MA Experiment ID: 20001247 Result: Up-regulated in Transcription
  misc_feature: MA Experiment 20001247 PARAMETER Experiment Name: At_Far-red-induction_P Parameter: Age (day) Value: 7
  misc_feature: MA Experiment 20001247 PARAMETER Experiment Name: At_Far-red-induction_P Parameter: Light Value: Far-red vs. White
  misc_feature: MA Experiment 20001247 PARAMETER Experiment Name: At_Far-red-induction_P Parameter: Organism Value: A. thaliana
  misc_feature: MA Experiment 20001247 PARAMETER Experiment Name: At_Far-red-induction_P Parameter: Plant Line Value: Columbia
  misc_feature: MA Experiment 20001247 PARAMETER Experiment Name: At_Far-red-induction_P Parameter: Timepoint (hr) Value: 1
  misc_feature: MA Experiment 20001247 PARAMETER Experiment Name: At_Far-red-induction_P Parameter: Tissue Value: Whole Plant
gagagagagacactgaaacatagagagaagaaaaagaagaggtttagagagagaaaaatggcgtcaaagctctgcgattcgtgcaaatcagcgacggcggcgttatactgccgaccagacgcagcgtttctatgcttaagctgcgattcaaaagtccacgcggcgaacaaactcgcgtcacgacacgcgcgcgtgtggatgtgtgaagtgtgcgagcaagcaccggcacacgtcacgtgcaaagcagacgcggccgcgttatgcgtcacgtgcgaccgtgatatccactcggctaatccgttagctcgccgtcacgaacgcgttcccgttactccgttttacgattccgtctctagtgacggttccgttaaacacaccgccgttaatttccttgacgactgttacttctccgatatagatggtaacggaagccgtgaagaagaggaggaagaagctgcttcgtggctgttacttcccaatccaaagactacaacgacggcgacggcggggatcgttgctgttacttcagctgaggaagttccgggagatagtccggagatgaacactggtcaacagtatttgttctcggatccggatccgtatctggatctggattatggaaatgttgatccgaaggtggaatcgttagagcagaatagctccggtactgatggtgttgttccggtggagaatcggacggttaggattccgacggtgaacgagaattgctttgaaatggattttaccggaggatctaaaggctttacttatggtggtggttacaattgcatcagtcacagcgtgtcatcatcgtcgatggaagtgggagtggtgccagatggtggttcggtggctgatgtatcgtatccttacggtggtcctgcaaccagtggagctgatccggggacacagcgggctgttccgctgacttcagctgagagagaagcgagggtaatgaggtacagagagaagaggaagaacaggaagtttgagaagactataaggtatgcttcaaggaaagcgtatgcggaaatgagaccgagaatcaagggacggtttgcgaagcggacggatacaaatgagagcaatgatgtggttggtcatggtggtatctttagtgggttcggacttgtacctacattttagatattgagagagggagagactctaaaatggaagatggtgggtggtttggtgtttgttttagtaataaggtttttaacgaacgtttaatttaaacgagtttgtttgttttttgttgatgagtatttttagttgttgtgggcgatgaagaggaagagaagtgagtgggtggtgtttaactgtttataagtaacttgttttgtatatatcgtgattttgaatatgttcttgtttatgttatgtactcaaactatttagaatcaacaagtttacaaaatttggg

SEQ ID NO: 49724 - protein, 381 aa, Arabidopsis thaliana
  peptide (1)..(381): Ceres Seq. ID no. 15220897
  misc_feature (20)..(67): Pfam Name: B-box zinc finger Pfam Description: B-box zinc finger
  misc_feature (20)..(284): Homolog of NCBI NO: 4091806 NR Description: CONSTANS-like protein 2 [Malus x domestica]
  misc_feature (239)..(381): Homolog of NCBI NO: 21553854 NR Description: zinc finger protein constans-like 8 [Arabidopsis
  misc_feature (239)..(381): Homolog of NCBI NO: 15224620 NR Description: CONSTANS B-box zinc finger family protein
  misc_feature (21)..(205): Homolog of NCBI NO: 21553854 NR Description: zinc finger protein constans-like 8 [Arabidopsis
  misc_feature (21)..(205): Homolog of NCBI NO: 15224620 NR Description: CONSTANS B-box zinc finger family protein
  misc_feature (239)..(381): Homolog of NCBI NO: 7488604 NR Description: CONSTANS protein homolog COL1 - radish
  misc_feature (20)..(210): Homolog of NCBI NO: 7488604 NR Description: CONSTANS protein homolog COL1 - radish
  misc_feature (20)..(375): Homolog of NCBI NO: 4091804 NR Description: CONSTANS-like protein 1 [Malus x domestica]
  misc_feature (20)..(248): Homolog of NCBI NO: 15450659 NR Description: AT5g24930/F6A4_140 [Arabidopsis thaliana]
  misc_feature (1)..(381): Homolog of NCBI NO: 30689668 NR Description: CONSTANS B-box zinc finger family protein
ERETLKHREKKKKRFRERKMASKLCDSCKSATAALYCRPDAAFLCLSCDSKVHAANKLASRHARVWMCEVCEQAPAHVTCKADAAALCVTCDRDIHSANPLARRHERVPVTPFYDSVSSDGSVKHTAVNFLDDCYFSDIDGNGSREEEEEEAASWLLLPNPKTTTTATAGIVAVTSAEEVPGDSPEMNTGQQYLFSDPDPYLDLDYGNVDPKVESLEQNSSGTDGVVPVENRTVRIPTVNENCFEMDFTGGSKGFTYGGGYNCISHSVSSSSMEVGVVPDGGSVADVSYPYGGPATSGADPGTQRAVPLTSAEREARVMRYREKRKNRKFEKTIRYASRKAYAEMRPRIKGRFAKRTDTNESNDVVGHGGIFSGFGLVPTF

SEQ ID NO: 49725 - protein, 362 aa, Arabidopsis thaliana
  peptide (1)..(362): Ceres Seq. ID no. 15220898
  misc_feature (1)..(48): Pfam Name: B-box zinc finger Pfam Description: B-box zinc finger
  misc_feature (1)..(265): Homolog of NCBI NO: 4091806 NR Description: CONSTANS-like protein 2 [Malus x domestica]
  misc_feature (220)..(362): Homolog of NCBI NO: 21553854 NR Description: zinc finger protein constans-like 8 [Arabidopsis
  misc_feature (220)..(362): Homolog of NCBI NO: 15224620 NR Description: CONSTANS B-box zinc finger family protein
  misc_feature (2)..(186): Homolog of NCBI NO: 21553854 NR Description: zinc finger protein constans-like 8 [Arabidopsis
  misc_feature (2)..(186): Homolog of NCBI NO: 15224620 NR Description: CONSTANS B-box zinc finger family protein
  misc_feature (220)..(362): Homolog of NCBI NO: 7488604 NR Description: CONSTANS protein homolog COL1 - radish
  misc_feature (1)..(191): Homolog of NCBI NO: 7488604 NR Description: CONSTANS protein homolog COL1 - radish
  misc_feature (1)..(356): Homolog of NCBI NO: 4091804 NR Description: CONSTANS-like protein 1 [Malus x domestica]
  misc_feature (1)..(229): Homolog of NCBI NO: 15450659 NR Description: AT5g24930/F6A4_140 [Arabidopsis thaliana]
  misc_feature (1)..(362): Homolog of NCBI NO: 30689668 NR Description: CONSTANS B-box zinc finger family protein
MASKLCDSCKSATAALYCRPDAAFLCLSCDSKVHAANKLASRHARVWMCEVCEQAPAHVTCKADAAALCVTCDRDIHSANPLARRHERVPVTPFYDSVSSDGSVKHTAVNFLDDCYFSDIDGNGSREEEEEEAASWLLLPNPKTTTTATAGIVAVTSAEEVPGDSPEMNTGQQYLFSDPDPYLDLDYGNVDPKVESLEQNSSGTDGVVPVENRTVRIPTVNENCFEMDFTGGSKGFTYGGGYNCISHSVSSSSMEVGVVPDGGSVADVSYPYGGPATSGADPGTQRAVPLTSAEREARVMRYREKRKNRKFEKTIRYASRKAYAEMRPRIKGRFAKRTDTNESNDVVGHGGIFSGFGLVPTF

SEQ ID NO: 49726 - protein, 315 aa, Arabidopsis thaliana
  peptide (1)..(315): Ceres Seq. ID no. 15220899
  misc_feature (253)..(292): Pfam Name: CCT motif Pfam Description: CCT motif
  misc_feature (1)..(218): Homolog of NCBI NO: 4091806 NR Description: CONSTANS-like protein 2 [Malus x domestica]
  misc_feature (173)..(315): Homolog of NCBI NO: 21553854 NR Description: zinc finger protein constans-like 8 [Arabidopsis
  misc_feature (173)..(315): Homolog of NCBI NO: 15224620 NR Description: CONSTANS B-box zinc finger family protein
  misc_feature (1)..(139): Homolog of NCBI NO: 21553854 NR Description: zinc finger protein constans-like 8 [Arabidopsis
  misc_feature (1)..(139): Homolog of NCBI NO: 15224620 NR Description: CONSTANS B-box zinc finger family protein
  misc_feature (173)..(315): Homolog of NCBI NO: 7488604 NR Description: CONSTANS protein homolog COL1 - radish
  misc_feature (1)..(144): Homolog of NCBI NO: 7488604 NR Description: CONSTANS protein homolog COL1 - radish
  misc_feature (1)..(309): Homolog of NCBI NO: 4091804 NR Description: CONSTANS-like protein 1 [Malus x domestica]
  misc_feature (1)..(182): Homolog of NCBI NO: 15450659 NR Description: AT5g24930/F6A4_140 [Arabidopsis thaliana]
  misc_feature (1)..(315): Homolog of NCBI NO: 30689668 NR Description: CONSTANS B-box zinc finger family protein
MCEVCEQAPAHVTCKADAAALCVTCDRDIHSANPLARRHERVPVTPFYDSVSSDGSVKHTAVNFLDDCYFSDIDGNGSREEEEEEAASWLLLPNPKTTTTATAGIVAVTSAEEVPGDSPEMNTGQQYLFSDPDPYLDLDYGNVDPKVESLEQNSSGTDGVVPVENRTVRIPTVNENCFEMDFTGGSKGFTYGGGYNCISHSVSSSSMEVGVVPDGGSVADVSYPYGGPATSGADPGTQRAVPLTSAEREARVMRYREKRKNRKFEKTIRYASRKAYAEMRPRIKGRFAKRTDTNESNDVVGHGGIFSGFGLVPTF

SEQ ID NO: 49727 - DNA, 1323 bp, Arabidopsis thaliana
  misc_feature (1)..(1323): Ceres Seq. ID no. 13588812
  misc_feature: MA Experiment ID: 20000180 Result: Down-regulated in Transcription
  misc_feature: MA Experiment 20000180 PARAMETER Experiment Name: At_Germinating_Seeds_P Parameter: Age (hr) Value: 24 vs. 0
  misc_feature: MA Experiment 20000180 PARAMETER Experiment Name: At_Germinating_Seeds_P Parameter: Tissue Value: Germinating Seeds
  misc_feature: MA Experiment ID: 20000227 Result: Down-regulated in Transcription
  misc_feature: MA Experiment 20000227 PARAMETER Experiment Name: At_Root-Tips-vs-Tops_P Parameter: Tissue Value: Root Tips vs. Root Tops
  misc_feature: MA Experiment ID: 20000234 Result: Up-regulated in Transcription
  misc_feature: MA Experiment 20000234 PARAMETER Experiment Name: At_Siliques_P Parameter: Age (day) Value: 21
  misc_feature: MA Experiment 20000234 PARAMETER Experiment Name: At_Siliques_P Parameter: Organism Value: A. thaliana
  misc_feature: MA Experiment 20000234 PARAMETER Experiment Name: At_Siliques_P Parameter: Plant Line Value: WS
  misc_feature: MA Experiment 20000234 PARAMETER Experiment Name: At_Siliques_P Parameter: Tissue Value: Less Than 5mm Siliques vs. Whole Plant
  misc_feature: MA Experiment ID: 20000264 Result: Up-regulated in Transcription
  misc_feature: MA Experiment 20000264 PARAMETER Experiment Name: At_Open_Flower_P Parameter: Age (day) Value: 21
  misc_feature: MA Experiment 20000264 PARAMETER Experiment Name: At_Open_Flower_P Parameter: Plant Line Value: WS
  misc_feature: MA Experiment 20000264 PARAMETER Experiment Name: At_Open_Flower_P Parameter: Tissue Value: Open Flower vs. Whole Plant
  misc_feature: MA Experiment ID: 20000265 Result: Up-regulated in Transcription
  misc_feature: MA Experiment 20000265 PARAMETER Experiment Name: At_Open_Flower_P Parameter: Age (day) Value: 21
  misc_feature: MA Experiment 20000265 PARAMETER Experiment Name: At_Open_Flower_P Parameter: Plant Line Value: WS
  misc_feature: MA Experiment 20000265 PARAMETER Experiment Name: At_Open_Flower_P Parameter: Tissue Value: Closed Flower vs. Whole Plant
gaagcgaacaatatagtcgcacgtcgtatctctctcgctgcctcacttcatcgtcccaaaaaacgcctctgtttcaccgttcttcgccgtataagctcgtctctagccatggctcttccgctcgggaagctcaccatcctcatcggtgcaggtcttattggatcagcattttctaaagaagggggcttaccagatgtctccaatttggtttctggtgcttttaagatggtattcaggcaactgaaacaagacgaacctagcaaatcagctagcaaaccccacgatgatgtacttgtggcccaggttaacagtcttaggcatgagatacagttgctggggtcaaacagacctatcaccattgtttcaccttcaggatcaggtggtagaaactatggtttgatcattatcgttggggtgataggctacggatatgtgtggtggaagggctggaaacttccagattttatgtttgcaacaaggcgtagcttatcagatgcatgtaataatgttggcaaccagatcgatggtttttactcatcactcaagggtacaaaacgagagttaagttcagaaattgatatgatgggtcgtcgtttggatgcaaatacagaagtaattcaagaaacaatacaagaggtggctaagctacaggatggtacatcatttataaaggatgacgttaaggctgttttcgatgcttttgaaaatctggcaagcaaagtgtgtcgtatagagggaaatcaggatatcacacttagaggagttggggctctgcatgctcagtgtcaggagaaccaaagaattcaagagtccaataaggctttgccatcaacttcatcactgccagcccttgaggcagctcctatggcaccctcttcaaagactctgtctttacctcctgcttctcccgatgaatcccagtccccgtcaacccctaatgtagctcaaaagtcacggggcctacttcagcacactcaatctatgtctggtttgaaggacataaatgaaagctctagtagccacaacacgtcttcaaatggaatatattttgggggaaacggtgcatcaggatcgagttcgggcgtgcttggtaggttctcaatagcaagaataatgaggactcgtactgtggtcaacacagtgtctactaactgaagagagagtttgttttatctaattattaggattaacaaagaagggggcatgttgtatctagtagagtatttgaatagattttgcttcttatttttttttttgacaatgctataaatggtgcataatttttttaagaatgcagcttatatttgaatgggtttataggtc

SEQ ID NO: 49728 - protein, 384 aa, Arabidopsis thaliana
  peptide (1)..(384): Ceres Seq. ID no. 15220909
  misc_feature (87)..(365): Homolog of NCBI NO: 15128438 NR Description: contains EST D16001(C2001)~similar to Oryza
  misc_feature (41)..(368): Homolog of NCBI NO: 34894218 NR Description: P0439B06.30 [Oryza sativa (japonica
  misc_feature (182)..(363): Homolog of NCBI NO: 7486368 NR Description: hypothetical protein F3I6.20 - Arabidopsis
  misc_feature (71)..(214): Homolog of NCBI NO: 7486369 NR Description: hypothetical protein F3I6.21 - Arabidopsis
  misc_feature (182)..(274): Homolog of NCBI NO: 7486369 NR Description: hypothetical protein F3I6.21 - Arabidopsis
  misc_feature (37)..(384): Homolog of NCBI NO: 7208775 NR Description: hypothetical protein [Cicer arietinum]
  misc_feature (270)..(367): Homolog of NCBI NO: 7486368 NR Description: hypothetical protein F3I6.20 - Arabidopsis
  misc_feature (37)..(189): Homolog of NCBI NO: 7486368 NR Description: hypothetical protein F3I6.20 - Arabidopsis
  misc_feature (37)..(384): Homolog of NCBI NO: 30688826 NR Description: expressed protein [Arabidopsis thaliana]
  misc_feature (37)..(384): Homolog of NCBI NO: 22329773 NR Description: expressed protein [Arabidopsis thaliana]
EANNIVARRISLAASLHRPKKRLCFTVLRRISSSLAMALPLGKLTILIGAGLIGSAFSKEGGLPDVSNLVSGAFKMVFRQLKQDEPSKSASKPHDDVLVAQVNSLRHEIQLLGSNRPITIVSPSGSGGRNYGLIIIVGVIGYGYVWWKGWKLPDFMFATRRSLSDACNNVGNQIDGFYSSLKGTKRELSSEIDMMGRRLDANTEVIQETIQEVAKLQDGTSFIKDDVKAVFDAFENLASKVCRIEGNQDITLRGVGALHAQCQENQRIQESNKALPSTSSLPALEAAPMAPSSKTLSLPPASPDESQSPSTPNVAQKSRGLLQHTQSMSGLKDINESSSSHNTSSNGIYFGGNGASGSSSGVLGRFSIARIMRTRTVVNTVSTN

SEQ ID NO: 49729 - protein, 348 aa, Arabidopsis thaliana; identical to SEQ ID NO: 49130
  peptide (1)..(348): Ceres Seq. ID no. 15220910
  misc_feature (51)..(329): Homolog of NCBI NO: 15128438 NR Description: contains EST D16001(C2001)~similar to Oryza
  misc_feature (5)..(332): Homolog of NCBI NO: 34894218 NR Description: P0439B06.30 [Oryza sativa (japonica
  misc_feature (146)..(327): Homolog of NCBI NO: 7486368 NR Description: hypothetical protein F3I6.20 - Arabidopsis
  misc_feature (35)..(178): Homolog of NCBI NO: 7486369 NR Description: hypothetical protein F3I6.21 - Arabidopsis
  misc_feature (146)..(238): Homolog of NCBI NO: 7486369 NR Description: hypothetical protein F3I6.21 - Arabidopsis
  misc_feature (1)..(348): Homolog of NCBI NO: 7208775 NR Description: hypothetical protein [Cicer arietinum]
  misc_feature (234)..(331): Homolog of NCBI NO: 7486368 NR Description: hypothetical protein F3I6.20 - Arabidopsis
  misc_feature (1)..(153): Homolog of NCBI NO: 7486368 NR Description: hypothetical protein F3I6.20 - Arabidopsis
  misc_feature (1)..(348): Homolog of NCBI NO: 30688826 NR Description: expressed protein [Arabidopsis thaliana]
  misc_feature (1)..(348): Homolog of NCBI NO: 22329773 NR Description: expressed protein [Arabidopsis thaliana]

SEQ ID NO: 49730 - protein, 309 aa, Arabidopsis thaliana; identical to SEQ ID NO: 49131
  peptide (1)..(309): Ceres Seq. ID no. 15220911
  misc_feature (12)..(290): Homolog of NCBI NO: 15128438 NR Description: contains EST D16001(C2001)~similar to Oryza
  misc_feature (1)..(293): Homolog of NCBI NO: 34894218 NR Description: P0439B06.30 [Oryza sativa (japonica
  misc_feature (107)..(288): Homolog of NCBI NO: 7486368 NR Description: hypothetical protein F3I6.20 - Arabidopsis
  misc_feature (1)..(139): Homolog of NCBI NO: 7486369 NR Description: hypothetical protein F3I6.21 - Arabidopsis
  misc_feature (107)..(199): Homolog of NCBI NO: 7486369 NR Description: hypothetical protein F3I6.21 - Arabidopsis
  misc_feature (1)..(309): Homolog of NCBI NO: 7208775 NR Description: hypothetical protein [Cicer arietinum]
  misc_feature (195)..(292): Homolog of NCBI NO: 7486368 NR Description: hypothetical protein F3I6.20 - Arabidopsis
  misc_feature (1)..(114): Homolog of NCBI NO: 7486368 NR Description: hypothetical protein F3I6.20 - Arabidopsis
  misc_feature (1)..(309): Homolog of NCBI NO: 30688826 NR Description: expressed protein [Arabidopsis thaliana]
  misc_feature (1)..(309): Homolog of NCBI NO: 22329773 NR Description: expressed protein [Arabidopsis thaliana]

SEQ ID NO: 49731 - DNA, 1239 bp, Arabidopsis thaliana
  misc_feature (1)..(1239): Ceres Seq. ID no. 13588813
  misc_feature: MA Experiment ID: 20000306 Result: Up-regulated in Transcription
  misc_feature: MA Experiment 20000306 PARAMETER Experiment Name: At_Germinating_Seeds_Sub_P Parameter: Age (hr) Value: 6 vs. 0
  misc_feature: MA Experiment 20000306 PARAMETER Experiment Name: At_Germinating_Seeds_Sub_P Parameter: Organism Value: A. thaliana
  misc_feature: MA Experiment 20000306 PARAMETER Experiment Name: At_Germinating_Seeds_Sub_P Parameter: Plant Line Value: WS
  misc_feature: MA Experiment 20000306 PARAMETER Experiment Name: At_Germinating_Seeds_Sub_P Parameter: Tissue Value: Germinating Seeds
  misc_feature: MA Experiment ID: 20000328 Result: Up-regulated in Transcription
  misc_feature: MA Experiment 20000328 PARAMETER Experiment Name: At_42deg_Heat_Sub_P Parameter: Age (day) Value: 14
  misc_feature: MA Experiment 20000328 PARAMETER Experiment Name: At_42deg_Heat_Sub_P Parameter: Organism Value: A. thaliana
  misc_feature: MA Experiment 20000328 PARAMETER Experiment Name: At_42deg_Heat_Sub_P Parameter: Plant Line Value: WS
  misc_feature: MA Experiment 20000328 PARAMETER Experiment Name: At_42deg_Heat_Sub_P Parameter: Temperature (deg C) Value: 42 vs. 22
  misc_feature: MA Experiment 20000328 PARAMETER Experiment Name: At_42deg_Heat_Sub_P Parameter: Timepoint (hr) Value: 6
  misc_feature: MA Experiment 20000328 PARAMETER Experiment Name: At_42deg_Heat_Sub_P Parameter: Tissue Value: Aerial
tctatctctcttctatttttagtttctcttcccttaatccctaaacccagaaacatgaatccaaatctccttgagaaagatctaagaggtaaggaaactacaaatgggtcaataagatacaaagaagcaaacaacttcagatctctaccaaactcacacactgctgcttgtaaaacttcactcaacaacccctctatctctagaaaccatcctcacaacaaatcagcctcagtcttggagtcggaagatgaacatgggaacgagagaggtgaaaacgaaaagagtttaagaatgaggggcaaaagtggaattaacacaaaagtatgctcacgaggacactggagaccaacagaagatgctaaactcaaggagcttgttgcccagtttggtccccaaaactggaacttgatttctaaccaccttcttggtagatcaggcaagagttgtagattgagatggtttaaccaactagacccaaggattaacaagagagccttcacggaggaagaagagtttaggctgttagcagctcatcgagcctatggcaacaagtgggctttgatctctcgtctctttccaggtcgtaccgataacgctgtcaagaaccattggcacgtcatcatggctcgacggactagagaaagccaaagacaacgtcaacagcctcctccgacgttgtcaagagacgctgaaatgacggtttcgtcctcttgccgctacaatcaaggtaagttcatcaatgaagaagatgacgacgacgatgtgtcagctgtctctacttgtacgacggagctctctctcactccgccttcttcagcttaccagcctcgcttctttaattacgatagtacccttgcatcaggcaaagatggtcagtgtgtgcagagagcagaagtaaatggcatatatggtaaaaagatggaccatcaaaatcaccacacaatctcagtcagtgaaagaaaggtggagatgaagatgaggagtggctattactactttgattttcttggagttggagcttcctgattaattagttgcagagctagggttcaatgctgaggaattgtgagataagaaatggctttagtttcttctatttttcctggttaattaggcatgtttgtttaacatcttaatttgggttttggaagaagtaagcggtatgagggaaaactgaaaacaaaaacaaaacctagaagtaaaataaaaagttgaatatataatcaacctcttttctgt

SEQ ID NO: 49732 - protein, 341 aa, Arabidopsis thaliana
  peptide (1)..(341): Ceres Seq. ID no. 13588814
  misc_feature (111)..(157): Pfam Name: Myb-like DNA-binding domain Pfam Description: Myb-like DNA-binding domain
  misc_feature (108)..(244): Homolog of NCBI NO: 21321780 NR Description: putative Myb/Myb-related protein
  misc_feature (44)..(214): Homolog of NCBI NO: 25403271 NR Description: protein T24P13.16 [imported] - Arabidopsis
  misc_feature (44)..(214): Homolog of NCBI NO: 18396049 NR Description: myb family transcription factor [Arabidopsis
  misc_feature (92)..(220): Homolog of NCBI NO: 15222362 NR Description: myb family transcription factor(MYB105)
  misc_feature (108)..(252): Homolog of NCBI NO: 15219462 NR Description: myb family transcription factor(MYB54)
  misc_feature (108)..(252): Homolog of NCBI NO: 11358543 NR Description: myb-related transcription factor MYB54
  misc_feature (71)..(273): Homolog of NCBI NO: 34903242 NR Description: unnamed protein product [Oryza sativa (japonica
  misc_feature (161)..(341): Homolog of NCBI NO: 11358544 NR Description: myb-related transcription factor MYB56
  misc_feature (98)..(341): Homolog of NCBI NO: 9759057 NR Description: Myb-like transcription factor-like protein
  misc_feature (19)..(341): Homolog of NCBI NO: 15238028 NR Description: myb family transcription factor (MYB56)
SISLLFLVSLPLIPKPRNMNPNLLEKDLRGKETTNGSIRYKEANNFRSLPNSHTAACKTSLNNPSISRNHPHNKSASVLESEDEHGNERGENEKSLRMRGKSGINTKVCSRGHWRPTEDAKLKELVAQFGPQNWNLISNHLLGRSGKSCRLRWFNQLDPRINKRAFTEEEEFRLLAAHRAYGNKWALISRLFPGRTDNAVKNHWHVIMARRTRESQRQRQQPPPTLSRDAEMTVSSSCRYNQGKFINEEDDDDDVSAVSTCTTELSLTPPSSAYQPRFFNYDSTLASGKDGQCVQRAEVNGIYGKKMDHQNHHTISVSERKVEMKMRSGYYYFDFLGVGAS

SEQ ID NO: 49733 - protein, 323 aa, Arabidopsis thaliana
  peptide (1)..(323): Ceres Seq. ID no. 13588815
  misc_feature (93)..(139): Pfam Name: Myb-like DNA-binding domain Pfam Description: Myb-like DNA-binding domain
  misc_feature (90)..(226): Homolog of NCBI NO: 21321780 NR Description: putative Myb/Myb-related protein
  misc_feature (26)..(196): Homolog of NCBI NO: 25403271 NR Description: protein T24P13.16 [imported] - Arabidopsis
  misc_feature (26)..(196): Homolog of NCBI NO: 18396049 NR Description: myb family transcription factor [Arabidopsis
  misc_feature (74)..(202): Homolog of NCBI NO: 15222362 NR Description: myb family transcription factor(MYB105)
  misc_feature (90)..(234): Homolog of NCBI NO: 15219462 NR Description: myb family transcription factor(MYB54)
  misc_feature (90)..(234): Homolog of NCBI NO: 11358543 NR Description: myb-related transcription factor MYB54
  misc_feature (53)..(255): Homolog of NCBI NO: 34903242 NR Description: unnamed protein product [Oryza sativa (japonica
  misc_feature (143)..(323): Homolog of NCBI NO: 11358544 NR Description: myb-related transcription factor MYB56
  misc_feature (80)..(323): Homolog of NCBI NO: 9759057 NR Description: Myb-like transcription factor-like protein
  misc_feature (1)..(323): Homolog of NCBI NO: 15238028 NR Description: myb family transcription factor (MYB56)
MNPNLLEKDLRGKETTNGSIRYKEANNFRSLPNSHTAACKTSLNNPSISRNHPHNKSASVLESEDEHGNERGENEKSLRMRGKSGINTKVCSRGHWRPTEDAKLKELVAQFGPQNWNLISNHLLGRSGKSCRLRWFNQLDPRINKRAFTEEEEFRLLAAHRAYGNKWALISRLFPGRTDNAVKNHWHVIMARRTRESQRQRQQPPPTLSRDAEMTVSSSCRYNQGKFINEEDDDDDVSAVSTCTTELSLTPPSSAYQPRFFNYDSTLASGKDGQCVQRAEVNGIYGKKMDHQNHHTISVSERKVEMKMRSGYYYFDFLGVGAS

SEQ ID NO: 49734 - protein, 244 aa, Arabidopsis thaliana
  peptide (1)..(244): Ceres Seq. ID no. 13588816
  misc_feature (14)..(60): Pfam Name: Myb-like DNA-binding domain Pfam Description: Myb-like DNA-binding domain
  misc_feature (11)..(147): Homolog of NCBI NO: 21321780 NR Description: putative Myb/Myb-related protein
  misc_feature (1)..(117): Homolog of NCBI NO: 25403271 NR Description: protein T24P13.16 [imported] - Arabidopsis
  misc_feature (1)..(117): Homolog of NCBI NO: 18396049 NR Description: myb family transcription factor [Arabidopsis
  misc_feature (1)..(123): Homolog of NCBI NO: 15222362 NR Description: myb family transcription factor(MYB105)
  misc_feature (11)..(155): Homolog of NCBI NO: 15219462 NR Description: myb family transcription factor(MYB54)
  misc_feature (11)..(155): Homolog of NCBI NO: 11358543 NR Description: myb-related transcription factor MYB54
  misc_feature (1)..(176): Homolog of NCBI NO: 34903242 NR Description: unnamed protein product [Oryza sativa (japonica
  misc_feature (64)..(244): Homolog of NCBI NO: 11358544 NR Description: myb-related transcription factor MYB56
  misc_feature (1)..(244): Homolog of NCBI NO: 9759057 NR Description: Myb-like transcription factor-like protein
  misc_feature (1)..(244): Homolog of NCBI NO: 15238028 NR Description: myb family transcription factor (MYB56)
MRGKSGINTKVCSRGHWRPTEDAKLKELVAQFGPQNWNLISNHLLGRSGKSCRLRWFNQLDPRINKRAFTEEEEFRLLAAHRAYGNKWALISRLFPGRTDNAVKNHWHVIMARRTRESQRQRQQPPPTLSRDAEMTVSSSCRYNQGKFINEEDDDDDVSAVSTCTTELSLTPPSSAYQPRFFNYDSTLASGKDGQCVQRAEVNGIYGKKMDHQNHHTISVSERKVEMKMRSGYYYFDFLGVGAS

SEQ ID NO: 49735 - DNA, 2627 bp, Arabidopsis thaliana
  misc_feature (1)..(2627): Ceres Seq. ID no. 13588719
  misc_feature: MA Experiment ID: 20000173 Result: Down-regulated in Transcription
  misc_feature: MA Experiment 20000173 PARAMETER Experiment Name: At_42deg_Heat_P Parameter: Age (day) Value: 14
  misc_feature: MA Experiment 20000173 PARAMETER Experiment Name: At_42deg_Heat_P Parameter: Organism Value: A. thaliana
  misc_feature: MA Experiment 20000173 PARAMETER Experiment Name: At_42deg_Heat_P Parameter: Plant Line Value: WS
  misc_feature: MA Experiment 20000173 PARAMETER Experiment Name: At_42deg_Heat_P Parameter: Temperature (deg C) Value: 42 vs. 22
  misc_feature: MA Experiment 20000173 PARAMETER Experiment Name: At_42deg_Heat_P Parameter: Timepoint (hr) Value: 6
  misc_feature: MA Experiment 20000173 PARAMETER Experiment Name: At_42deg_Heat_P Parameter: Tissue Value: Aerial
  misc_feature: MA Experiment ID: 20000184 Result: Down-regulated in Transcription
  misc_feature: MA Experiment 20000184 PARAMETER Experiment Name: At_Shoots__P Parameter: Age (day) Value: 7
  misc_feature: MA Experiment 20000184 PARAMETER Experiment Name: At_Shoots__P Parameter: Tissue Value: Shoots vs. Whole Plant
  misc_feature: MA Experiment ID: 20000439 Result: Up-regulated in Transcription
  misc_feature: MA Experiment 20000439 PARAMETER Experiment Name: At_Roots__P Parameter: Age (day) Value: 14 vs. 21
  misc_feature: MA Experiment 20000439 PARAMETER Experiment Name: At_Roots__P Parameter: Organism Value: A. thaliana
  misc_feature: MA Experiment 20000439 PARAMETER Experiment Name: At_Roots__P Parameter: Tissue Value: Roots vs. Whole Plant
  misc_feature: MA Experiment ID: 20001451 Result: Down-regulated in Transcription
  misc_feature: MA Experiment 20001451 PARAMETER Experiment Name: At_Far-red-induction_P Parameter: Age (day) Value: 7
  misc_feature: MA Experiment 20001451 PARAMETER Experiment Name: At_Far-red-induction_P Parameter: Light Value: Far-red vs. White
  misc_feature: MA Experiment 20001451 PARAMETER Experiment Name: At_Far-red-induction_P Parameter: Organism Value: A. thaliana
  misc_feature: MA Experiment 20001451 PARAMETER Experiment Name: At_Far-red-induction_P Parameter: Plant Line Value: Columbia
  misc_feature: MA Experiment 20001451 PARAMETER Experiment Name: At_Far-red-induction_P Parameter: Timepoint (hr) Value: 24
  misc_feature: MA Experiment 20001451 PARAMETER Experiment Name: At_Far-red-induction_P Parameter: Tissue Value: Whole Plant
cagggcctagctcctccgtctttacgctctctcatcaaactcgagaaaaaaaagtggcgcctctgcaatttcaattttcaaatcctaataatttttctctcgcttcccggagaacggaaccctaatttctcgacgcagacatgattttgagaactccgcagccgaagaggctcaggtccgacgccggagaaagccccttccccaccggcgctactggttccggcaatcagctaatcatctacgaagattctcctcttcctgctcctgctccgctacaaacttctcatgatcattcggcggatcaacatctttgcacctatcaatgccgccaaatggttaaagctgatgttctagatgccttgagcacagcagagaaacaagttgaggaatctaaaaccaaattacagactcttaatgccaacttcaccgaagcagatgctgaaagaaagcattttcgagataaattcttatactcagagcaagagcttgctgctgctaaagcgcgtgagaaaatgcttcaggagcagcttcttatggagatcaacaattctcaagagcggtataccaaagaactacaatcttgccatgaactggaggtaaaacttcaaaatgaaatgaaccttcgaaagaaagcggagtcttctgctgcaacagctgaggaaaaagctaaacttttggaggataaactaactcagctatctggaagtgtggacagggagaagaaacgtctcaacaatgatattgctcaactgggtaaagaagcaaagctttctgtggctaggattggtgcagatcttgaaaggatgcaatgtagggcacaaaatgctgagacggaatcaaatcttttaagatcacaactggagcatcttaaactgatatttgacgagtgtttgcaagaaaagactgaagtagacaagaagctatcgtcattcacttcggaggcagcatcttcttcagataacagtgtattggttaaacatcttcaggaagaacttaaacgctatgaagctgaagtgcgagaagctagaaagttaaaatcacggcatttagatgcggagttgttgaatgtgaacttattagaagaacaaagccgtagggagagggcagagtcagagttatcaaaatttcatgacttgcagctaagcatggaaaagttggagaatgaattgtcctcttggaagtcattgctaaatgacattcctggtgtgtcctgtcctgatgacatagttatgagattctcggtgctacagaatgaggtggttcaaagcactatgaagattggggaagcaagtacccgtattaaacaactggaggagacgctggaggctatacaacttggcagacagaatgctgtaagtgaggctgcattagcgaaagagaaatctgaggctctcaaaacagacgtgaagagaattgaagtaatgctcactttggtcacggaggagaaagaacagttgaaagctgttgttaatgaattaaggaagtcaaacagtgaaggatctgtgtctggagccgcagatggagcccttattcaggggtttgaatcttctcttgcaaagaaggagaactatattaaggatttagagcaggatctaaatcaactgaaggatgtcaataatcgtcaacgtactgaaatagaacttctaaatgagaaactagttgatgaagcaaggaggaataagtcgctggaaagggatagtgatcgtcttcgctctgagatctctttactggagtcaaagctgggtcatggtgattattctgccgcaaatacaagggttttgcgcatggtgaatactcttggtgttgaaaacgaggcaaaacaaacaatagaggctttacaagctgagttacagaagacaaaagaaagacttcaagctgttgaagaattaaagagccagtctggagatgctgggaagctagttgactctcatataactggaaagattgctcaactaaaagagcaaaatgctacgcttgaaaaacgtgaagagaggtacaaaactgtttttgctgatagaatttccgtgtttagaagggcttgttgtgagctttttggttataagattgtaatggacgaacatcagcgtcccaatggaatcccagtgactcggtttactctccagtctatatatgctcaaagtgatgatgaaaaactcgagtttgaatacgagtcaggaaacaccagtattctaaacaatgagtatgcctctcagggcgacatagcgaagcagatagaaatattcatcaggaaattcaactcgattccagcttttacagccaacttaacgatggaatcattcaaccgtcggacgctatattgagagcactgcgtccttatttccaactctgtgttttgtatatttctaaagcctgctgaatagaaactgaaactcgaaagccgcagcttaaaacactggccttatctatgtctacctctggttcgttatgtctgctataattgtggtgtcagtaactctattttggtatgaaagaaactagtttcgatttactcagaaagaatatctaatgtcattctctgattatgcgtttattactttatagtcaccaaaaacagtaacacttgaatatcaagcaaacagatttttatataaccatgaatttaaaac

SEQ ID NO: 49736 - protein, 726 aa, Arabidopsis thaliana
  peptide (1)..(726): Ceres Seq. ID no. 13588720
  misc_feature (64)..(615): Pfam Name: Myosin tail Pfam Description: Myosin tail
  misc_feature (64)..(615): Homolog of NCBI NO: 24762816 NR Description: zipper CG15792-PA [Drosophila melanogaster]
  misc_feature (36)..(648): Homolog of NCBI NO: 4505065 NR Description: MAD1-like 1
  misc_feature (122)..(614): Homolog of NCBI NO: 7511962 NR Description: microtubule binding protein D-CLIP-190 - fruit
  misc_feature (38)..(724): Homolog of NCBI NO: 4583429 NR Description: spindle checkpoint protein Xmad1 [Xenopus laevis]
  misc_feature (36)..(724): Homolog of NCBI NO: 29725736 NR Description: mitotic checkpoint protein [Cricetulus griseus]
  misc_feature (29)..(722): Homolog of NCBI NO: 19112308 NR Description: hypothetical protein [Schizosaccharomyces pombe]
  misc_feature (80)..(724): Homolog of NCBI NO: 4580769 NR Description: mitotic checkpoint protein isoform MAD1a [Mus
  misc_feature (36)..(725): Homolog of NCBI NO: 4580767 NR Description: mitotic checkpoint protein isoform MAD1a [Homo
  misc_feature (36)..(725): Homolog of NCBI NO: 4416457 NR Description: mitotic checkpoint protein [Homo sapiens]
  misc_feature (1)..(725): Homolog of NCBI NO: 34907340 NR Description: P0471B04.4 [Oryza sativa (japonica
MILRTPQPKRLRSDAGESPFPTGATGSGNQLIIYEDSPLPAPAPLQTSHDHSADQHLCTYQCRQMVKADVLDALSTAEKQVEESKTKLQTLNANFTEADAERKHFRDKFLYSEQELAAAKAREKMLQEQLLMEINNSQERYTKELQSCHELEVKLQNEMNLRKKAESSAATAEEKAKLLEDKLTQLSGSVDREKKRLNNDIAQLGKEAKLSVARIGADLERMQCRAQNAETESNLLRSQLEHLKLIFDECLQEKTEVDKKLSSFTSEAASSSDNSVLVKHLQEELKRYEAEVREARKLKSRHLDAELLNVNLLEEQSRRERAESELSKFHDLQLSMEKLENELSSWKSLLNDIPGVSCPDDIVMRFSVLQNEVVQSTMKIGEASTRIKQLEETLEAIQLGRQNAVSEAALAKEKSEALKTDVKRIEVMLTLVTEEKEQLKAVVNELRKSNSEGSVSGAADGALIQGFESSLAKKENYIKDLEQDLNQLKDVNNRQRTEIELLNEKLVDEARRNKSLERDSDRLRSEISLLESKLGHGDYSAANTRVLRMVNTLGVENEAKQTIEALQAELQKTKERLQAVEELKSQSGDAGKLVDSHITGKIAQLKEQNATLEKREERYKTVFADRISVFRRACCELFGYKIVMDEHQRPNGIPVTRFTLQSIYAQSDDEKLEFEYESGNTSILNNEYASQGDIAKQIEIFIRKFNSIPAFTANLTMESFNRRTLY

SEQ ID NO: 49737 - protein, 662 aa, Arabidopsis thaliana
  peptide (1)..(662): Ceres Seq. ID no. 13588721
  misc_feature (1)..(551): Pfam Name: Myosin tail Pfam Description: Myosin tail
  misc_feature (1)..(551): Homolog of NCBI NO: 24762816 NR Description: zipper CG15792-PA [Drosophila melanogaster]
  misc_feature (1)..(584): Homolog of NCBI NO: 4505065 NR Description: MAD1-like 1
  misc_feature (58)..(550): Homolog of NCBI NO: 7511962 NR Description: microtubule binding protein D-CLIP-190 - fruit
  misc_feature (1)..(660): Homolog of NCBI NO: 4583429 NR Description: spindle checkpoint protein Xmad1 [Xenopus laevis]
  misc_feature (1)..(660): Homolog of NCBI NO: 29725736 NR Description: mitotic checkpoint protein [Cricetulus griseus]
  misc_feature (1)..(658): Homolog of NCBI NO: 19112308 NR Description: hypothetical protein [Schizosaccharomyces pombe]
  misc_feature (16)..(660): Homolog of NCBI NO: 4580769 NR Description: mitotic checkpoint protein isoform MAD1a [Mus
  misc_feature (1)..(661): Homolog of NCBI NO: 4580767 NR Description: mitotic checkpoint protein isoform MAD1a [Homo
  misc_feature (1)..(661): Homolog of NCBI NO: 4416457 NR Description: mitotic checkpoint protein [Homo sapiens]
  misc_feature (1)..(661): Homolog of NCBI NO: 34907340 NR Description: P0471B04.4 [Oryza sativa (japonica
MVKADVLDALSTAEKQVEESKTKLQTLNANFTEADAERKHFRDKFLYSEQELAAAKAREKMLQEQLLMEINNSQERYTKELQSCHELEVKLQNEMNLRKKAESSAATAEEKAKLLEDKLTQLSGSVDREKKRLNNDIAQLGKEAKLSVARIGADLERMQCRAQNAETESNLLRSQLEHLKLIFDECLQEKTEVDKKLSSFTSEAASSSDNSVLVKHLQEELKRYEAEVREARKLKSRHLDAELLNVNLLEEQSRRERAESELSKFHDLQLSMEKLENELSSWKSLLNDIPGVSCPDDIVMRFSVLQNEVVQSTMKIGEASTRIKQLEETLEAIQLGRQNAVSEAALAKEKSEALKTDVKRIEVMLTLVTEEKEQLKAVVNELRKSNSEGSVSGAADGALIQGFESSLAKKENYIKDLEQDLNQLKDVNNRQRTEIELLNEKLVDEARRNKSLERDSDRLRSEISLLESKLGHGDYSAANTRVLRMVNTLGVENEAKQTIEALQAELQKTKERLQAVEELKSQSGDAGKLVDSHITGKIAQLKEQNATLEKREERYKTVFADRISVFRRACCELFGYKIVMDEHQRPNGIPVTRFTLQSIYAQSDDEKLEFEYESGNTSILNNEYASQGDIAKQIEIFIRKFNSIPAFTANLTMESFNRRTLY

SEQ ID NO: 49738 - protein, 602 aa, Arabidopsis thaliana
  peptide (1)..(602): Ceres Seq. ID no. 13588722
  misc_feature (1)..(491): Pfam Name: Myosin tail Pfam Description: Myosin tail
  misc_feature (1)..(491): Homolog of NCBI NO: 24762816 NR Description: zipper CG15792-PA [Drosophila melanogaster]
  misc_feature (1)..(524): Homolog of NCBI NO: 4505065 NR Description: MAD1-like 1
  misc_feature (1)..(490): Homolog of NCBI NO: 7511962 NR Description: microtubule binding protein D-CLIP-190 - fruit
  misc_feature (1)..(600): Homolog of NCBI NO: 4583429 NR Description: spindle checkpoint protein Xmad1 [Xenopus laevis]
  misc_feature (1)..(600): Homolog of NCBI NO: 29725736 NR Description: mitotic checkpoint protein [Cricetulus griseus]
  misc_feature (1)..(598): Homolog of NCBI NO: 19112308 NR Description: hypothetical protein [Schizosaccharomyces pombe]
  misc_feature (1)..(600): Homolog of NCBI NO: 4580769 NR Description: mitotic checkpoint protein isoform MAD1a [Mus
  misc_feature (1)..(601): Homolog of NCBI NO: 4580767 NR Description: mitotic checkpoint protein isoform MAD1a [Homo
  misc_feature (1)..(601): Homolog of NCBI NO: 4416457 NR Description: mitotic checkpoint protein [Homo sapiens]
  misc_feature (1)..(601): Homolog of NCBI NO: 34907340 NR Description: P0471B04.4 [Oryza sativa (japonica
MLQEQLLMEINNSQERYTKELQSCHELEVKLQNEMNLRKKAESSAATAEEKAKLLEDKLTQLSGSVDREKKRLNNDIAQLGKEAKLSVARIGADLERMQCRAQNAETESNLLRSQLEHLKLIFDECLQEKTEVDKKLSSFTSEAASSSDNSVLVKHLQEELKRYEAEVREARKLKSRHLDAELLNVNLLEEQSRRERAESELSKFHDLQLSMEKLENELSSWKSLLNDIPGVSCPDDIVMRFSVLQNEVVQSTMKIGEASTRIKQLEETLEAIQLGRQNAVSEAALAKEKSEALKTDVKRIEVMLTLVTEEKEQLKAVVNELRKSNSEGSVSGAADGALIQGFESSLAKKENYIKDLEQDLNQLKDVNNRQRTEIELLNEKLVDEARRNKSLERDSDRLRSEISLLESKLGHGDYSAANTRVLRMVNTLGVENEAKQTIEALQAELQKTKERLQAVEELKSQSGDAGKLVDSHITGKIAQLKEQNATLEKREERYKTVFADRISVFRRACCELFGYKIVMDEHQRPNGIPVTRFTLQSIYAQSDDEKLEFEYESGNTSILNNEYASQGDIAKQIEIFIRKFNSIPAFTANLTMESFNRRTLY

SEQ ID NO: 49739 - DNA, 1228 bp, Arabidopsis thaliana; identical to SEQ ID NO: 49144
  misc_feature (1)..(1228): Ceres Seq. ID no. 12601521
  misc_feature: MA Experiment ID: 20000179 Result: Up-regulated in Transcription
  misc_feature: MA Experiment 20000179 PARAMETER Experiment Name: At_Germinating_Seeds_P Parameter: Age (hr) Value: 6 vs. 0
  misc_feature: MA Experiment 20000179 PARAMETER Experiment Name: At_Germinating_Seeds_P Parameter: Tissue Value: Germinating Seeds
  misc_feature: MA Experiment ID: 20000180 Result: Up-regulated in Transcription
  misc_feature: MA Experiment 20000180 PARAMETER Experiment Name: At_Germinating_Seeds_P Parameter: Age (hr) Value: 24 vs. 0
  misc_feature: MA Experiment 20000180 PARAMETER Experiment Name: At_Germinating_Seeds_P Parameter: Tissue Value: Germinating Seeds
  misc_feature: MA Experiment ID: 20000185 Result: Down-regulated in Transcription
  misc_feature: MA Experiment 20000185 PARAMETER Experiment Name: At_Roots__P Parameter: Age (day) Value: 7 vs. 21
  misc_feature: MA Experiment 20000185 PARAMETER Experiment Name: At_Roots__P Parameter: Organism Value: A. thaliana
  misc_feature: MA Experiment 20000185 PARAMETER Experiment Name: At_Roots__P Parameter: Tissue Value: Roots vs. Whole Plant
  misc_feature: MA Experiment ID: 20000227 Result: Down-regulated in Transcription
  misc_feature: MA Experiment 20000227 PARAMETER Experiment Name: At_Root-Tips-vs-Tops_P Parameter: Tissue Value: Root Tips vs. Root Tops
  misc_feature: MA Experiment ID: 20000436 Result: Down-regulated in Transcription
  misc_feature: MA Experiment 20000436 PARAMETER Experiment Name: At_Drought_P Parameter: Age (day) Value: 7
  misc_feature: MA Experiment 20000436 PARAMETER Experiment Name: At_Drought_P Parameter: Organism Value: A. thaliana
  misc_feature: MA Experiment 20000436 PARAMETER Experiment Name: At_Drought_P Parameter: Plant Line Value: WS
  misc_feature: MA Experiment 20000436 PARAMETER Experiment Name: At_Drought_P Parameter: Timepoint (hr) Value: 12
  misc_feature: MA Experiment 20000436 PARAMETER Experiment Name: At_Drought_P Parameter: Tissue Value: Whole Plant
  misc_feature: MA Experiment 20000436 PARAMETER Experiment Name: At_Drought_P Parameter: Treatment Value: Drought vs. No Drought
  misc_feature: MA Experiment ID: 20000437 Result: Down-regulated in Transcription
  misc_feature: MA Experiment 20000437 PARAMETER Experiment Name: At_Drought_P Parameter: Age (day) Value: 8
  misc_feature: MA Experiment 20000437 PARAMETER Experiment Name: At_Drought_P Parameter: Organism Value: A. thaliana
  misc_feature: MA Experiment 20000437 PARAMETER Experiment Name: At_Drought_P Parameter: Plant Line Value: WS
  misc_feature: MA Experiment 20000437 PARAMETER Experiment Name: At_Drought_P Parameter: Timepoint (hr) Value: 24
  misc_feature: MA Experiment 20000437 PARAMETER Experiment Name: At_Drought_P Parameter: Tissue Value: Whole Plant
  misc_feature: MA Experiment 20000437 PARAMETER Experiment Name: At_Drought_P Parameter: Treatment Value: Drought vs. No Drought
  misc_feature: MA Experiment ID: 20000439 Result: Down-regulated in Transcription
  misc_feature: MA Experiment 20000439 PARAMETER Experiment Name: At_Roots__P Parameter: Age (day) Value: 14 vs. 21
  misc_feature: MA Experiment 20000439 PARAMETER Experiment Name: At_Roots__P Parameter: Organism Value: A. thaliana
  misc_feature: MA Experiment 20000439 PARAMETER Experiment Name: At_Roots__P Parameter: Tissue Value: Roots vs. Whole Plant
  misc_feature: MA Experiment ID: 20001451 Result: Down-regulated in Transcription
  misc_feature: MA Experiment 20001451 PARAMETER Experiment Name: At_Far-red-induction_P Parameter: Age (day) Value: 7
  misc_feature: MA Experiment 20001451 PARAMETER Experiment Name: At_Far-red-induction_P Parameter: Light Value: Far-red vs. White
  misc_feature: MA Experiment 20001451 PARAMETER Experiment Name: At_Far-red-induction_P Parameter: Organism Value: A. thaliana
  misc_feature: MA Experiment 20001451 PARAMETER Experiment Name: At_Far-red-induction_P Parameter: Plant Line Value: Columbia
  misc_feature: MA Experiment 20001451 PARAMETER Experiment Name: At_Far-red-induction_P Parameter: Timepoint (hr) Value: 24
  misc_feature: MA Experiment 20001451 PARAMETER Experiment Name: At_Far-red-induction_P Parameter: Tissue Value: Whole Plant
  misc_feature: MA Experiment ID: 20001557 Result: Down-regulated in Transcription
  misc_feature: MA Experiment 20001557 PARAMETER Experiment Name: At_Drought_Soil_Dry_P Parameter: Age (day) Value: 27
  misc_feature: MA Experiment 20001557 PARAMETER Experiment Name: At_Drought_Soil_Dry_P Parameter: Organism Value: A. thaliana
  misc_feature: MA Experiment 20001557 PARAMETER Experiment Name: At_Drought_Soil_Dry_P Parameter: Plant Line Value: WS
  misc_feature: MA Experiment 20001557 PARAMETER Experiment Name: At_Drought_Soil_Dry_P Parameter: Post Timepoint (hr) Value: 3
  misc_feature: MA Experiment 20001557 PARAMETER Experiment Name: At_Drought_Soil_Dry_P Parameter: Post-Treatment Value: Re-Water vs. No Drought
  misc_feature: MA Experiment 20001557 PARAMETER Experiment Name: At_Drought_Soil_Dry_P Parameter: Timepoint (day) Value: 13
  misc_feature: MA Experiment 20001557 PARAMETER Experiment Name: At_Drought_Soil_Dry_P Parameter: Treatment Value: Drought vs. No Drought
  misc_feature: MA Experiment ID: 20001906 Result: Down-regulated in Transcription
  misc_feature: MA Experiment 20001906 PARAMETER Experiment Name: At_Drought_Reproduction_P Parameter: Age (day) Value: 35
  misc_feature: MA Experiment 20001906 PARAMETER Experiment Name: At_Drought_Reproduction_P Parameter: Organism Value: A. thaliana
  misc_feature: MA Experiment 20001906 PARAMETER Experiment Name: At_Drought_Reproduction_P Parameter: Plant Line Value: WS
  misc_feature: MA Experiment 20001906 PARAMETER Experiment Name: At_Drought_Reproduction_P Parameter: Timepoint (day) Value: 5
  misc_feature: MA Experiment 20001906 PARAMETER Experiment Name: At_Drought_Reproduction_P Parameter: Tissue Value: Siliques
  misc_feature: MA Experiment 20001906 PARAMETER Experiment Name: At_Drought_Reproduction_P Parameter: Treatment Value: Drought vs. No Drought
  misc_feature: MA Experiment ID: 20001908 Result: Down-regulated in Transcription
  misc_feature: MA Experiment 20001908 PARAMETER Experiment Name: At_Drought_Reproduction_P Parameter: Age (day) Value: 40
  misc_feature: MA Experiment 20001908 PARAMETER Experiment Name: At_Drought_Reproduction_P Parameter: Organism Value: A. thaliana
  misc_feature: MA Experiment 20001908 PARAMETER Experiment Name: At_Drought_Reproduction_P Parameter: Plant Line Value: WS
  misc_feature: MA Experiment 20001908 PARAMETER Experiment Name: At_Drought_Reproduction_P Parameter: Timepoint (day) Value: 10
  misc_feature: MA Experiment 20001908 PARAMETER Experiment Name: At_Drought_Reproduction_P Parameter: Tissue Value: Siliques
  misc_feature: MA Experiment 20001908 PARAMETER Experiment Name: At_Drought_Reproduction_P Parameter: Treatment Value: Drought vs. No Drought

SEQ ID NO: 49740 - protein, 290 aa, Arabidopsis thaliana; identical to SEQ ID NO: 49145
  peptide (1)..(290): Ceres Seq. ID no. 12601522
  misc_feature (212)..(281): Pfam Name: ACT domain Pfam Description: ACT domain
  misc_feature (212)..(281): Pfam Name: ACT domain Pfam Description: ACT domain
  misc_feature (74)..(290): Homolog of NCBI NO: 21592963 NR Description: unknown [Arabidopsis thaliana]
  misc_feature (74)..(290): Homolog of NCBI NO: 15238305 NR Description: putative protein
  misc_feature (74)..(290): Homolog of NCBI NO: 15238305 NR Description: putative protein
  misc_feature (1)..(290): Homolog of NCBI NO: 18394414 NR Description: expressed protein
  misc_feature (74)..(290): Homolog of NCBI NO: 21592963 NR Description: unknown [Arabidopsis thaliana]
  misc_feature (1)..(290): Homolog of NCBI NO: 18394414 NR Description: expressed protein

SEQ ID NO: 49741 - protein, 288 aa, Arabidopsis thaliana; identical to SEQ ID NO: 49146
  peptide (1)..(288): Ceres Seq. ID no. 12601523
  misc_feature (210)..(279): Pfam Name: ACT domain Pfam Description: ACT domain
  misc_feature (210)..(279): Pfam Name: ACT domain Pfam Description: ACT domain
  misc_feature (72)..(288): Homolog of NCBI NO: 21592963 NR Description: unknown [Arabidopsis thaliana]
  misc_feature (72)..(288): Homolog of NCBI NO: 15238305 NR Description: putative protein
  misc_feature (72)..(288): Homolog of NCBI NO: 15238305 NR Description: putative protein
  misc_feature (1)..(288): Homolog of NCBI NO: 18394414 NR Description: expressed protein
  misc_feature (72)..(288): Homolog of NCBI NO: 21592963 NR Description: unknown [Arabidopsis thaliana]
  misc_feature (1)..(288): Homolog of NCBI NO: 18394414 NR Description: expressed protein

SEQ ID NO: 49742 - protein, 177 aa, Arabidopsis thaliana; identical to SEQ ID NO: 49147
  peptide (1)..(177): Ceres Seq. ID no. 12601524
  misc_feature (99)..(168): Pfam Name: ACT domain Pfam Description: ACT domain
  misc_feature (99)..(168): Pfam Name: ACT domain Pfam Description: ACT domain
  misc_feature (1)..(177): Homolog of NCBI NO: 21592963 NR Description: unknown [Arabidopsis thaliana]
  misc_feature (1)..(177): Homolog of NCBI NO: 15238305 NR Description: putative protein
  misc_feature (1)..(177): Homolog of NCBI NO: 15238305 NR Description: putative protein
  misc_feature (1)..(177): Homolog of NCBI NO: 18394414 NR Description: expressed protein
  misc_feature (1)..(177): Homolog of NCBI NO: 21592963 NR Description: unknown [Arabidopsis thaliana]
  misc_feature (1)..(177): Homolog of NCBI NO: 18394414 NR Description: expressed protein

SEQ ID NO: 49743 - DNA, 1861 bp, Arabidopsis thaliana
  misc_feature (1)..(1861): Ceres Seq. ID no. 12605081
  misc_feature: MA Experiment ID: 20000185 Result: Up-regulated in Transcription
  misc_feature: MA Experiment 20000185 PARAMETER Experiment Name: At_Roots__P Parameter: Age (day) Value: 7 vs. 21
  misc_feature: MA Experiment 20000185 PARAMETER Experiment Name: At_Roots__P Parameter: Organism Value: A. thaliana
  misc_feature: MA Experiment 20000185 PARAMETER Experiment Name: At_Roots__P Parameter: Tissue Value: Roots vs. Whole Plant
  misc_feature: MA Experiment ID: 20000264 Result: Down-regulated in Transcription
  misc_feature: MA Experiment 20000264 PARAMETER Experiment Name: At_Open_Flower_P Parameter: Age (day) Value: 21
  misc_feature: MA Experiment 20000264 PARAMETER Experiment Name: At_Open_Flower_P Parameter: Plant Line Value: WS
  misc_feature: MA Experiment 20000264 PARAMETER Experiment Name: At_Open_Flower_P Parameter: Tissue Value: Open Flower vs. Whole Plant
  misc_feature: MA Experiment ID: 20000439 Result: Up-regulated in Transcription
  misc_feature: MA Experiment 20000439 PARAMETER Experiment Name: At_Roots__P Parameter: Age (day) Value: 14 vs. 21
  misc_feature: MA Experiment 20000439 PARAMETER Experiment Name: At_Roots__P Parameter: Organism Value: A. thaliana
  misc_feature: MA Experiment 20000439 PARAMETER Experiment Name: At_Roots__P Parameter: Tissue Value: Roots vs. Whole Plant
  misc_feature: MA Experiment ID: 20001556 Result: Down-regulated in Transcription
  misc_feature: MA Experiment 20001556 PARAMETER Experiment Name: At_Drought_Soil_Dry_P Parameter: Age (day) Value: 26
  misc_feature: MA Experiment 20001556 PARAMETER Experiment Name: At_Drought_Soil_Dry_P Parameter: Organism Value: A. thaliana
  misc_feature: MA Experiment 20001556 PARAMETER Experiment Name: At_Drought_Soil_Dry_P Parameter: Plant Line Value: WS
  misc_feature: MA Experiment 20001556 PARAMETER Experiment Name: At_Drought_Soil_Dry_P Parameter: Post Timepoint (hr) Value: None
  misc_feature: MA Experiment 20001556 PARAMETER Experiment Name: At_Drought_Soil_Dry_P Parameter: Post-Treatment Value: None
  misc_feature: MA Experiment 20001556 PARAMETER Experiment Name: At_Drought_Soil_Dry_P Parameter: Timepoint (day) Value: 12
  misc_feature: MA Experiment 20001556 PARAMETER Experiment Name: At_Drought_Soil_Dry_P Parameter: Treatment Value: Drought vs. No Drought
gagaagaattctacaagtgaattcgatttacacttttttttgtccttttttattaataaatcactgacccgaaaataaaaatagaagcaaaacttcatgtcgtggtttctaatagcggtggcgacaatcgccgccgtcgtatcctacaagctaatccaacggctaagatacaagttcccaccaggcccaagccccaagccgatcgtcggtaacctctacgacataaaaccggtccggttcagatgttactacgagtgggctcaatcttatggaccaatcatatcggtctggatcggttcaattctaaacgtggtcgtatctagcgccgagctagcaaaagaagttctgaaagaacacgaccagaaactcgccgaccggcaccggaacagatcgacggaagcatttagccgcaacggtcaggatcttatatgggccgattatgggcctcattacgtgaaggtgagaaaagtttgcacgcttgagctcttcacaccgaaacgactcgagtctctcagacctatccgtgaagatgaagtcaccgccatggttgaatccgtcttcagagactgtaaccttcctgaaaacagagcaaaaggtttacaactgaggaagtacttaggagcggttgcgttcaacaacataacgcggctagcctttgggaagcgttttatgaacgctgaaggtgttgtggacgagcaagggcttgagttcaaggccatagtatccaacggtctgaagctaggtgcttcactgtcaatagctgaacacatcccgtggctcaggtggatgtttccggctgatgagaaggcgtttgctgagcacggggctcgtcgtgaccgcctcactcgagctatcatggaggagcatactttggcccgtcaaaagtctagtggagcgaaacagcatttcgttgatgcgttgctaacgttgaaggatcagtatgatcttagtgaggatactatcattggtcttctatgggatatgatcacggcagggatggacacgacagcgataacagcggaatgggcgatggcggaaatgatcaagaatccaagagtgcaacaaaaagtgcaagaagagttcgacagagtggttggacttgaccggatcttaaccgaggcagatttctcccgcttaccttacttgcaatgcgtggtgaaagagtcattcaggctgcatcctccaacgcctctaatgctacctcaccgaagcaacgcagatgtcaagatcggaggctatgatattcccaaaggatcaaacgttcatgtgaatgtgtgggctgtggctagagacccggctgtatggaaaaatccatttgagtttagaccagagagattcttggaagaagatgttgacatgaagggtcatgattttaggctgcttccgtttggagctggaagacgggtttgtcccggtgcacaacttggtatcaatttggtaacttcgatgatgagtcatttgcttcaccattttgtttggacacctcctcaagggactaaaccggaggagattgacatgtctgaaaaccctggactcgttacttacatgcgtacccctgtgcaagcggttgcaacgcctcggttgccttcggatctgtacaaacgcgtgccttacgatatgtaaatgtcactctgatctaccttttgttgctgctgctcatgctcttgttgttgtttgtagacatgtttcttgtggtttatcatcgaaaaacttttgatgagatttgttgtatcaattctctcaaggagaagtaaagaagccatcttctttgtcattgggtttacgatctttcaatcagtgcaatgttgtaacttgaaacataagaataaacaggaaacaaacatacaaagatatttgcagg

SEQ ID NO: 49744 - protein, 508 aa, Arabidopsis thaliana
  peptide (1)..(508): Ceres Seq. ID no. 12605082
MSWFLIAVATIAAVVSYKLIQRLRYKFPPGPSPKPIVGNLYDIKPVRFRCYYEWAQSYGPIISVWIGSILNVVVSSAELAKEVLKEHDQKLADRHRNRSTEAFSRNGQDLIWADYGPHYVKVRKVCTLELFTPKRLESLRPIREDEVTAMVESVFRDCNLPENRAKGLQLRKYLGAVAFNNITRLAFGKRFMNAEGVVDEQGLEFKAIVSNGLKLGASLSIAEHIPWLRWMFPADEKAFAEHGARRDRLTRAIMEEHTLARQKSSGAKQHFVDALLTLKDQYDLSEDTIIGLLWDMITAGMDTTAITAEWAMAEMIKNPRVQQKVQEEFDRVVGLDRILTEADFSRLPYLQCVVKESFRLHPPTPLMLPHRSNADVKIGGYDIPKGSNVHVNVWAVARDPAVWKNPFEFRPERFLEEDVDMKGHDFRLLPFGAGRRVCPGAQLGINLVTSMMSHLLHHFVWTPPQGTKPEEIDMSENPGLVTYMRTPVQAVATPRLPSDLYKRVPYDM

SEQ ID NO: 49745 - protein, 359 aa, Arabidopsis thaliana
  peptide (1)..(359): Ceres Seq. ID no. 12605083
MVESVFRDCNLPENRAKGLQLRKYLGAVAFNNITRLAFGKRFMNAEGVVDEQGLEFKAIVSNGLKLGASLSIAEHIPWLRWMFPADEKAFAEHGARRDRLTRAIMEEHTLARQKSSGAKQHFVDALLTLKDQYDLSEDTIIGLLWDMITAGMDTTAITAEWAMAEMIKNPRVQQKVQEEFDRVVGLDRILTEADFSRLPYLQCVVKESFRLHPPTPLMLPHRSNADVKIGGYDIPKGSNVHVNVWAVARDPAVWKNPFEFRPERFLEEDVDMKGHDFRLLPFGAGRRVCPGAQLGINLVTSMMSHLLHHFVWTPPQGTKPEEIDMSENPGLVTYMRTPVQAVATPRLPSDLYKRVPYDM

SEQ ID NO: 49746 - protein, 317 aa, Arabidopsis thaliana
  peptide (1)..(317): Ceres Seq. ID no. 12605084
MNAEGVVDEQGLEFKAIVSNGLKLGASLSIAEHIPWLRWMFPADEKAFAEHGARRDRLTRAIMEEHTLARQKSSGAKQHFVDALLTLKDQYDLSEDTIIGLLWDMITAGMDTTAITAEWAMAEMIKNPRVQQKVQEEFDRVVGLDRILTEADFSRLPYLQCVVKESFRLHPPTPLMLPHRSNADVKIGGYDIPKGSNVHVNVWAVARDPAVWKNPFEFRPERFLEEDVDMKGHDFRLLPFGAGRRVCPGAQLGINLVTSMMSHLLHHFVWTPPQGTKPEEIDMSENPGLVTYMRTPVQAVATPRLPSDLYKRVPYDM

SEQ ID NO: 49747 - DNA, 642 bp, Arabidopsis thaliana
  misc_feature (1)..(642): Ceres Seq. ID no. 11407426
  misc_feature: MA Experiment ID: 108573 Result: Up-regulated in Transcription
  misc_feature: MA Experiment 108573 PARAMETER Experiment Name: At_Drought_cDNA_P Parameter: Timepoint (hr) Value: 6
  misc_feature: MA Experiment 108573 PARAMETER Experiment Name: At_Drought_cDNA_P Parameter: Tissue Value: Aerial
  misc_feature: MA Experiment 108573 PARAMETER Experiment Name: At_Drought_cDNA_P Parameter: Treatment Value: Drought vs. No Drought
  misc_feature: MA Experiment ID: 108594 Result: Down-regulated in Transcription
  misc_feature: MA Experiment 108594 PARAMETER Experiment Name: At_Ler-rhl_Root_cDNA_P Parameter: Plant Line Value: null
  misc_feature: MA Experiment ID: 108595 Result: Down-regulated in Transcription
  misc_feature: MA Experiment 108595 PARAMETER Experiment Name: At_Ler-pi_Ovule_cDNA_P Parameter: Plant Line Value: null
  misc_feature: MA Experiment ID: 20000224 Result: Down-regulated in Transcription
gacatttctccaaaatctccgagttctacaattgtgtgatcaatcaatcttctccgatttcaagcttctcgatcaaaagaatcatcatgggaggaggaagagctatggcgacggcagcgaaggttgctggaatcggagttggtaaaggaggattcaagggatttggatttcctccggcgactgagcagtttcgtgttaaaaccgcggcggctgcggcgtcgtctaaaccggtttcggcttcgatttcatcggtggttcattcttctgttgaagaagatgggatgattatgcagagaccggtttgggatgattgggaatttgctgaagaagaaccgattcctagggttgtttttagcaaacctcctagtcttgaagaagctaaagaagctactgaagatcttaaagaagcaattaatttggtgtatatgtcatctccaaagtcgtctgctgctatggaaggatcaaatgatggtggctctgtttccaaaatgctctctggttttcaatcttctgagaacagagctgttgaatcagctgttccacaagttgctcttcaagcatttgcttttctgagtgagaacactgctgcgcaggtatattcggattcctctctctttgcttggttaaatggtctctgctctt

SEQ ID NO: 49748 - protein, 213 aa, Arabidopsis thaliana
  peptide (1)..(213): Ceres Seq. ID no. 11407427
  misc_feature (29)..(197): Homolog of NCBI NO: 15239670 NR Description: putative protein
HFSKISEFYNCVINQSSPISSFSIKRIIMGGGRAMATAAKVAGIGVGKGGFKGFGFPPATEQFRVKTAAAAASSKPVSASISSVVHSSVEEDGMIMQRPVWDDWEFAEEEPIPRVVFSKPPSLEEAKEATEDLKEAINLVYMSSPKSSAAMEGSNDGGSVSKMLSGFQSSENRAVESAVPQVALQAFAFLSENTAAQVYSDSSLFAWLNGLCS

SEQ ID NO: 49749 - protein, 185 aa, Arabidopsis thaliana
  peptide (1)..(185): Ceres Seq. ID no. 11407428
  misc_feature (1)..(169): Homolog of NCBI NO: 15239670 NR Description: putative protein
MGGGRAMATAAKVAGIGVGKGGFKGFGFPPATEQFRVKTAAAAASSKPVSASISSVVHSSVEEDGMIMQRPVWDDWEFAEEEPIPRVVFSKPPSLEEAKEATEDLKEAINLVYMSSPKSSAAMEGSNDGGSVSKMLSGFQSSENRAVESAVPQVALQAFAFLSENTAAQVYSDSSLFAWLNGLCS

SEQ ID NO: 49750 - protein, 179 aa, Arabidopsis thaliana
  peptide (1)..(179): Ceres Seq. ID no. 11407429
  misc_feature (1)..(163): Homolog of NCBI NO: 15239670 NR Description: putative protein
MATAAKVAGIGVGKGGFKGFGFPPATEQFRVKTAAAAASSKPVSASISSVVHSSVEEDGMIMQRPVWDDWEFAEEEPIPRVVFSKPPSLEEAKEATEDLKEAINLVYMSSPKSSAAMEGSNDGGSVSKMLSGFQSSENRAVESAVPQVALQAFAFLSENTAAQVYSDSSLFAWLNGLCS
